United States Patent Application Publication US 2007/0237770 A1 - sequence listing, part 14

SEQ ID NO: 1438 - DNA, 34570 bp, Mus musculus
  misc_feature (1)..(448): n = a, g, c, or t.
  misc_feature (6032)..(6550): n = a, g, c, or t.
  misc_feature (29960)..(29979): n = a, g, c, or t.
nnnnnnnnnnnnnnnnnnnnnnnnnnnnnnnnnnnnnnnnnnnnnnnnnnnnnnnnnnnnnnnnnnnnnnnnnnnnnnnnnnnnnnnnnnnnnnnnnnnnnnnnnnnnnnnnnnnnnnnnnnnnnnnnnnnnnnnnnnnnnnnnnnnnnnnnnnnnnnnnnnnnnnnnnnnnnnnnnnnnnnnnnnnnnnnnnnnnnnnnnnnnnnnnnnnnnnnnnnnnnnnnnnnnnnnnnnnnnnnnnnnnnnnnnnnnnnnnnnnnnnnnnnnnnnnnnnnnnnnnnnnnnnnnnnnnnnnnnnnnnnnnnnnnnnnnnnnnnnnnnnnnnnnnnnnnnnnnnnnnnnnnnnnnnnnnnnnnnnnnnnnnnnnnnnnnnnnnnnnnnnnnnnnnnnnnnnnnnnnnnnnnnnnnnnnnnnnnnnnnnnnnnnnnnnnnnnnnnnnnnnnnnnnnccacagtttgagacatattcagtctcctttgactctgtttcccccacgagcctcctgtatcttctcccttccctccaaaccccttcttcccagtgaatcccttttctgctttcatgtgtgtctgtgtgtgactgcacatgcacacatgtgtgagtgtgtttagttggggtttctggcatgagtgtgggtgaggagttatttacctaaacaaaggcaacttagagtgtctaagtcagcactgaggactctaactcctccttctccggcagccatcgcctgcctatggcacctctgagagggacaggcctcatgaggtgacactatccatgccatacatgacatatattcacacatgagaggatttgatggacccagccttgtacagatctacagtgagttcatgagtaccataaccatgccatgtatggaagatataaaactcatagaaacgccttcccatagaacgccatcttacactctagccatccttccttctgagatgttccctgagtctcagaggtggtgatgctgcggtctcatgtagggacacttcgaccagcacatagtcaccacattcaccatcacctactacaaacaagagctagaatttttttaatttctaattttgagccccaacgtatcttatatatgtgaatccataaaaggaatttgcctgagtggccatcattttttgaaaggtgcagtttacgtgagcatgagcctttaatcctatcacttagggagcagaggcaggtagatcctgtgagtctgaggccggcttatctgcaagtgagttctaggtcggttagggttacatagtaaaaccctgacttaaaacaggcagggaggcaggcaggcaagcagacagacagacagcaaaagagtgaagtaggggagtaagaaggaagaaaatatgagtattatatatactaagtattctttataatgtttattatatgttgtgctggatagtttcatgttgatgacacaatctagactcatttgagaagagggaacctcaattgaggaaatatttccataagactgagctatagagacacttgtagggcattttcttatttaatgatgggcgggggtgagatggggggcacctctggcctagtggttcaggttctcaggctaaagaaaccatgaggattaagccagtaagcagcatcccttcgtggctcctgcatcagctcctgccttcaggttcctgcctggtttgagttcctgcgttggctcctctcagtagactaggactcaggatctgtgagcttaacagagcctttcctcctcacactgcttttgctgatggcactttaccacagcaatggtgaccctaactaagacagaagtgtatgcacaccaagcaggctgcattgaatgcatgtctcactgtggggcacagtcacagtgacaggatacatgatgtatctaacagggactaaacactcaattagagcagaggctgaagctgatcccagtggcagacacttggagtctcagcatgtaaaaaacagaagcaggagggatgccatgagtttgaggccagcccaggtaacaggcaacagcgtgagagatcttgtcaaacacacaaaccagaattacaaaacaaactcagagatatggcttaacagataaaggtactcactgccaagcccgaggacccaagtaagaactgactcctgcaaattgtcctctgtcctccacacacatatgtagaatgctcatgctcatatacacacacatacaaatacatacttgcatgcttacatacatacacacatatatgcatgcatacataatacatactacacacatatacatgcatgcatgcatacatactacatgcatacatgcatacacatgcacacacatatatgcatacatatggcaacaacaatatagagtggaaattaaaatagaccagcaaggtatccgaggcagaggcagcaaagtctgtgtggcatgatggaagtttcagctgttccagagttggccctggggacactcgttctgcgcaaagaaactggtgggttttgctagttgtgggaggtgctgtccttgttccagaaaggtctccattatataatgtgctctttgtgtggacaggccgagagctctgtgggatgggctgggaggtccagtgtggcatgctagctgtgtcagaacagggcactgactggtgtatctaagtaaagaggtccttgtggtgtagggcactggctttctgagtgttcttaggacatatgctagacccgtgactctaaggccagagtcaaccactcggctggggcccagacatcgtgcttgccaagtccttcaggccactgtgtcaagttcgagaaccgctggctgtctgaggcataactgtttggtgtttagagcatcttagaacactgggcaaagcctgctccttgatgaacagcagaagtgctgggtcctccatctggcctttaggtgctgtatctacaatctttctctcagtctctcagccttatacagcacattcacacacagctctcctgtgagagatggctgcttggcccttcatctcaagctccttccaccctgtaccacttagctgtgttacattaacctggtaccactgaaaatattctcaacacatggatagatacatatacaagtgcatccacaggctgtcctgccctccctgttagacacactgccccacgttgtctcttccctggccagtgctcacttagtactcatccgataaacacctgatccaggcatctgacttgctctccaggctgaggtgcccagatacacacatagtccctgtaaccttacggtaaccttggtgtgccaacccaacacctggcctgtttcctccctgcagactacttactacctggtacctaaagacagcagagctgtgtgtgtgggagttggctcccagcaatgacagcctttattgcccacttcctgtgttgactgtaatgtgcttttgggtcctgtgcctgagtgagctgctaaccttcatactgcttccactgctgtctgaagctcagtttccacgtctgtaatgtggtgataacatgattacacctaaaggctgttcagaggaggaaaggaagggagagtgtaaagaatttagcttgatgtatggaacacaacactaagaaacagcctctggaggggttagccatagttttcccctgagacagtcaggaaagtacaaatcctttgcaaatcgtgtggccttgtgcggagttaggtttgatgcctatggagctgcctccagatgctggctctctaaacctttctcactataatcatgagaagaagaaaagaaggaggaggagaaagaagaagaagaggaggagggacagaaggcactgtttctctaccttccagtccccaactatggcaggcaccatgccactaacttctaacacagatgttttgacagttttgtatgaagagtgaatgttaagggttgggcgggcagcctgatatactggcctagcttatgggcaggacttggtttgaacccctggtcctagagggggaaaagagtgtgttgggcatggtggcgcatatctatcaccccagcattccagagccagaggcaagtgggtctctgtgggttcaaggccagtctcctttacacagtgagggcctatctggaaaagaaaaagaaaaagaaataagacggacagacagatacagagtataaagactgagaaaagctaaagttgagagacatagggctgtgtaactgttgaatgctgtaaaaattcaaggttgattttccttaaggacttagaggggccctactcttcctgaggctaatgagctgtgaagtgttactgctcaccactgaaagagacccagaggaagaacaacgaggtctctgcccaggaacagagaagagcactcccagttaataaaaggctgaggcagaggggacccattccctccagcaacgctctaagcctctgtggcacaagttaatttctctgtgggtacaagtgattataactagcagctggaacaaatgaaaatgaaatacaatctattaacagcgaggcataattactgagaaaattccacctgagctggggcttaagcagccacccacacctaagccagacacaaatctggcaaagccaccactggtcacttcagtgagaagcctggggtagaataattcagacttgagaaagctgtccacagggtagaaattgagaatcagaaacaaactgcaaattgaaatgtaatcttggctgtcttacctggaagcacccctaccccagctgactataacagaaaattgaaacctctgccttcatctcttttaagtcaaggaccacagcataggcattgccttctccatcctggagaagctactctggttctatgggcttgaaggtttcagttaccatagcaactctctgcaaccattagcctacaagagctaattttggctcacagttttggaggtatcagtccatcaccggttaacaccattgcttggggcctatggtagcagtatgtggcagaaccacgtggcagaggaggccatctgtgtgacgtacggatgatgctctgaggggatccctggaacccaaacgtccctctgctctacctctgcttctgtttggagcttgggtctacgaggcagtgtcttgccccaaacattcaggtcatccaggatggccctaaactcacagacatccttttgcctcagcattctattatctgtgttaagatagaggggctggagagatggtttagtggttaagagcactgactgctcttccagaggtcctgagttcaattcccagcaaccacacggtggctcacaaccatctgtagtgggatctgatgccctcttctggtgtgtctgaagacagcaacagtgtactcacatatataaattaaaaaattattaaaaaaatattgcagataacaccgggtgtggtggcgtacacctttaatcccagcactctggaggcagaggcaggcagatttctgagttcgaggccagcctggtctacaaagtgagttccaggacagccagggctatacagagaaacccaatcttgaaaaatcaaatatatatatatacatatatatatatgtatatatatgtgtgtatatatatatataacagatagatgttcctccacactgctttaagccccatctctttatttattgacctatatatcttatttatttttattattgtattagtttgtttctctggtgctgtgataagatgggaggaaagggtttatttgacttacacatcataacccgtcatccagagaagccagaaccttgaggaaggaactgaaataaagaccaggaaagagcgctgtttgctgacttgcttccaggctcaggtctagctgccttttatacacctcccaggaccatgtggccatcgctggctcagcacacagtgggctgggctctcccacatcatcagcaatcaagaaaatgtcccttggaccaggcagtggtaacagacacctttaatcccagcactcaggaggcagaagaaggtgaatctctgagtttgaggccagcctggtctctcatctannnnnnnnnnnnnnnnnnnnnnnnnnnnnnnnnnnnnnnnnnnnnnnnnnnnnnnnnnnnnnnnnnnnnnnnnnnnnnnnnnnnnnnnnnnnnnnnnnnnnnnnnnnnnnnnnnnnnnnnnnnnnnnnnnnnnnnnnnnnnnnnnnnnnnnnnnnnnnnnnnnnnnnnnnnnnnnnnnnnnnnnnnnnnnnnnnnnnnnnnnnnnnnnnnnnnnnnnnnnnnnnnnnnnnnnnnnnnnnnnnnnnnnnnnnnnnnnnnnnnnnnnnnnnnnnnnnnnnnnnnnnnnnnnnnnnnnnnnnnnnnnnnnnnnnnnnnnnnnnnnnnnnnnnnnnnnnnnnnnnnnnnnnnnnnnnnnnnnnnnnnnnnnnnnnnnnnnnnnnnnnnnnnnnnnnnnnnnnnnnnnnnnnnnnnnnnnnnnnnnnnnnnnnnnnnnnnnnnnnnnnnnnnnnnnnnnnnnnnnnnnnnnnnnnnnnnnnnnnnnnnnnnnnnnnnnnnnnnnnnnnnnnnnnnnnnnnnnnncatgtgtggtgcacagactaacatttaggcaaagtactcatacacataaaataataaaaataaatctgagagagagagaacaaaggaaggaaaggaaaggaaaggaaaggaaaggaaaggaaaggaaaggaaaggaaaggaaaggagaaaagaaaagaaaagaaaagaaaagaaaagaaaagaaaagaaaagaaaagaaaaaaaattgttccacagacttgcttacaggtccatctaatggagacagttcaactaaggttccttcttccaagttctgtcaagttgacaaccaagattagtcatcacaattacattcagtgtaagtgtgtgtgtgtgtgtgtgtgtgtgcatgcacacgcgcgagcaacacttatgtggacgtcagaggacaacttatgggatttggctgtctccaaccatttgtttcctgaggcaggaaaggggaggggaggggaggggaggggtgggtcctgactcttcctgacattccctctgagtctacaatgcagcctgagaatcactgaaggtacaatgattgagaatcctcaaggagacagccccagatcaattccaggctccacccacctcctcacattgccatcagcatcaccacacccaatgctgtgtccacagtgcaccacacacggcacaattctttctacacactttctcatgcagtcctccatctctctctgtctctctgtttctctctctgtgtgtctctgtgtgtctctgtgtatctctgtttctctgtctctctgtctctgtctctctctctctctgtctctctctctctgtctctctctgtctctctctctctctctctctctctctctctctctctctctcacacacacacacacacacacacacatctccctaatgtccagcttaggtcctacttccacacagtcttccccaacctttgaagtgtctagctatatgaagtaagatgctggttttgattttatccttccaagagtggacttggttagacctagggatggctttttcatgttgtcatcacatccacagatgacaagtttcccttcataaaatccaatggtgggttaggaccaacaacgtgaagtccattaagcacgctgccaagggtagaaggcactacagaaaaggtcacgctaattgcaactaaatatgttcagagtcccgaacaaggaaactcgccttcccgtggtttgtccttgtcacaggctttctggaccactgacaggaaatcacctaaggtcaaagcacaggctgataaggcacccagaaaccagctattcgaaaaatagttgaagacattaggatgtgggttgggacacataagactcacaggcacatgatatctgtacccagaggtcacttgggagacatgctacctacacacacggtcctgtctgaggcccagctgggggtgtcatagaagatacattttgactcagcatgaaggctcaagtttctaattctaaacagtaaaccatcctactctgaaacatgatctaccctcccccttcgcactttattttatggatgggtcttatcacatagacatctttagcctcaaactcagaatcttcctgcatcatcctcccaagtgctggggtgacagacattcaccctcacagctgaggaaccatgatttcatgaggcagctttctcccccttgagtgaggatgctttggtctcctttcttgcatcctctggagaggaggggtgggcagagtgaggcgtgaccggcttgtctttcaaagtccctttccattccttggaatttctcatgctttggtcttttctggacagtgtgctcagagcagcaaaagctgacttgtgtgtgttgctgggcaggaggggcgtgaccgcatggtgtagggttggaaggatgaacagtgcttcgtcagctccagactcaggaagcgccgaggcagtgtatccctgagcagtacaggaccagaagagctggagaggggctccaaccctgtgccctggctttcttcctccttaagaacagttttgggggccagcaagatggctcaacaaggaaagacatttgccaccaaacatgactacctgagtcccacattcccacattgtaggagagaaacaacttccacaagttgtcctctgacctccataggctctctctgtgtgtctatatcgttgtctgtctctgtctgtctctgtctgtctctgtctctgtctctgtctctgtctctctctctctcacacacacacacacaaatagtgccccgtatgtagtacctacatagtgtagtgggtacaatcttacactatcatggactaagtcaggaaatatcctcccacggaagaaaacccaccaggacaagacctggaggggaaatggatcaatgtccaccacaggtcttcatgaacgaagtggctctcaggatgggacagagcaggggtggagagcaggggcagagagagcctgcagagcagctatgatggaagcaggggatgacaaatgtggagtcaggacacttgggtgcaaggttaccaccattgatgcgttacaggatcctgggtaggtcagtctccatctctgggcttcggggtcctcctgtgtaaaattggagctgtgggggtggcctaggtaaccatccatgtcctttcaagctaggtgtctacaagtttacttgtggtggaacgcctttttgacctttttctctgagtcagagacagctcgatggccatatttatactgcactcttgtctggtaatttcattttacattttttcttctagtattcttagggttcttccctttgaaagaacttaactctttcaaacttgagctgaaaagagggaggggcagggttccccctccctggccgggcaaaaggatggcagtcacaggttgatcaagtgccctggctcgcctgggactgaggggtttcccaggacaggggactttctttggttctgggcaaactgggatggttggtcaccctagtgataaggaaagtgagtgtgtagaggaggctgggagtactcttttcttagccccttctatgaggagttccccaagtctatatgcatccctcatagagatccagtgagcagaagggaggggcagccttcacaccagacgcctggcccagttcagaccatgagtgccaggaaaggcactgaaatgcttgcgtagtactgactctgtggggggagtttccctttttcttaaaaaaaaagaaaagaaaagaaaagaagggggaaaacacacacacacacacacacaccagaaaagactcagtggaaaaaaaaaaaagagatgagtcgagaggcaagcagcaagccctcactggccccaggagaccgcacatggctcatttgtttaagtttgcagctgacgcctgccacctctccataggcaccagcacaaaccttctcgacatcagacagtgaccagcctggtgacgcagagctgcagctatgaactacccactaaccctggacatgggctccatcacatacaatatggatgacctggtgagtcgagtcatgtggctccctgctgctctggtcctgcttggaactttaaatatactatgtcaaggaagaggggatagcttgggaatcccgccgcaaggattatagaacataggcaaatacatccacttttagactcttattgtctcccatatctgttgcccttaatagatgccaaagggaggtgggagacacaggatcaggtttggcatctcctgctgtgtgactgaggacccagctctgcctcttgcttctttaacagagaagtttatcttgtctccctgagttaaaatggcaaagtcatttggaaggggtatttttgtttgctgcttttttttttttttttttttttttgagactgagcttctctgtgaagcaagcattggctgtcctggaactctgtagaccaggttcaaactcacctactacctgccaagtactgagattaaacgtgtgcgctgccactgctgctgccgccgctgccaccaccaccacctggctggaagttttcttcatgtcagtttgctggcagtgctagtcaatcaggcagtgtggagttgttggctgggagaggaggggtgggcagagtactcagttggtagagtgcttgccgagtgtgcatgctgctaggctcatcctcagcttgcacagagtgtggtggtacacacctataatcccggcatgagaaaggtggaagcaaaagactcaggggcgggagcctagaacacattgagaccttgtctccaaaagaaggtatatataattgttcatcttgctgaatgacttgatcattaaggcacaatacaacatccatctgtgttgggtggagagactgagaacataatctttgccctcaagtcgctgatggtccagacaaggtggagctaatccctggctggaaggctttagacagtgattttgtatagatgaagaaagcatgaggccagacgtggcaaggaagaggatcccaggggtcaaagtcatgcagctgtattgctcctaaaaacaccttggagcatgtcactttgccctgggagggactgtcatctctagagacacagtatcttggaagagtttcttaggtgggagcttaagaaagaaacaagcaaagaaaggaagcagtgcctggcaccctctccgccccccgcctgagtgtcttccagttaagcataggagttcacttgacttggctgctattgaactaccaaaggatgttgttaggagcacttcaagtggaaaaacccagggctgtggggcagtgggttatgggcatcagtagacttagaaccttcatcatgaccttattctctatgaactccaaacccagagccctatcagctctcctgccctaatcacaccttgaggtgtttccccccgactctcccagctcgccaggatctgtggtctgctttatcattcttcccactatgtcgctgggcttgctgaacctgctcagctggcatcacttgggcactcatggggattctgcaaataaaaggacctcaggcttggctcaatgctttctgttgttgtcttgaaaaaatttggggggtggggttgtttgttggcttgtttgtttgaaacagagtctctgtgtagcctaaatctgcttcaaactcatagtcctcttgcctgagtcctttgaaaacctaactgttctacaggggagtgtgctcccacgcttgcttgccctcatccccactgccagctgcccctgatatggttaggtggtatcttctgccctcaagctgaccatcagccctgacccacttggatgcctttgtaaccacctggagacctggccgttcctggcttctgagaaacctcaagagtttcccctaactgcacgcctcacatcacagtgtgacctactagagacaggtggtagtgggggccagagggacagcaggacgtgctcatgacatgaagcaaacctacattccaaggagagaagcaaggtaacttctttcatgacacatatcaaacccaaggccctgagctatgtgcccagacatctcgctaggagtccaggggttctaagacaaccctgtccctggagtccttcaatcagacacgttcttccttcacccaccacccactctcttcaagggtggttgtcactctgaaacacagatcctcctctttggccccactcaccttctaaaaggccatgaccggccttggcatactgccctattctgtcatagcatgcatgtcctggaaagacagaactggcagaaaagtttagcattagtggcttctccataaaacaatgggtttctgttttgctctgtctgtctgtcatactggacaagacagtatgacaaggcctcctgcatccccagctctcccaaggagcacttcctgccctgtgacagacacttggaaggactgcaggcttggctcaatgctttctgttgctgttttaaaaaaatttgggtgggcgggcgtgtttgttggcttgtttatctgaaacaagagtctctatgtagctaaatctgcttcaaactcatagtcgtcttgcctgagtcttttgggtactggcattataaatctctgaggtcttagcttgacatttttcttaggcgtctgctgagcttctcccattgactttattttctgctcctcactccctgtctttgacccagctgattactggcccacttctccagatcagaaggttcaacactcccaactctgagttctgaaacaacagtcttgataagtcaaccatcccttgtcttaattttaattttctttttacatttgtttatttatagtcaacagaggataacttgtaggattcagttctttctttccagcatgcgtgttctagggacttaactcagctttttaggcttgatggcaggtgccccattaagtgtctcaccaactactctttttattatttttaatgacaactgattttgagacaggatttttttcccctttgcctttttgagacagggtttctctgtgtagccttgccaatcttggaacttactctgtagaccatgtcgatcaggctggcctaaaacttagagatccaggttggagagatgactcagtggttaagagaactgacagctcttcctaaggtcctgagttcgaatccagttaaccacatggtggctcacaaccatctgtaatgagatctgacaccctcttctggtgtgtctgaagacagctacagtatacttagatataataatgatacataaatctttaaaaaaacaagaaacaaaaaacttagagattcgcctgcctctacctccttattgctggggttaaaggtacgcaccaccactgccatctgagacaggatttttctaagtagttcttcctgtccagaaacttgctatgtagattaagctggccctgaactcagagatctgtctgcctctgattttcaagtgctgagattaaaggtacgctccactacaccctgtccatgtagaccaggctggcctcgaagtcagaaatcctcctgcctctgcctcccaagtgctgggattaaaggtgtgtgccaccactgcccggctaacagcgaatttttaattgttgttgttgttgttattattattattatttattattattattattttgtgtgtgtgtgcgtgtgtgtgtgtgtgtgtgtgcgtgtgtgtgtgtgtgtgtgtgtgtgtgtgtgtgccatgtgagtggaggtcagagagcaacgtttgagaattccttctctccttcttccatgggttccagggagcaagctcatcatttgtcagttgtcaggcatgtatagagagcaccttttcccatcgaggctcttttgtcccttgaactcaaagatcacctttgatctcccacacacttgctggccatgggcagctactaaacttcttgatggctaagagccaggagaagaaccctagcacctagagtaggcatggccagaggtcaccccactctggcgaggtgggccctggtggccctggaggagatcctgtccaggagaaccaccatgagttctttcctgtcactcctcaaatcagaggtccgtggtggggcttgtctggaacccacacagactagttctgaaataaagttctaggcgtcaggaggggaggctgccatagaacagggtgaagctggtctaagtctcgcttccctgacctttcctcatagacgatcaccaggagccatgaactcattgtgaccagagcatcacaggtcacagtctgtccacacacaagtgtctcagttcagcaagggagttaaaaagaggaaccaaaactcgctcaagctgtttctgggctttacctgagtggaggggagggtccccccgttctaaccacgtgaaaagtcccacagaagccccgttagaggaagcctcaaccgagggtaactggagggatcagaaatgaggggaaacctgaaaccagccttcgaggggttgcattagggagaatataggttctattactcagatatcacagaccgcattaggaacatatctctttataagagacacggtctgcctgttcttattcctttgggggacacataaaaagcaacaggtatttgggatgcgaagtcagaatacaggaatgagtttcttttgggaatgaaagacaaagtatttcaaatctacaccatcccagaaggtccagcaagatggttcagagggtaaaggtgcttgctgccaaccctgacgacctgagttcagtcctgcgtctcatatggtaaatagagagaaccaactctgaagttgtccactgatcttttgaaatttccacacagagataaatataataattttttaaaatttaaagcaagtgttatctcaggaggcagctttaagaggttactgggagattcgtgtgcacgttcctcaaatacatgaccccatgttcacagtgtagacagccattggttctcaagatgaactcattttaaacctaaagacgtggcaaagcgatagttcttccacgtttcccccagagccaagcatgacgccaatgactaagcatttaagagattgaaacagggagggtcataatgttcagggtatcctgagttcaaggctagcctgggctacacagtgatatcctgtttttaaaaactacacactggggctagagagatggctcagtgactaagaacacttgctgttcttccaagtttagtttccaatacccacatctagtctgatgagctcttctagcccccaagaacacacacacataagtggcagacacacacaatatatatatacacacacacagaaacataagtaaaataaaaagaaatctctttaaaaaatctaaaaatcaaaagcactacatactcctaatggccaaaaccctcaggcagagatggaagaggacccagtaggtttgctcctttgggggaaaagaaggacatggggcacatgacaaaccagagtcctgaattgtctttggggaattctgaaagaagagtgtgttgagaagaacagatctacacacacacaacccagtctcattcctatagactgcaccctgcaagttactgaaggctgaacttaatagcctctcccagatcccaactggtggctggaaacacttacgtaaaaggagacataagctcagcagaacctggaaacacaagcctgtaatcccagctactcaggagactaaggcaggagggttcaaaattgaagacattgcctacagagtgagttcaaagccatcctgggcaacttagtgacatgacactgtcttaaaacaatgagtaagggccaggtggtgcctgtgcacatctttaattccagcactggagaggcagaggcaggcagatctctgagttcgagaccagcctagtctatagagtgagttccaggacagccagggctacacagagaaattctgtcttgaaaacacaaataaggcctggagagatgactcagcagttaaaagcattggctgcacttccagtgatcctgagttcaattcccagctaccacatggtggcccgcaatcatctgtaatgggatctgatgccctcttctggtgtgtctgaagacagctacagtgtacttatatacataaaataaatattttttttaaaaaaatctacatctgttttaaaaacacacaaaacaaaacaaaagtaagtaaatagttatgctcttttgctatgaaagtatgaggattcaagttcacatacaagaggatccctggagggctggaggaagggctcagcagttaagagcaccggatactcttccagaggtcctgagttcaattcctagcacctacatggtacaaccttatataactccagttccataggatccaacactctcttctggtatgtgcaggctcatgcatatgggcacagacatatatgcaggcaaaacaccagtacacatgaagtgaaaataaagtaaagaagttcatttaacacttgggaggcagaggcaggcggatttctgagttcaaggccagcctggtctacaaagtgagttccagggcagccagagctacacagagaaacaccctatctcgaaaaaccaaaaaccaaaaaccaaaaaaaaaaagttcatttaaagggaggggggatactggcactcagtggtcagcaagtctacataatcagtgagtttaaggttcagtgagactgtctcaacagataagatggagaatgctgggagaagacacctaatatctacctctggcctccataaacacacacacaaacaataccccccccatacacacacacacagtcacagtcacagtagctcagtggaagagcacttgtctagcttgcaatattgctccacagagaggagcctgggggaacatacaccgggcaggaagccctgtaggctcctcagggggggattagggtgggcctgtgggcaagagaagcagagactgctgtgggaggggagctgagaccatgctaggaagcaactcaaatctgtccacacagggcgtgacagacaaccaggacagcagtgaacagcagactcgagaggcaggggtgactttcctgacacaggaactcttcccttgcacatgagttcaaagatggtggatcactgtgcctgttagaaagttgtccctccatcgactggagctacttgggagcttctgcccagtcctgctctatacgtgaggctcacatcggagtctagctgtctcctccgaaccaaaggcccttcccagcccttgaagacagttcccataggcttcaggcttctttttcctatttcctacgttcatagtacctggaaatgcctttccagggagggattttccaaacctttcaacagagccaactgacctgaaaaagagttcacctcatctagaaaaagcctatgacggcctgaacgcgcaaggaaggtgtgtgtgtgtgtgtgtgtgtgtgtgtgtgtgtgtgtgtctgtctgtctgtctgtctgtggctctgtgtatatgtgtggtgtttgagtcagggtctaagtatgctaactaggctggtttcaaactcatgagctcaaatgactcgttcgactcagcttcccagctaacagagactaccggctacaccccaacccagctctaacttgccccctgcaataattctacctggtgaatttgggttccccatctctgcttatgaaggactctgcattgttagtgttctccagccacaccccatccaaagcatcctgaattctagaagaaaatccagggtacatccttaaggaatgttccccagcctgctcccagagaaatccagtcagcaaaccctcacaggctgcctgctagacaactcgaagaaacacacacacatatcacacacagagagagacacacagacacagacacacagacacacagacacacagacacacacagacacacacacacacacacacacacacacacggctagacattttgcctgtcccagggagagaccccagtcttgtgtagagggaagaggagcctgtgtggatcccaacaggaagaacactttgcgtcgcttacttcttcttcccacccaacctccaacagcaggaccagcttcccatcctcctggcccagagcccacagtgctttctaaatacatccctagcttatgtctggcatcattccaggcagcatccgttcccatgggacatgcatccctagagcttgcgtgtacgctgtctgtgttctgtttcagtgcctgtctatgcagcagagcagtgtggtcccacctgggcatatgtctatgtctatataggatgtgtgttgcccatcatgtgtacccacagtgcgggtacacatgagggtttctgctgccttttgtagccaagaatgagggagccattcatcccatcgctgacaatgcactcttcccagtgtgttagctaggccagctccctttgacagcatctttccaccaggccagagccaaccctacctaaggcttctctctagggtttgatggagaggagaagtacccaagctcctgtgtatggggagtggctttaacacttgtcgagcttcaaaaatgtttgacaccttctgttgatttataccacactagcttcctcccatcttctcctcctctgaagactttaccaaaacaatacctgttggcatggaggaagagacagaccctcacccccttacctgtcccagtgggaatatcgcactgattgaacttcaagtggaaaggaagttcactagcctagataaaaacttgagccgttatcatgaaaggcctttaggccagacaggctggctagactcacatgctcccctagataggttcggctgttaccaaggtgaatcatcacatctccaccatctgcctgatgcctgtgctcaccagttcaccccacagcttccccctccacctcctactgcagagtcagagtcaaatagctctactcagttctactggaaacaactccctaaagggatagagagcccaagttagactccagaggcagagtttacagacagatgcaaacgtgtaaatccctgctgagccccagatggagtcaacttgggggccttgaaggaaggcaagagtttagagaggtggacttgaaaaaggagcgaaggtgacaggaagctgcctgggttgctggggacaggtggctgtggcacacatacctgaggaatagcatgtctggtgcagtgaagtcgtaggtaaggtctaatacatcaaaggagtgtacatttgggagaaatttatttttgcagggctgaggctcaaactctgggccctgtatatgctaggcaagcatctacctgctgagatgcactgccaggactactttagataaaaatgtaaaggccttctacctggggcattgaagccctatctaacaggtctattgttttcaagagttgtagggccattctctctctcacaggctgtttttgcacacgctaggcaagggctctactccaaaaatgtttgtttgttatagagacccaagcaatacttgccagcctggaactcatgtagatgaaactgtctttgagcccttcatctcctggctcttctctctagtgttaggataacagcctgagccaccatacctagccatatatataaatggttttactattgtatacgatatcagaaaaacaagacaaaagacacctgtttcttacaggtgatggggagtcattaaaggacactagatctatagggcctagttaggtgtggttatttgacctgtgtaggtgtagatttggtttgtttgtttttgagacatagtctggctataccgacaatggaactcaaatcgtgggcttaagccaccctcccccctcagctcctgagaagtgcagggctgggatgtgagtacgaggaagctccccctgtccactgggtaggaagtggaaaagaacagaaacagtagttagaaaaggacccataaggccggagcgaggctccaaggtcaagagcacttgctactcttgcagaggactggggttcaattcctagcacccacatagtgatttccaccatctgtaacctcagttccaaggaaaccagggccttcttctgacctccatgggcactaggcggtacatgcacacatacacacaggcgcaggcaaaactctcatacacggaaaataaaaaggtttgaagtctaatttaaaaaaaaaaatgaaagaaaagtaaggggaaagacccatagagagacaggatgggggacaggataaggtgacggcagaagaagggacactggagagtgggtagatagtgctgccattgtaccatgtgtccccatcctctctgaaagagccacctgctctagggaccaaaagaccaagatggggaatcagtttacccatcaggggaagtgagtgtgtcacccacaacagtgtgcctggtggcaagaaagatttaaggtaaccatgaaccaacccctactggcaggagcccctcactctcctcaaagggggtcagcacagagatgagatcgccagagcctagaggacagaacagcccactgtctcttacttccctggggcccatcacttatatcactgtgttttgaacccatagtagttcgggtgtaattggttttgtattgcccagggaggaggttgaccagggcagggcagggcaggaagaacagagtaaggagctgaggaaacgcaggtgcagggcagctgtgagtgaaaggtatgaaaacaggcaccctgtcttcctctgtggttagcaggcaaacaacctgagagctggggtgatggagggcagtggcagatggggaggaggacgcggaggtagggacttccggagatataacaggcacgcccccttcttttccactcagaaaacgcttcctccctaccctgcgcctagtctccctgtgtgtgactcatatttgcctccgctgctgggttcctgtgcctagggagtttactctctgcttgggaagtagctggaaacttaggctccgcccctttcccagaagcctttggagggaagtgtgggtagtagctctcattgtagcgttattgattgactaaagacaggcaaacgtgcctttaagcaaacctcctctttgagcaagacaggtctgtaaaataagaggaagattacatacctcaagcgtgtgtggattaaaccaaataggaggccatttcctcagtttcagcaataatcaagacaggaagaaggggagaaatttagaggaagtaagccagctacatcagcactcaaccattccccacccccagtgagagcttagatttactacccactgtccttacagaattggaatattggcttcttgttcctatcaggttccattcccaaatgtcagtactgactgcaatccctaagccttccatctttaagaacaccctaccactttgtgagtgactactggtccagtttacatacaaacaaacgaacaaaaacgaaagaaaagaagagaaaagaaaagacctgaagtttcaggccagggatgtggctcagtggtggaacagttgctcagcactaccaaaaattagaataaaaaattatatttaagagacagggcggggctggtgagatggctcagtgggtaagagcacccgactgttcttccgaaggtccagagttcaaatcccagcaaccacatggtggctcacaaccatctgtaacaagatctgactccctcttctggagtgtctgaagacagctacagtgtacttacatacaataaataaataaatcttaaaaaaaaaaaaaaaaaagagacagggcatgggggcatgtgcctttaatcccagaacccagcaagcagagactacccaaagctcaggtcaacctggtctacatagtaaattccaagctagccaaggctatagagggagatcctgtctaaaataaatatgcagaagggaggaaggagggtaaagatggcatgtttaaggacaggccaagaggaaacagaatagtacagacaaaaagcattagcctggaaggacaggaaacctcacaggtggcagcttcctctcagaggaaaaaagaagaagaagaagaagaagaagaagatatggctatcgttttcatttctctttcttttggtccttacagtacaaggaactggccttctacagtaacagcacggagattcccctacaggacagtaacttctgctctacagtcgagggacccttactgacgtcctttaaggcggtattcatgcctgtggcctacagcctcatcttcctcctgggtatgatgggaaacatcctggtgctggtaatcctggagaggcaccggcacactcggagctcaaccgagaccttcctgttccacctcgcagtagccgaccttctcttagtcttcatcctgccttttgcagtggctgagggctctgtgggttgggtcctagggaccttcctctgcaaaactgtgatcgctctgcacaagatcaatttctactgcagcagcctgctgctggcctgtatagctgtagaccggtacctagccatcgtccatgctgttcacgcctaccgccgccgtcgactcctctccatccacatcacctgcacggccatttggctggccggcttcctgttcgccttaccggaactcctctttgccaaggttggccaacctcataacaacgactccttaccacagtgcaccttctcccaggaaaacgaagcggaaactagagcctggttcacctcccgtttcctctaccacatcgggggcttcctactaccgatgcttgtgatgggatggtgttacgtgggcgtggtccacaggctactgcaggcccagcggcgccctcagcggcagaaggcggtcagggtggccattttagtgacaagcattttcttcctctgctggtcgccctaccacattgtcatcttcctagatacactggagaggctgaaggctgtgaatagcagctgcgagctgagtggctatctctctgtggccatcaccttgtgtgaattcctgggcctggcacactgctgtctcaatcccatgctctacaccttcgctggcgtaaagttccgcagtgacctctctcggcttctgaccaagctgggctgtgctggcccggcctccctttgccaacttttccccaactggcgcaagagtagtctctctgagtcagagaatgctacttccctcaccaccttctagatcccggaagtctcggggcccctgtctgtttctgttttccttgggaggataaagtggtggcggaacccatccaactcgagcttgggccagtgtccccagatgggaaagctagataaactctctcaaactttcccaaaggggaaagcagcccaaaggcaaagcaagctatatccaggccacctgtatcaccttagatgaagagaactccatacacctcccatcctaaccagctaaagctaagctcagctttatttcttcctggccatagggacaaccacctctgctgtggcccacagtctcatcttcctcctgattatgagcccagactctcctcccagaatgtattccatcatcttaaagactactggctgccacagctacccaccactcctataccacagaggaatagccagctggcggcggcagactatggccttaatgtgcctgtctcataaatacagacttcatgccagaccttcaaccgtgcctttctcttaaccaagcagaaagctgaaaccgatctactttaggtagctgtctggttccaacctaaccagcattgggtcagccccatgttactggatcttggattacagactgagggcaagttccagaaggttctggaagctagccagtatcctaagaagagtaaagggcaagccagcaggaaagaggcccagtggaaaagtggaaagacaccttttccaggctctaaggaagaacaagtaaaaatcaaacccagctgtcttctccacccaatgtaccaaagcttacagactggtggggaaatgagatccagggccctcgtggattctacgcaccaatggggaaggaagccaacttgcctggggaaagcaagatagcaaagtggtcctagcctcgagagaggggacacctagctaagagaatgacgacagaggttcctgtcttcattaggcagaggcaatataagaagccaacctgggcaggcaagtcctcaaaccccaggaaggcagtaccctgcccctgggagggtaccactcacatggaaccagaggaagctgctccatgcatacataggggaagttagcaggcaattctgagctcggcttcctcccagccaccgatctgggggcgtgggggtaggaagcagagttgcctagtaccactcaagccaaccgtacaagctccctgggggatcccactggggaaaccaatgctatagcttcagagactgtatcctcattgcagaaccgtgaagacacctggggacccccttttctgctcccagcatccaacaaccagctgggaagaggcaaaccgggcacagaaataaaaatgcaagagatggcatttttgaattttctctttttaataaaaaggcacctataaaacaggtcaatacaggcagagacccccggaacaagcctaaaaagtgtttcaaaataaaaacaggaagatgtcttcacatattgtatttatatatttatattttatatatatatttatataatggtacaaaatggctggggtatggccatggatggagggagaaggctggcctgtggagatcaccttgggaagctagtggtagaggtgggagacgagggcacaagaagagggcattgggccctttgtggccggagccctctccttggagcagggcaggctagacagtctgggcagggtagggatgtgggtgggggcacaaggcccagatggaagcagggagggcagtgtctggcaggaaggacaggtttccacccacctctcaacacaagagaccttggctatggtccctgggaggagcaggggaagccaggggcctgcagccagctctggagggggcttggtgcctggcctggctgatggtggacagcaccagactgggagaagtgggcacaaattccctttgtattacagctgccaaggcaaaaccaggccctgcaggtcagaaaggctggggacagggccctggtaaaagacaccctgtctagaatggcccttggccctggaggcaggacaggaaaggccttagccagggagctgcccgccaccttacaaggcaggaaaggacgtgagaaaaacagaagtagtttactcctggggccaaaggggacaaaacacccattcctgtatggcttgagtctgaccaggggcgggtgaggggctctcctgggaagtcagaggagaggcagtggctgtgtctggtgggcatagacagatctggtgcatggccctgagccctggacagaaggaccttgcagagagtaggcaggcagaggaggcaacaggatgttctcgctcacactgccttccctcgctcggcactagaggtggagggccaactctgtaccttccttctttggtgagaagcaagtggtggtttctagaagagtccatgccctgaagggttacctggcccatggctactgcagccagggtcccagcatcctaacccctccatagctccattctatggggccacacgctgccccttccttctcgccttttatcctagaatggggataaagggcttcaagttctggctaagatgtagcagcagaggcacccaggctgggggccctatgtcactggtgtgggtaaacacatgtacatgtgcacacctgctctccggaaatcactcagcagcagacaggcggccgtcgtagagggacgggggtagattctcagtcctcaggggctcaccaaatggaagcctagatggtctgatatcattttataggtggggcttatggagggtgcataggactgtatgtctctgggtccagaggaatgaagggtgtgatcatttgaaagaggggggaaggtttttttttttctcaatcttttttttttcttgtgtgtgacttctatcaagacacagaaatacggcacacgcacaaaccggcacaaaagcccagctctatttacagctccgctggcacctgcccacctggccagctgcctgcagggggcgtgggagaggaggtcagccacgtcagtagggaaaggaaatgaggcagaaggaaaacagggtaaaagcagagagacgggaaggcgagaaacggacctgaagcgccgccggcaaggtgacagtccacgacgggtcagaggatggaagaccctcctctctccccaaggacccccaaaacatagctgaaagcggggaagtgcaaagacaaagggagacagaagctccacgggaaaggggggggggggcagaggaggcgcagtcctagtgacagaaatggagcagagcccgattccaactcctcacccgacacttgccgcttccccctcagctgccagcacagcaggtttccacaaacaccactccccacacaagcccgttcccacccgccaccctacccctggacccaggccatccatcccaacactggaggaaaaacaaaactttttaaagttaacatattttcagtttccccagccccagaccgaggggcctgctagaagggtagattggccatgctgcccggcgttggcaggtagcccatctggctgtccagagacacactgcgctgacgcagagggtgggacaccatgaggttctgctggggtggggggcccatgagggagccctgtggggagagcatgtgggggaggctgggtgtagacctcgcccccccacacccctctgcttcatcagcataaaattctgctgggtcatgaggccttgtggaggggacatgaccccctggtgcaggccatggggcaccatgccctgttgtgggggcacacctgtcctgcccagcaaggacatctgtccagggtggcacatggacatgctgagcccccgctggaccccctgttggcccgggaggttggggggtcgagacggggtctgctctgccatcatgttctgcaggttcatgagatgcagattggggggctgggccttggggggctggttctcgctcttggggaagtactggagggtgctgcttggtttctcagaggggatgatcctggataagtcgaactcaggaatgccggtaggggtgggccggatcacctcactcagctctgggtcattcagtaccgatgccaccccagggagcaccccgggtgggtatgcgtcgcccatgcggccagtcatgcctttgcccattaggtgctgctgggggggtatgggacccggtggctgggtgggcaggtcctcggggggcagggccatgcctgaagggtagtgctgctgcaggcctgggcccccggccccggtgggggccatggcaccgtgaggttgctgcagccgaggagggaaggacatcatctgggaggagctgggcacagggccacaaggggcatttagggagtctgggcctcctggggccatcatcattgagttttgagaagagcccccagtcccctgtgcattgggatgcagtggaatgttggaccccagaggggtgggggagggcaacatagtagggggaggctcatgggacaggggctgctggcctggcaagttcatgcccatggggctctgggcagcagcagggttcatgtgcatctggttgggctggttattgctgatacctgtgggaggaaggacgaacgggacattagaggccatgcccacccagtttggggaggggtctcccagtccttcccagcccactaaagagctctgggctaggtttcatgaagcgatggtagtcattcaaacggggcctcagagctcacaccacccccatgagcagagactatagaagcatgcagaagccagcatgtccacgggggcaattcctaagcaaacccactgttgccactcccagagagagctctgcctcctcgcacctggcccagagccctgcggtggtgggggtgggggtagcaggggccggtcaggcagcagctcgtcatctgaggtggcgatggtcttgatggcgttgtggtatagcggggtcgagctgggcatggcgtacttggacatctgagacatcatcagtgacagagggttctgggaaggggtggggtctggggaggatgtgaacggtaggctggggttcatgaggccactggaagggttggcgggaggagcggaggagctgttccggggtgcgctaggtggaagagcacctacagaagcggagagacagaaagagagcgggagggggggtgtcactagcgaggttaacgtcccccaaatctccacctcacgtcagacacacccatatcccactgaccacaggttccctgtggtccctacggcccatgcttctccaagcagtttccccagtggggaaagtcctagctccaagtggcacccttcaagatgtttaagaggctccggcagagcatgcccctgcaggaacctacccgccaccaaggctcccacccaagcccacctagatcactcaccctgttccacgttgcccagggtggaggaagagtttatgctgagaggtggctgcttgttctgggagaccccaggactaggcatggctgtcttgggagaggcgacccagcctggagaaggcaccgccatggagggagacttgagcctgctgggtgagccagtgggtgaacgcacaccgagggaagagctgaggacctggggtgacttgagaggtcccggtgggttggcagaaggcaagggtaccatctgggagggagtctggggtgacttgaggttggcagagggtgaggtgaccaggggggagtgcacctggctaagggtgggtgacttcagatgtcccatgcccggtgagcccatctgattaatactgatggtgagatctgaaggccgcctgcctagccccctgttggaggccaagtgcacagacccaggaggattggaggcagggggcagaggcatatggctgagccgggcagtgcccacagtgcccatgggcactgaactctgatcagggctgaacatgtctggagtgttgcccatgtcctggggcatggcttggtaaggtccctggcccccagagaatccctgctggccctggttgggaaactgtgaaggcatgagcatcttctgcggaccccccatcatgccactactgttctgggcccgaacccgagccatctcttcgggactgaggccctgaggacccatcatgtctccagggccccgcatcttctgtgacatcagcatctgctgctggggcgtcatctgcacattcaggttcatgttcatgttcatgttcacattcatgttcatgttgaggttgcctggccccataggcgggtctacctcccgcagcccagactgtcccattggagggctcaggaggccccgacctccaccaaactctatgcccatgggtgtgccggcgagaccatctcctccagtcatctgtcccgggaacatggcagggtccatctgtcgatgagcctgtatcatccgttccatttccatgctctgtcccatgccgctacctgccatgcccaggggacgctgcatgcccatggaccgcttctccagcaactggtgcctcagcagctcctcccggacacgaggggtcatgaatcgctctgcctccccctgcccacctgggtagggcacggcattctgggcaaagttgctgggtcccccaatagggggcaagtcttcattccaggccatgcctggccttacaggtctctgcatggcattcatgggtacttccatgggcatactctgcatacctccaaatccgggcaccctttgcatctggttgcctgggaaacgggggccagggaagggaggtccaggtcggagctgcatgggatcttggacatccataggccctcggagttgtgcacccattccaggtggccactgatccnnnnnnnnnnnnnnnnnnnntcctgcagagggcggcctccgtgcaatccaatctgctcctctttccgccgcttctcctcgtagtactcttcctgcagtttgcgccaggccacctgctcgggcgtcagactgtcctggcccagcctctgcatcatcatgttcatttgctgtcccatgtctccaccctgagggtgccccggcacttcatgctccagagggggacctcctaggctctgtgtctgtgagatcattgactgcagaggctcctcatacttcttcagccccccaggaggggcggagggaggcggttgagcagcagagggcgcttgtgccggtgggcctccctcaccagctcctcccgggggccccttgaggaagggctcagtctccccactgcggagcagcagcctctcgatgtcccgcagtgtctggagggagcgctcccggtgctccagctgctctttggacaggccctcagagcccaccaggttcctctgcccatttccggtgggcgtggcctcccccaatagggcggagccaggggcactgccagggtctcctccaggaggcagagggttgttagcggtggcagccgttggggtgttagggtgggtacccccagtcccaccacctgtactggcagctcccactgagttgggggccaggtcctgactggtgtcttcaggaggcccctccgggggcagagcaggaggggcactgccaggggctgggggtggcggtggcaaaggaggtggctgggactgtggtgtacctgctgatggcgtattcaggggtagtggttctggggtgggtggcactttaggggcctgcaggaggacaaaggtaaagaataagacagatgaggggacatcccaaagaatattagagcctggcaggctaccacacttacctgatccagcttggcccgaggcacattctgctggtggtaggcaaggatggactctgcccggccctgcagcactgcctctgccgctctgcatagggaagcagccacaggcagctcagagatgggcaaaagcaagctggccctcacccaccaaccttgcaccgcacccccaccccccctttgctcaggctggtcagacagacaaaaccctctcacccctcatctctcccaaagacttacgtgttggccagatgggtggtgaagacatagacgaactgtgacggaggctttcctgggacgcccccacccccacccccaggaacgtctggccgaaggcctggctgggggccatgttgggggcctggtgcactgctctcactgaggggcagttgggcagtttggccaggacccaactgtggggtcaccatggctgggtctgctacattacaatctgtaagaggaggaagaaaggagagcgggtgagcggcccagacgtgggaagaaggccaatcagccggtgttcctgccctcagatgctcgctcactgcctcaagcccatgcccagagggtcatctgtccctacagtctccgtttaccagcctggctttccagttcacttaacctatactaacctttgctcaagatggccaggatgcagaaagatgaccatggagagaggtgagaaaaagtgacagaaaccccaaagctctgctctaaagctcccacactcaagcacttgagatcagtcagtttctctgcctctctctctctctctctctgtgtgtgtgtgtgtgtgtgtgtgtgtgtgtgtgtgtgtatgtgtgtgaatttactgtctaaatgacccagccaaggggaaggtagggaggacatagtagtaactgatgattcaaaccacagacagattttcatcttaccccacgattcactaactgtggttttacaaaacagcatttgtttaagcctcagtttcttcatctacaaaatgcaaacactactcatctcccacgtgccctgcccaaggacaagtccttttaaaaacatgggtactacgccacaaagcaaaacatcagtttcaacaagagtcagaaaggctttcacaaatgatcaacgcaagacttcggtcacctctgatgaccaagaatctcacggaggtgttcccatcaacaacatgcatacacacggatggatgcaggtgagatgaacacagtttgcaaggcacgtgagaaagggcatttgcttctgcaccctctctgaacacgagacagtccttttggattttgcaggggaagggcatacatattgcacacattcagtttaagggcacagggcacatatggagctcaacagagaacactaagtgttggctctcagactttatcatgcacaccacgttagctggacaatgacaatgagcttccagagaacctggctgctctgctttgaaagtcccatcactgggctgattataggcaggtaccactgtacctggcttcctgtgtgggttctgggaatccgaaaccttgcaaggcaagtttctcccaactgagccacctacccagccctcttttttggatttttacagattaatcattagtcacatttaattaaaccattagcttcaggtgatcaatttgactttcagccccactcctttgacgaggatggaatgtagggctgaaagccccaaacctctatcctgctttgattttcccagtcaccaggttccatctagaagctacctcaggactgccagacacaccagtcgatacagcattaaacaaaacagaacaacaaaaaaccacttatccctctggagcttcccaggaaacaagagaagaccaaatatatgtttcacaatatcacagactcacatactcggaacagccgaatattcctcaggagcaagacaaatttcgctcctcggtcacaagcctggcattccgttctcacatagataagacccacgactggtcttcagtggttttaggtgaggcagagatccatggtcataccaagaaaaaacaagttaaagcctccggactacaaacagcaagtgccagcacttcccaaaatcacaagaacttgaccaaggtggcagacaccagaggcctagagtataaatcagagcacacaacaggctcctacaggctacggagagggaagcagagtttatcacaagaaggaattttctagtaccctaacagcaatacaagctagcactgttcaaagtatgtcacatgcctggactcaactttctccttgtgccaaatctatatgacaaagatcacttctatagatgagcaatcagaactcctttctcaagtttacagtccctgggatgtaagtaaaggcgcctgggctctgagcctgtctcattgacagctacctcagtctgccttgctgtgtgaagaattcagttgcatggttgaatgctgctgaatgacacagtgacacaagactataatcccagcacttgggagctataggcaagagggttagaaggtcaaggccagcctcatctatacagtaagcctgaggctaatctgtactacatgaaacctggtcttcactgaattgcattccatctaaaagaggctggtcaagggatcttagctatttcttatcgctctgtatctttcaaagtttctccaatgacacgggataatgttacagacacaaattcggggagacaggagggttctggtcccaggaagcagtgacagattctaccactcaagcatccatactgagactgaacatagctcatacagcactagttagtcacatggggccttggcagtcccagccagttgtagagacttcttacaggacactggtcagtagggtctcctcattccctcttgctgactgtttcctccactgtgacagtcatcattacactttcttcatgggcagctgtgaggactaaactcagtagcaaatgtatctttcttctcctttccttaactcctgcctgtaagcagcacacaatttaagctctggctagcttctcacatgcttagttaggttggaagcaccaaggatgtctcgggcctcaggcacagaaggatggattggaatgagagaaatggctatgaatcctagaaatgcatcatgagcattttctgagtgtcatttagagactggagaaaggaaccagggacacaattaagggtcagttcacacctaggcttagcaaggctttgcaaagccaagctaacagattcccatcttcctgcccatcctccactgaccggtaggtggcagcataggccatgaaatctgttagatgtgtaggtgagttgtccggaaaagggattacctgagagaccttcgacagagggagggagaggggaagggaaagagagagggagggtggcgagggtgtgagcagcactcacactatagataaggaaaaagtccaaagtagggctgaagaagagcctgggctcctagtccttgccatttcttgaacaatcccctaaagcccaaggtaagctccctcaggacggacacacacacacacacacacacataccaggggaagggcaccatgaggcacagcatcaatgggcactcactgtgggcggccgcaatgggcttgtcgtcctcctcgctgtctggcccagagcaccattcgtccccactgtacggctgcttccgctccagcacacacctccgtttactccggggtgccacctc

SEQ ID NO: 1439 - DNA, 2517 bp, Mus musculus
atgaactacccactaaccctggacatgggctccatcacatacaatatggatgacctgtacaaggaactggccttctacagtaacagcacggagattcccctacaggacagtaacttctgctctacagtcgagggacccttactgacgtcctttaaggcggtattcatgcctgtggcctacagcctcatcttcctcctgggtatgatgggaaacatcctggtgctggtaatcctggagaggcaccggcacactcggagctcaaccgagaccttcctgttccacctcgcagtagccgaccttctcttagtcttcatcctgccttttgcagtggctgagggctctgtgggttgggtcctagggaccttcctctgcaaaactgtgatcgctctgcacaagatcaatttctactgcagcagcctgctcgtggcctgtatagctgtagaccggtacctagccatcgtccatgctgttcacgcctaccgccgccgtcgactcctctccatccacatcacctgcacggccatttggctggccggcttcctgttcgccttaccggaactcctctttgccaaggttggccaacctcataacaacgactccttaccacagtgcaccttctcccaggaaaacgaagcggaaactagagcctggttcacctcccgtttcctctaccacatcgggggcttcctactaccgatgcttgtgatgggatggtgttacgtgggcgtggtccacaggctactgcaggcccagcggcgccctcagcggcagaaggcggtcagggtggccattttagtgacaagcattttcttcctctgctggtcgccctaccacattgtcatcttcctagatacactggagaggctgaaggctgtgaatagcagctgcgagctgagtggctatctctctgtggccatcaccttgtgtgaattcctgggcctggcacactgctgtctcaatcccatgctttacaccttcgctggcgtaaagttccgcagtgacctctctcggcttctgaccaagctgggctgtgctggcccggcctccctttgccaacttttccccaactggcgcaagagtagtctctctgagtcagagaatgctacttccctcaccaccttctagatcccggaagtctcggggcccctgtctgtttctgttttccttgggaggataaagtggtggcggaacccatccaactcgagcttgggccagtgtccccagatgggaaagctagataaactctctcaaactttcccaaaggggaaagcagcccaaaggcaaagcaagctatatccaggccacctgtatcaccttagatgaagagaactccatacacctcccatcctaaccagctaaagctaagctcagctttatttcttcctggccatagggacaaccacctctgctgtggcccacagtctcatcttcctcctgattatgagcccagactctcctcccagaatgtattccatcatcttaaagactactggctgccacagctacccaccactcctataccacagaggaatagccaggctgggcggcggcagactatggccttaatgtgcctgtctcataaatacagacttcatgccagaccttcaaccgtgcctttctcttaaccaagcagaaagctgaaaccgatctactttaggtagctgtctggttccaacctaaccagcattgggtcagccccatgttactggatcttggattacagactgagggcaagttccagaaggttctggaagctagccagtatcctaagaagagtaaagggcaagccagcaggaaagaggcccagtggaaaagtggaaagacaccttttccaggctctaaggaagaacaagtaaaaatcaaacccagctgtcttctccacccaatgtaccaaagcttacagactggtggggaaatgagatccagggccctcgtggattctacgcaccaatggggaaggaagccaacttgcctggggaaagcaagatagcaaagtggtcctagcctcgagagagggacacctagctaagagaatgacgacagaggttcctgtcttcattaggcagaggcaatataagaagccaacctgggcaggcaagtcctcaaaccccaggaagcagtaccctgcccctgggagggtaccactcacatggaaccagaggaagctgctccatgcatacataggggaagttagcaggcaattctgagctcggcttcctcccagccaccgatctgggggcgtgggggtaggaagcagagttgcctagtacactcaagccaaccgtacaagctccctgggggatcccactggggaaaccaatgctatagcttcagagactgtatcctcattgcagaaccgtgaagacacctggggacccccttttctgctcccagcatccaacaaccagctgggaagaggcaaaccgggcacagaaataaaaatgcaagagatggcatttttgaattttctctttttaataaaaaggcacctataaaacaggtcaatacaggcagaga

SEQ ID NO: 1440 - DNA, 1125 bp, Mus musculus
atgaactacccactaaccctggacatgggctccatcacatacaatatggatgacctgtacaaggaactggccttctacagtaacagcacggagattcccctacaggacagtaacttctgctctacagtcgagggacccttactgacgtcctttaaggcggtattcatgcctgtggcctacagcctcatcttcctcctgggtatgatgggaaacatcctggtgctggtaatcctggagaggcaccggcacactcggagctcaaccgagaccttcctgttccacctcgcagtagccgaccttctcttagtcttcatcctgccttttgcagtggctgagggctctgtgggttgggtcctagggaccttcctctgcaaaactgtgatcgctctgcacaagatcaatttctactgcagcagcctgctcgtggcctgtatagctgtagaccggtacctagccatcgtccatgctgttcacgcctaccgccgccgtcgactcctctccatccacatcacctgcacggccatttggctggccggcttcctgttcgccttaccggaactcctctttgccaaggttggccaacctcataacaacgactccttaccacagtgcaccttctcccaggaaaacgaagcggaaactagagcctggttcacctcccgtttcctctaccacatcgggggcttcctactaccgatgcttgtgatgggatggtgttacgtgggcgtggtccacaggctactgcaggcccagcggcgccctcagcggcagaaggcggtcagggtggccattttagtgacaagcattttcttcctctgctggtcgccctaccacattgtcatcttcctagatacactggagaggctgaaggctgtgaatagcagctgcgagctgagtggctatctctctgtggccatcaccttgtgtgaattcctgggcctggcacactgctgtctcaatcccatgctttacaccttcgctggcgtaaagttccgcagtgacctctctcggcttctgaccaagctgggctgtgctggcccggcctccctttgccaacttttccccaactggcgcaagagtagtctctctgagtcagagaatgctacttccctcaccaccttctag

SEQ ID NO: 1441 - DNA, 32404 bp, Homo sapiens
  misc_feature (384)..(403): n = a, g, c, or t.
tttaaaaagcatgagtgggcctgacgcagaggtgcatgcctgacatccccgtgctttaggaggctgaggaaggaagtttaaggccaggagttcgagaccagcctgggcaacatagcaagaccttatctctacaaaaaaaaattaaaaattagcctggcatggtacacacttatagtcccagctgctcaggaggctgaggtggaaggatcgcttgagttcaggagtttgagactacagtgagcgataattatgccactgcactccagcctgtgtgacagagcaagaccttgtctctaaaaaaaaaaaaaaaagcatgattgtgtgtgtgtgtgtgtgtgtgtgtgtgtgtgtgtgtgagtgagtgtgtgagagagagagagaaannnnnnnnnnnnnnnnnnnntacaggcacatgccaccaggccccactaatttttctatttttagtagatacggggtttcaccatgttggccaggttggtctcgatcccctgacgttgtgatccgcctgcctcagcctcccaaagtgctgggattacaggcactagccaactgatattttgttgactgaagatttcaaacacatacaaagtcggtctaatgaaccctacatatctgtcatccagcttcatctccccacaggcaatgttattaacacattcattcccctttcctggattattgtgtgtgtgtgtgtgtgtgtgtgtgtgtgtgtgtgtgtgtgtgtgtgtgtgtgtgagagagagagatagcactttggacctatggaggatttctatttggaaagaaaaaggcttttacatacaagatattatttaatagcaaaattggccatgcaggtattttacaattgtacatattaggaaactaatgctcagagaagttatatttgtaattttcaaactggggattgtgacttatgtgtggacccatgaaagcagtgtgattcattgaccgctattaaaaatagaaagagggtcgggcatggtggctcacgtctataatctcaacactttgtgaggccaaggtgggaggatggcttaagcccaggagttccagaccagcctaagcaacataacaagaccccatctctacagtaaatttaaaagttagtttggtgtggtgatgcacacctgtagtcccagctactcaggaggctaaggtgggaggatcacttaagcctgggaggtggaggctgcagtgagccatgattgtgccactgcactgcagcctggctgacatagagagaccccatctctacaaaaaagggaagaaagaaagagtgagagaaagaaagagggaacgaaaggaaggaggaaaggagggaaggaggaagagtagaaaatatgagtatgctacccatactaagcagtgtttacaaaacttactgtgtatttgtgtgtatatgttcatcacacatgtccaactagcttgtgatataaaatatatttcttcctatgggtcatgatcaaagtgacaggattacatgacatgctgaaagctaactagtagagctcatgcattacttattagagtagagctgagaccgaccagagagatagaggtgcaacctgtcagagcccgggaggcaccacagaaatctcaacggtgccagggtggggcccagggaggccggtgttctgggaaaaccaactgttgtgtgctggttgtatgaagtgctgtgttgttgtgggttgtgtgctggttgtatgaggtgctgtgttcttcctgttgtgtgttgtgtgctggttgtatgaggtgctgtgttgttgttgtaggttgtgtgccggttgtatgaggtgctgtgttgttgctgtgggttgtgtgctggttgtatgaggtgctgtgttcttcctgttgtgggttgtgtgctggttgtatgaggtgctgtgtcgttgttttgggttgtgtgctggttgtatgaagtgctgtgttgttgtgggttgtgtgctggttgtatgaggtgctgtgttcttcctgttgtgtgttgtgtgctggttgtatgaggtgctgtgttgttgttgtaggttgtgtgccggttgtatgaggtgctgtgtcgttgctgtgggttgtgtgctggttgtatgaggtgctgtgttgttgctgtgggttgtgtgctggttgtatgaggtgctgtgtcattgttgttgattgtgtgttggttgtatgaggtgctgtgttgctctggagagacgtcaactatggcaccctttgtgtggagggactgaaggccctgctgggtggttgggagctccaggttggaaaacaagctgtgtggggacgagtttaccaattggtatatggctgtgtaccagtcctacgtggcctagagcggtggttctaggagtgtagttctcaggccagcagcatagcgtcacctggacactcttagaaatgcacattatcaggtcccaccccagacctcccgaatcagacactctcgtggtggggcctggcaacctggaggtaacaagccctcctggtgactctgaggcataaagtgtgaggagcactcccctggggatgcctgtttggcattctgtgtttggcgtgtctttgcgcaagcaggcagggtctggtctcagagcggccttgctgggaagcagacatgctgggcctccagtgcagcgtttcttctgtcacccactcagccttacagcctacccagcgcatgcgcccacagcacttaggtgcgaaggaatgctgcacgtttcccccattccctgtgccttccacactgctgactccacccacactaccttagcaacacggtagagttttgcatattctttgaaaatgtgcccagttgcatgtgaatatgagcatgccaacttgcatgatgtgtctgttttgccttctctgttagacaaggtgctcctccatcagaatctcgcctctggctgccgcagtactcagtatacaaacacctgatccaagcaccagactcactctaaccctggccacacaacctgccccaggccgacgttcccaagctcatttgtggcccccatgaccttgtggtaaccttgatgtgcctacccagcacctgcagcccatttcctccctgcaggactctacctgtttcctaacgagaggggagctgtgcgtgggtgcaggctgccggcaatgacagcctttaccaccccacttcctgtgttgacttgtaatggggtgttgggtccctgctgtctgagtgagctgtgaacattcatgctacttcccattactgtctgaagcttggtttccacatctgcagtgtggtaataaaaatacccaacactttgccggacgcggtggctcatgcctgtgatcccagcactttgggagaccaaggcaggtggatcacctgaggtcaggagatcgagaccatcctggccaacatggtgaaaccccgtctctactaaaaatacaaaaaattagctgggcgtggcggcacgtgcctataatcccagctactcgggaggctgaggcaggagaattgcttgaaccagggagtcggaggttgcagtgagccgagatggtgccaccacattccagcctggcgacagagcgagactccgtctcaaaaacaaaacaaaacaaaaaacccaacactcaaagactgttcagggaatgaaaagaaatgatgtgtgaaaaacctatcatagttcatggcacatagaaagtacctgatgaggagcctgtgcaggatttagccatagttttccccttagccagccaggtaagtgcctgtcctttgcaaaatggcgcctctgagagacgggccgtgtggtcttgtggagggagccctggatttggtgcctacagggctgacttcaggctctgactctgcaacgaaccctccctgcaatcacgagcaagaaaatgagactctgtttccttgtcctcacaaaatacggccaggagtgatgccaatccctccggcacaagccgcttcaaggactacatataattaaatgtgaagattaagtgaaatataaagattaagtaacattaaatttaaactttcatgggactgtgtagaccggtgactgctatgcaagtctatggcgagtttccttcagtgctgagaggtataccctactcttcctgaggctgatgaggtagggacctgggagctctgttctcagctgttgggaaagacccagagaaagaagagaacaaagtctctggccatgtcagagagggagagagtcctaggttaatagaaggggaaaccccagcccgttccctgtagcagcaccccaaaactgtgtggaacagcttactttttctgtggaatatagaaaatgaactccaagacaagtgattgtatctaatctctggaacaaatagaaatttaatgtaatccatggactgtaaagtataattactgagaaaaatacacctgagctgatgtaagcggccacccttgcctaaaccagacacaaacccagtcttggcggaagtatcagtagtctttctgtctttttttttttttttttttttctgagataggatcttgctttgtcatccagcctggagtgcagtggtgcaatctcagctcactacaacctcgacctcctgggcccaagcaatcctctcacctcaacctcctgagtagctggaagcactagtgtgcaccaccagctaatatttttattttttgtagagatggggtatcctatgttgcccaggctggtctcgaactcctgggctcaagtgatcctccccccttgacctcccaaaatgctgggattacagaggcgagctaccatgttcagcctccagtggtcattttgacgagaaggctagaaaacaatttagcctcaattagactgcctatggggtggggattgggatcctgcataggtgaaatataaacaagttgcacactgaaataaaacctgagctgcctgacctggaagggtcctctgccatccgattgtcacacacagatggaacctctgacatctcctcttcaaaggcaaaggatcgcagcttaagcgttgccctctctatcctagggagctagtctgactttatgtgtgtgaagattgtaagatcatggtttctagtagaggcagtaactctctgagccttctcaaaacaatattagaactcacggttgctgggcatggtggctcatgcctgtaatcccagcactttgggagtctgaggcaggcggatcggttgagcctaggagttcaaggccagcctgggcaacatggtgaaactctgtcttgacaaaaaacataaaattagccaggtgaggtggcatgtgcctgtagtcccagcaactcgggaggctgaggcaggaagatggcttgagctcaggaggtcaaggctgcagtgagccatgatcgtaccactgccctccagcctgggtgatgaaatgagatcctgtctcaaaaaaaaaaaaaaagaaaaagaaaaagcctcaaggtcagaaggtatttaccactgggggcaaactgagttgactatcaaaggtcagaggctaacacaagtagaccctgggaagctgtagtgtgttcaccatctggagagaagaatgggatctctgaataggcccaaaaagtcaaagacttcaggtgacagtcacagatgtgtctaatgtgtgacgcctgagtcagccatagagaagctggtaggctacctctctgctgcccaaaccatcatagctgaaactactggccagagcctgctgctatagcacctgggaagcagtcttaagcctcccccaaaactctttttctaggcctacagcacatgtggaaaatatagagaactgtggaaagagtaggagaggagaaggccataagagcagctcctaccttgtccagtacatgctccaaccacttccttgctcctccccctgccctatctcatcatcattattgccatagccacaccaccatacacagaaggcccatgatgtgccaggcacaaggtaattctttttttttttttttttttgagacggagtcttactctgtcaccaggctggagtgcagtggtgccatctcggctcactacaacctccgcctcccaggttcaagtgattcttctgcctcagcctcctgagtagctgggactacaggtgcccaccaccacacccagctaatttttgtatttttagtagagacggcgtttcaccatgttggccaggatggtctcaatcccttgacctcgtgatctgcccacctcagcctcccaaagtgccgggattacaggtgtgagccactgcacccggccatgcccgggtagttctgtcgcccgcactggagtgtggtggcgcaatctctgctcactgcaagctccgcctcccgggttcacgccattctcctgcctcaacctcccaagtagctgggactacaggcacccaccaccacgcctggctaattttttgtatatttagtagagacggggtttcaccatgttagccaggatggtcttgaactcctgacctcgtgatccacccacctcagcctcccaaagtgctgggattacaggcgtgagccactgcgcccggccagataattctttctacacattttttccaagcagttctcatcatgtcccacactgtccaccctgtccccctctccaggcacaccaagccttcactctctccaagcctccagtggccaagacttccatgaagtctttcctgacctttgggtatagtaagtctctaatggcatgaagcagggttctggttttggcttcatcctgtcaatatttgccatcaggacttggatagacccaaggatgacttatctatgttgttatcacatcaccagatgacagaattgggatcagaaaaatttccctttataggttgcaacaatggcccagaaccttcaaaatgaaatcctttaggcatgttattaagaggagtaggaccctgcaggaaagtccaattgtattgtagttacatagttatagaagtatggaatcttttttttttttttttttgagtgtcaccaaggctagagggcagtggtgtgatcatggctcattgcagcctcaacctcctgggctcaagcgatccgcctatctcagcctcctgagtagctgggactacaggtgtgtgccaccatgcccagctaatttttgaattttttgtagagacgaggtttcaccatgttgcccaggctagtctcaaattcctgggctcaaaggattctcccatcttgacctcccaaagtgctgggattacaggcatgagcaaccacgccctgccaagtatagagtcttgaacaaggaaatgcatatcgtcctatattttttcctagtcagataatatctagaccattaaccagaaatcacccagaggtcaaaaaacagggcgtcaaaggacccagaaaccaagtctgcaaataacgactgaagacactgtggaagtgtgtttgggagacaacaagactctcaggatgtgctggctgtcttcagaggatgcttattggaagaggagtcagacagtccagacagaaggcacagccaggacctctggagaggagttacaggaagacatattttgactcatcataaggaataagtttctaatcatgaaaccatcctccactgaaacatgatctattgaaaggagcaaatgtctcaccttcattgatgttcgtattcattgattctgggtgatcatctgataaggatgcagtgacgagaatcttgcatttgctgggggtgggggtgtggttgaggatagtctggtttatattccaaagttcctttcaattcctctatgattctatacgctgtactccttcctgatcaatgtccctagccagggtggccaaggctaagtcaagtatgctaagggattggaggggcagggatattgagaatagggtgaatggaaggatgaggagttcccagcaagcttgggacacaggaaaccttggggcagcttcctcctggaggtttcaggactgtacgtgctggagaagaagtgtgatgccttgtcctgaaagccgtcttctttgaaagcagcttctaaaggcagtgaatggagaagagcgaggaaacgaccccaataccaccaacagaggctggaaactcctcaggctgtttaatcctaagaatgatgcatctgttggccgggcacggtggttcacatctgtaatcctagcactttgggaggctgaggcaggcggatcaccttaggtcaggaattcaagaccagactgaccaacatggagaaaccccatttctactaaaaatacaaaattagccgggcgtggtagcgcatgcctgtaatcccagctactcgggaggctgaagcaggagaattgcttgaatccgggaggtggagtttgtggtgagctgagatctcgccattgcactccagcctgggcaacgagagcaaaattctgtctcaaaataaataaataaaaatacaaaattagccgggcgtggtggtgcatgcctgtaatcccagatgctcgggaggctgaggcaggagaatcgcttgaacctgggaggtggaggttgtggtgagccaagatcatgccattgcactccagcctgggcaagaagtgcaaaactctgtctccaaaaaaaaaaaaaaaaaaaaaaaaaagaatgatgcatctgttggggatgcagtggggtaagcatcttcagtaagcaaggtgtgaagaggggaaagagggaaggtgaatatggaggagagggtgaaggagggcactggaaagggtagtaggatcccagcaaagggcgatttggctgaaagggagcgtgataacaagggtgggggtggggccaagaagcagccaccatgtgtgggtgcctctgtgcgtgcagtcatctttctcacatcattgtggatcaagagaggaaatgcccacttctggaagaaaaagccacaaaatgagacttggaagggaaattgatcaacatctacaaaacggcttcttaaaggaagcggccctcagacaggacagagttgagggaaaggacagaggttatgagtgcctgcaagagtggcagcctggagtagagaaaacactaaaggtggagtcaaaagacctgagttcaagtcccagctctgccactggttagctgtgggatctcgggtaagttgctctccctctcggcctcacggacctcctgaataaaaattgagggttagactggatgatctctgaagccatctctagcttggtagtttatgaggttaataatttatgagcaaacaaagttaatttatagatagaacatcattatttttgagtcagaaaatgactctgtaactatgtgcttttcttggtgatttcactttttttttttcttttagagacatggtcttgctatgttgcccaggctggtatccaactcctggcctcaagccatcctcctgcctcggccttccaaagttgatttcatttttgtcttccagtattgttttactgttgttccctttgaaaaattctaacctatcttttctgaacttgagctgagaagggaaggggttttgcctctgttgggcaaaaggatggtggcaagtagtgtgaccaagtgccctaacttgccaggacttaggggtttcccaagtcaagggacttttcagtccttggcagactggaatggttgatcaccctagtggtgaggaaaatgaaggtttggaggtggcttggaggagaggttgctgggagagctcttctcctgttctctgttgatcaggagtttccctcatcaacctgctgactttgcgtggtggtttcattacaagttgtgagccccttattgggggtatagggaggagaagtgagggcagcctttaaactagtcataggccccagttgagacaattattgccgggaaagaagctgaaatgcttgactagcactgatgctgtgggggattttccctctttcttcaaaaaaacagaaaagacccagtggaaaaaaaaaaaaaagtgatgagttgtgaggcaggtcgcggccctactgcctcaggagacgatgcgcagctcatttgcttaaatttgcagctgacggctgccacctctctagaggcacctggcggggagcctctcaacataagacagtgaccagtctggtgactcacagccggcacagccatgaactacccgctaacgctggaaatggacctcgagaacctggaggacctggtgagtagacacgggtagcttcctgtcgccgaggccctgtctggaattctaacatcctttgccagagtccgagggagaggggacagtgtgggaatcctctcccactgtggatctgtaaaatctagacaggtcagtcagctcccgccctttaagagtttattttccattctgtggaagaagcagataaggagagctgctgtccttaggagacatcctttagaggaagctggaagacacgggttcaggccctgcatcctcctctgagttgctatgtgactgggaacaggatacttcacctctccattctttctctccttttctcttagggtcggaatatggaactagacaggaaagtactttggaggttttcttaccgtaaggaggctggcattgctaatcagtcaatgaatgcatagctgttcgtctctggccatatgattatgtcatcagggcactacattctgtgttgggtggagaagttgaggacctggtctttgccctcaaatagcttctgctctggccagagaaaaaaatcactcactggaagctattaggcaacaattatgtgctaaactgagggaatgtgagaccagatggtagcaaggaagaggatcccagcaggctggagtcagggagcagggtgagaaaactgttaatctgacaaatgtcttggaacctgttgtagaatctctagagataaggtattcttggaaaggtttcttgggtgggctaagaaaatggtctccagcactacgctgccaccactcaagtctctccagtgaagcgtagtggtgcagttgacttggttgtcactgggctcccagaagatgtgtgtgtgtgtggagcagctcaaccagagaaacacagggttccttgtgagccgacggcagaggctggttgtaagggtttcttggaaacttcttcactgtcttttctccccctggagagaggacttgtttcggggctgcactctgggttagatcatgaaggagccaaaccctggctcctaccaactctcctgtcccaaacttaccctaagatattgtctgactccctcctgctcccccggctggagtggactttgtggagtggactttgtagttccaccaaccatgttcccagacttgctcagagaagcccgcctctcgcttgcccagatcccaaggctgggaagtgtaagtaggacacggggagaaagtgggcagaagggctgactacccaaagcctggcccctcggatccaaaccgtaggtggaatcagagccggaccattcatctaaccaggacctgctacataatttgtgggacccaatgcaaaatgaaaacatggggccccttgttgaaaaattattataaataagaaggcaacagcagagcactaaacctcgtggggggtcctgctgggtgcaggcccccgtgtgactgccccagttgcaagcccatgaagctgccctgagtctaatcacagagtctgggcaataccccaaatcagactaaaaacccgcggccccaaaggggcaatgtgctcccaccctggcccccggtcacagccgctggcctcgcctgattaggttactgggcgtcttcctctgcctgcagcttcaaactgaccacgagccctgacccagttggacatcttagtaaccaactggagacccggcgggtcccagcttctgagaaaccttaagagtttcccctaactgcacgcctcacctcactgagtgacctactagggacaggtgggggcagggggcaggggcagcagggcatgtcccaagaaaacctacatctgggggaaagggacccagtgactttcttcatgtcacacctcaaatgagtgatcctcagccaggcattccaatatctggatccctcactcagggtctagccaggagcccaggagtcctaggaccatctgggctctggagctcttcagccagccaccagtgcctcgttcccccttcacgaatctcctacacaccctgtctccagggccaatgtcccctcagaacacagaccctctcctccgcccccacccactcactgaagggccgtgagcagcttggcagactgtccctcagtgtcacagtacaaaaacctcgggcgtagtggtacaggcaggagaatcttgcatgtagcagcttctcaataagtatttattgatttgtgatgcagtaaaggtcttagctcaccattttcctctggagttagtctgggtccttctattccttctgcttcctattctcctccttgtccttgcccataccaggtattggttcacattccttgaacgctgggttttacactctcatgttgagctaagaactggggccttttggttacacaaacttgccagaaaaaaaaaaaaaaaggaactgggggctcctggccataagccaggttcgtcattctgtattccatttgtcctcttgaactcgaagaccaactcgagccgcttaaaatgtccacttctttaaggcaggggctggagggtggggaggggctgctaattctcatgaatgaaaggtccaaatagaacaaaaattagatggctaagaaccaggaacaagaagattccaggtcctggggtgggtatgccagggacccatcctgctggaaaggccgatcctggcagacctagagcagaccctgtctatgcgaccctcgatctgagagcctccttccaacagaaccagggcctgggctggggcatccacagaggctggtcataaactatacctccagccccaccctgcacaccagccgggaggggaagctgctatagcgcacggtgaagctggtccaagccccagagcctggctttctatgacccctctccatagacaattaccacacatcatgacttcagtgtgaccagagcatcacaggcgacacagcccgtccacgtggaccatctcatttcatcatgtaggtgtgaagaagaggaaccaaaaccagctcaggctgtttctgggcttcatctaggggaaagggaggttctccacccgccccccgcaaccaggtcaaaagtcccagaggaaccccagcagaggaggcccaactggggtgtagttggaagggtcagagatgagggagagccccaaggccaagctgaggatgggtcagggtcaaagtgaatatgggttcgggcatacaaactgcagagtctccgtcaggaactcttgctttccccagggacgcaggctgcagctgatcccactcctctagcagaacggcagaaacagtggccgcatatgtggacctaagaatcaggacacaagaatgagcattctttcaagagtggtggggaaaaatatttccaacccaggagatggtttcaagaggctgccacacacacctgggaggcctgtctgcctgcatcttggactgtgtgactctgtatccaaagggcaaagagacgctggggtgccaggtggggctcccttaagcctaaagacttgctgcagaggcttggagtagcttaaactctccccctaacaccacatccagcacagtacctgcttctgatggccaaaacccgtgggtagagatgaaagaggagtctcacagacttgtccctgaaggctgtgggtgcggcaagggagatgtgacaaatggcaagccagagtctcagatggtctttaggggctgtgggcctcctgaagaaagacggggtaaggggtacagacctaca[450 bp omitted]ttgaaggcagagtccagcctccttcttcccagggcaggaatctcttcccacacacttgggctcaaacgttcctctccttcctaaaggtaccatctcattgctggacagttctgtctgttagaaagttctccctcctttgactgaaacgctaccccctcagcttctgcccagtccttctagactgccccctggaagctcatagcaagagtccattgctgccctcttgcccatggagcttctttccaagccttgacatcagccctcagggactcaagtcttctctgtcccagacactacacccctagtacctgaaaatttcctctatgggcagggttttccaagcccctcaacaaagtggtcatccttgtccagaccaaccaaactgggctggtgtcagctgcccacttacaagcctctgttcacctagatgaaggtaacagtggcccttcggctggccacgtcactcccgtgactcatcttaagcttgtaggtgacaaactcccaagtctttctgacgaactgttgttacctggtcctccctaacttatccctggacgggtaatgttttaaacctgagtcctggcttgtatatttttccccatgcaatttcatctggttaggttggacccatggttccagcttgtaaagaactctgtgttgcctgagagtgcccccaaagctgggctgagagtgctgaagaggaggggacccaggatagatccctgaggcatgctaggcacccctgcccaatgcacctgctgacatagaatccccattagcaaatgtgagctgagctccatgctggccagtgctgggcagtggggcagcctcattatttggagaagtcaggtggggcttggagacttaattatccagggaggagcctgcatcctacagtggagggaaggagaagagtaacattttgggccctaccacaggccaagcactttgcatctccttacaccccccacctcccgctaagcccctcaatactggacactgttacagcccctgctcctccccagtgctcacagcaattttctaactagattctagctccactctcagcctcattctggtcattgtgtttcttgccttctttggggcatgtgaccctggcccatgaccaggctgttgtctgctgggtgcctgtctaggccacatgctggtgtggcccatcttggcacctgtgtctatgcaaggtgcatgttgctgtcaagagtgtgtgtgtgcacgagggcctcaggtttcagaagcttttcatgtcaaagaatgggcacaccgctcacgcaaatggtctgccctgtgctccctctgggcatgggattggagggcttccttcagcagcacatgccccatggtattcaggattcctgattcctcaatttcccatgaggccggagccaaccttgctttattgcctctctccatagtttgggggagattgggggagctagaactcctatgtgtgggaagtggctttaacatgtgccactcccgaacccccaaaacgtctgtttgacacctcctgctgagatgtgctgtcaattcccagcacccctcaaaccagcttcctcccatcttaccctctctgaacgctgccagacaaatacctcttggcaaggaggaagacacaggcccctcccaagccccctctaaatctggttctcaggagatgggagccctagggagatgtcccactgcattgactttagatgagcaataactcagtcagtctggaatctttgaagggcaagaacttgtgtggaggacaagcccagaaacccagggctttctgggtcagacaggctggctggacctaagccctcacccaggcacggccaaggtaggtggagtccagccctgctgaccgccccaggccctgcttctctcctccctgtctgaacggcttggctctgcgtgaagactgctgaattccagtattagtcaagtgggtgtgctcagtgacggtattggaaatagctcccaatagagggagagcactcaagataggatctaggatcaaggccatcaaggttattgggagaaggcagaatgcagaagattacggagtgagtccctgcagaggcacttgtctaagtctcaggttataagggctcctggccttctctgggaaactgctttcagagcaggtcagcacacgtctgtcctacgtaaaacacgtggccttgggagggggacacagaaggcctgcttctgagaccttgccatctggttagaaagtgtcatcccaaccctgggtgctgtaataaatgcacacgcatcataaggagaagagagaattccaagaggggagccgggaaggatgtctgaagatgggattgaattcggctttggaggaagggtggaaattaggcaaatttggaaagaaagacctgctagacagaaggaaaaggccaagcagaggtttggagacaggaatgtgttggggtgttggggaaaggccggggggtggtctagagcaataatttattaatagaagacaaagtttgaaaggtcagaggaatatacatttgggaagaacataaaggctgtgttgggaggttagacgtcttcccacaggtccatggttttcaaatgaaagtagaaccattttcttcaatgaaagcttatgtgtgaagcactgcacaagtcaaaagtggagagctctagtttaaagtcaaggaggggagcctggagccccaacaccactccccactccaggggaaccctgtgacacacacacagtcatgggtactctaaagaaagtccttggagctgggcactgttgtcacatacctgcagtcctagctacccagaaggctggggcaggaggaggatcacttgggcccaggaggtcaaggctgtagtgtgctatggtcacacgtattaatagccactgcactccagcctgggcaacatagcaagacactatctatcaaaaaacaaaaacaaaggcgtgtgtttgggggagaaattccatggaatcctactgcatgggatgttctgcaatgagttctaaactttattttttaaaaaaatgttttgtagagatggggtctcgctatgtcatgcaggctggtcttgaactcctggcttcaagcaatcctcccacctaagcctcccaaagtgctgggagccactgtgcccaggagttctgaaatttagcgatgtgtgaatggcactaagtttggcttactccaatcattttctttttttttgagattgggtcttggtctgttacccaggctggagcgtagcagcataatcatagttcactgcagtcccaaattccctggctcaagtgatcctcccgccttgtcttcccaaagtgctgggattacaggcctgagccaccatgcccagactccaatcaatcttctattgatgaacatgatcacaaatatgactttttcttatagctgactttgctattaaatgtgaaattgaggccaggtatggtagctcatgcctgtaatcccaccactttgggaggccgaggcggggggatcacttgaggtcaggagtttgagaccagcctggccaacatggtgaaaccttgtctctactaaaaatacaaaaaaattacctaggtgtggtggcagatgcctggaatcccaactacttgggaggctgaggcaggagaattgcttgaacccaggaggcggaggttgcagtgagccgagatcgtgccactgcactccagcctgggcaacaagagcaaaactccacctcaaaaaaaaaaaaaaaaaaaaagtgaagttgaaaaaataagataaagacaaaaagcagaagaaaaccactgcttacaggtgatggggaaccagtaaaggactttaaacagaacattgatgcgatgggatttgtgttttagaaaacttaccctgtcctctgtgcaggaggtggacaggagtagagaagctggtggggatgggacccatggagagatggtctcctgagcattagagtaaagagaaggaagaccagactgaggcaatggcagagggatgctgcgggaagggttggcagatggctctacccttgcactgatgtatctcccacacctccttctcacagaccctcattcccccagagccagaaggaaagacccaggttggagaatgggtctgctcagcattaggagtgagtgtgtgacccacaactgtggctcctgagaggcaagaaagccctgtggcacccagtgtgaccatcccctccttgtgggggtgccttgctctcctgaaatgggggcaccattaagccacccggagcctggtggacagagtaccccatcccatcctctgcctccctgggttcatcatttatagtattgccattttgaatccacataggttggttataattggttttgaattgcctggggaggggcttgggtagggagggtgggaagaacagagctgggaggtgaggaggaacaggtgcaggggacagctgtgagtgaaaggtgtgaaaacaggcacatgtcttcctttgtggttagctgggtaaacaacctgagtgctggggtgatggggggggggtgatggggagaggaagaggaggatggggaggagggaacttccggagacatcacgggcacaccccctgcacttggagcaggctctctccttctctcctgccagtctccccgtgtcgccctcactttctcctgcctctctctgcctctgggctttctgcttctgagtgctcctagctgcagggaggttgccagtgatgggaagtagcagggagcctgcatctgctgcccctagaaggaagcccaggcagggttgttcagtgggaggtactggctttggaagtagataaacgtcggttcacacaaacctgatctttagcaagacacatctgtgaaataggaataatattacataccttgagcgggttgtgcatattgaaccagatgggaggctattactgccatttcagtgataacagagacagtcaggaacaggaagacccatgaggagggagcccacaggccaagtcagcacccgcccgcccctagtccccagcacaatgctaagttgcagtgcccgactgttctgctcagaactggaacagatgggtccttgtaccaagcaggtccattccccaaattgaagtcctgtgactccagccgccaaggctgcaggcttccgtacatgaggacccaaaaacacaagctgacttatggggtccagccctccagcacttacaaagctcagccacccgcacgcctcccttcatcagcaccaccactctaaggaatgcggtccctttgacaggcgaaaaactgaagttggaaaagacaaagtgatttgttcaaaattgaaatttgaaacttgacatttggtcagtgggccctatgtaggaaaaaacctccaagagagctagggttcctctcagagaggaaagacaggtccttaggtcctcaccctcccgtctccttgcccttgcagttctgggaactggacagattggacaactataacgacacctccctggtggaaaatcatctctgccctgccacagaggggcccctcatggcctccttcaaggccgtgttcgtgcccgtggcctacagcctcatcttcctcctgggcgtgatcggcaacgtcctggtgctggtgatcctggagcggcaccggcagacacgcagttccacggagaccttcctgttccacctggccgtggccgacctcctgctggtcttcatcttgccctttgccgtggccgagggctctgtgggctgggtcctggggaccttcctctgcaaaactgtgattgccctgcacaaagtcaacttctactgcagcagcctgctcctggcctgcatcgccgtggaccgctacctggccattgtccacgccgtccatgcctaccgccaccgccgcctcctctccatccacatcacctgtgggaccatctggctggtgggcttcctccttgccttgccagagattctcttcgccaaagtcagccaaggccatcacaacaactccctgccacgttgcaccttctcccaagagaaccaagcagaaacgcatgcctggttcacctcccgattcctctaccatgtggcgggattcctgctgcccatgctggtgatgggctggtgctacgtgggggtagtgcacaggttgcgccaggcccagcggcgccctcagcggcagaaggcagtcagggtggccatcctggtgacaagcatcttcttcctctgctggtcaccctaccacatcgtcatcttcctggacaccctggcgaggctgaaggccgtggacaatacctgcaagctgaatggctctctccccgtggccatcaccatgtgtgagttcctgggcctggcccactgctgcctcaaccccatgctctacactttcgccggcgtgaagttccgcagtgacctgtcgcggctcctgacgaagctgggctgtaccggccctgcctccctgtgccagctcttccctagctggcgcaggagcagtctctctgagtcagagaatgccacctctctcaccacgttctaggtcccagtgtccccttttattgctgcttttccttggggcaggcagtgatgctggatgctccttccaacaggagctgggatcctaagggctcaccgtggctaagagtgtcctaggagtatcctcatttggggtagctagaggaaccaacccccatttctagaacatccctgccagctcttctgccggccctggggctaggctggagcccagggagcggaaagcagctcaaaggcacagtgaaggctgtccttacccatctgcacccccctgggctgagagaacctcacgcacctcccatcctaatcatccaatgctcaagaaacaacttctacttctgcccttgccaacggagagcgcctgcccctcccagaacacactccatcagcttaggggctgctgacctccacagcttcccctctctcctcctgcccacctgtcaaacaaagccagaagctgagcaccaggggatgagtggaggttaaggctgaggaaaggccagctggcagcagagtgtggccttcggacaactcagtccctaaaaacacagacattctgccaggcccccaagcctgcagtcatcttgaccaagcaggaagctcagactggttgagttcaggtagctgcccctggctctgaccgaaacagcgctgggtccaccccatgtcaccggatcctgggtggtctgcaggcagggctgactctaggtgcccttggaggccagccagtgacctgaggaagcgtgaaggccgagaagcaagaaagaaacccgacagagggaagaaaagagctttcttcccgaaccccaaggagggagatggatcaatcaaacccggcggtcccctccgccaggcgagatggggtggggtggagaactcctagggtggctgggtccaggggatgggaggttgtgggcattgatggggaaggaggctggcttgtcccctcctcactcccttcccataagctatagacccgaggaaactcagagtcggaacggagaaaggtggactggaaggggcccgtgggagtcatctcaaccatcccctccgtggcatcaccttaggcagggaagtgtaagaaacacactgaggcagggaagtccccaggccccaggaagccgtgccctgcccccgtgaggatgtcactcagatggaaccgcaggaagctgctccgtgcttgtttgctcacctggggtgtgggaggcccgtccggcagttctgggtgctccctaccacctccccagcctttgatcaggtggggagtcagggacccctgcccttgtcccactcaagccaagcagccaagctccttgggaggccccactggggaaataacagctgtggctcacgtgagagtgtcttcacggcaggacaacgaggaagccctaagacgtcccttttttctctgagtatctcctcgcaagctgggtaatcgatgggggagtctgaagcagatgcaaagaggcaagaggctggattttgaattttctttttaataaaaaggcacctataaaacaggtcaatacagtacaggcagcacagagacccccggaacaagcctaaaaattgtttcaaaataaaaaccaagaagatgtcttcacatattgtatttatatatttatatttatatatatatttatataatggtacaaaatggctgggggtgtggccatggatggagggaagagtaggctggcctgtggcgtgggtgggaggagaggggacggagagggcactcggcccgctgcaatctgacccctctctcctcagggcaggaaacacagagtcagacagtttgggggggtcttgggccaggggtggagggctcaagggcacagggcccaggctgaggcagggcgggcaaagcgcctggcaggatgaagggcaagtggccccccaaacacagaggccctggccatggaccctgggaggtgaccggggtgagtcaggggcctgttgtcagccccagaggaagcgctggacctggccgatggtgggccgagaggacagcaccaggctgggagaagtggggcgagttccctttgtattacagctgccagtgcaagaccaggccctccaggccaggaaggctagggacgggtcctggtagaagacaccctgtctagaatggcccttggtcctggaggtggggcgcaaaaggcctcagccagggaactgccctgccacctcccgaggcaggaaaggaagtgagaaaaggagaagtttttttactcctggggccaaagtagggggacaaacacccagtcgtatatggcttcagctctgaccaaaggcggatagggagctctcctgggtaggagcagggagccaagggggaggcagtggctgtgcctgggtgggcacagacagatctggtacatggccctgagccctgggcagagggacaaccttgccggtgagtgggcaggcagagaggaggcggcaggatgctgtttccccgattccatcctcagggagtggagactggaggggaggtgcactgactcagatgaactgttctcccccttctttgataagaagtaggtggcagcagcctctggaaaagtcagggccctggaggttacctggcccagggctactacagccacaggccccagtggcaccatgccaccccttccatggctccactcaagggggccacacagccaccgcctcttcctcctttccttcatcccaaactgggacaaaagacttcaagttctggctaagatgtagcagcagcggatgcccgggcatccaaagtggaaagccagggccccgtgtcaccggtgtgggcaaacacacatgcacgtgcacacatgttctccctgaatcactcagcagcagacaggctgccgccctgggggtctcagccctgctagggctcaccaggtggaagcctaggtggtctgacctcagtttaggagtgggtcatttacgtcatcttaccatttggggacgagacaggaatggtatcccttagggacccagagacactgcaaacagtgggtggccatgtagggctgcatgtccctgggtccaggggaatggagggagcaataacttgaagaaggggggaagggtttcttttatccttttttttttgtgtgacttctatcaaaacacagaaatacagcacacgcacaaaccagcacaaaagcgcagcgctctatttacagctccggctggcacctgcccacctggccagccgcctgcagggaggggtgggagaggggtcagccacatcagcagggaaaggatacgaagcaggtaaagacagaaggaaaatgggcgggtgcggagaaaccaagagggaggtggagctccagcaatgcggacacgaggagacaggagcagaaggggctgggggagacctgacctgtccttcctctctccccccagattcccatccaggactccaaaagcatagctgaagggggtgtggcgggtgcagggatgcacggaaagaggtaaaatagagaggctccataggaattgggaggagtgggggaggggcagtcctggtggccgaaatggaaccaaccccaatgcaaaatcccccaccccacactgccacttccccctaagctgccagcacatctggtttccacaaatgccactccctacacaagccccctcccaccccctccaccccaccccacgacccaggccatcccaacattgaggggaagaactttgttaaggttatcgtatttgcaacattgccccggctccagccctggcagcgacttctagaagggcaggttggccatgccgcctggtgccgggaggtagcccatctggctgtccagggacacactgcgctgccgaagggggtgggacaccatgaggttctgctggggcggggggcccatgagggagccctgcggggagagcatgtggggcggctggctgtagacctcgccccccacgccccgctgcttcatcagcatgaaattctgctgggtcatgaggccttgtggaggggacatgaccccctggtgcaggccatggggcaccatcccctgctgtgggggcacgcctgtcctgcccagcaaggacatctgtccagggtggcacatggacatgttgagcccccgctggacgccctgctggcctgggaggttgggaggccgagagggagtctgctccgccatcatgttctgcaggttcatgagatgcagattagggggctgagccttggggggctggttctcgctcttggggaagtactggagggtgctgcttggcttctcagaggggatgatcctcgacaagtcgaactcggggatccccgttggggtgggccggatcacctcgctcagctcggggtcgttcagcactgatgccaccccagggagcacacccggtgggtatgcgtcgcccatgcgcccagccatggctttgcccatcaggtgctgctggggaggcatggggcctggcggctggttgggcaggtcctcgggaggcagggccatgcctgacgggtagtgctgctgcaggccaggccccccgcccccacccccagtgggggccatggcaccatggggctgctgcagccgaggggggaagggcatcatctgggaggagctgggcactgggccacagggggcattcagggagtcggggccccctggggccatcatcatggagttttgagggggcccccctgtcccctgtgcgttgggatgcagtggaatgttggagcccagaggggtgggggagggcagcatggcgggcgggggctcatgggacaggggctgctggcctggcaggttcatgcccatagggctctgggcagcggctgagttcaggtgcatctggctgggctggctgttgctgatccctgtagggaatagaagacagggggtcaggcacggtgtgcccagctcggggagggtgcagggctcaggccttccccactcccaagccagggggtgccagaggtcaaagtcttcaccactggcttcccctggctgggagggaagggactggaggcattgatgctagaagccaagagaccaagttctggcccagttcgccagacacaccaccaggtgttggaaagaccactcgagtgctctgggctgggtttccctaatgactccagcgagtgggaacagcatcccggagcctccacccccacacccagggccttcagaggcacaaaaaagccagcacaaccacagctgtgctccccgctcccagtgcccacaccagctggcctccctggggccctggcctgtcctcgcacctggcccggagccctgcggtggtggtggggggggcagcaggggccggtcgggcagcagctcgtcgtctgaggtggcgatggtcttgatggcattgtggtagagcggggtggagctgggcatggcgtacttggacatctgggtcatcatcagtgacagggggttctgggaaggtgtggggtctggggaggaagtgaatggtaggctggggttcatgaggccgctgggagggttggcgggaggtgctgaggagctgctccgggggccgctaggcgggagggtacctacagaaacggggagacaaagagagcaggggtgactggggaggggcagatgagtttggctgtggatatggggaggtttaggaagcggtcagttccccaaatcacctggtccttcagacacacccacaggcccccactatctccagagcccaccagtcttcaagcaattcctgcagcctcagggccccaggcaaggggaagatcccaggccccaagtacgatcactcaaaatgcctgggagactcacgtggtaccccctgagaaagcccacaaatgtcatcatctgccccataagcagagccatccacctctgggcccgtggtacacaggcccttactcactcactgcccagccccagcatggacacactgctcagcgcctgcctgcctgcctgcctgcctgcctgcgcaattgactcaccctgttccatgttgctcagggtggtggaagagttcatgttgagaggcggctgcttgttctgggagacccccgggctgggcatggccgtcttaggtgaggcaacccagcctggagaaggcaccgccatggaaggagacttgagcctgctgggcgagccagtgggtgaacggacactgagggaggagccgaggacctggggcgacttgagaggtcctggcgggttggcagaaggcaagggcaccatctgtgagggagtctggggtgacttgaggttggcagagggcgaggtgaccaggggtgagtgcacctggctaagggtgggcgacttcaagtgccccatgcccggtgagcccatctgattaatactgatggtgaggtccgaaggccgcctgcctagcccccggtttggggctgaatgcacggtcccaggaggattggacgcagggggcagaggcatgtggctgagccgggtggtgcccacgttgctcatgggcattgagctctgatcagggctgaacatgtcttgggtattgcccatgtcctgggacatggcttggtagggtccctggcctccagagaatccctgctggccctggttgggaaactgtgaaggcatcagcatcttctgcgggccgcccatcacgccactgctgttctgggcccgaacccgggccatctcctcaggactgaggccctggggccccatcaagtccccagggccccgcatcttctgcgacatcagcatctgctgctgcggggtcatctgcacgttcaggttcatgttcatgttcatgttgacattcatgttcatgttgaggttgcctggccccatgggtgggtccacctccctcagcccagactgccccatgggagggctcaggaggccccggcctccaccaaactccatgcccatgggagtgcccgccaggccctcaccaccagccatctgcccgggaaacatggcaggatccatctgtcggtgcgcctgcatcatccgctccatctccatgctctgtcccatgccactgcctgccatgcccagggggcgctgcatgcccatcgaccgcttctccagcagctggtgccgcagcagctcctcacggacccggggagtcatgaatcgctccgcctcaccctgcccacctgggtagggcatggtgttctgggcaaaattgctgggtccccccatagggggcaagtcttcggtccagcccatgcctggtctcacgggcctctgcatggcattcatgggcacctccatgggcatactctgcatgcccccaaacccaggtacccgttgtatctggttgcctgggaaacggggcccaggaaagggaggtccgccccggagctgcatgggatcttgaacatccatgggcccccgcagctgcgcacccattccaggtggccactgatccccaggcttgctgtggtaaggaggcgggggccccctcaccatcatgccccccatgcccatcatgtcctgcagaggacggctcccatgcagcccaatctgttcctctttccgccgtttctcttcgtagtactcctcctgcagcttgcgccaggccacctgctcaggcgtgaggctgtcctggcccagcctctgtatcatcatgttcatctgctgccccatgtccccacccggggggtgcccaggcacttcatgctccagcggggggccccctaggctctgtgtctgtgaaatcatggactgcaagggttcctcatatttcttcagcccgctgggaggggccgtgggtggctgctgggggggagggggggcttgtgctggtgggcccccctcacccgctcctcctgggggccccttgaggaagggctcagtctctccgctgcggagcagcagtcgctcaatgtctcgcagcgtctggagggaccgttcccgatgctccagctgctctttggacaagccctctgagcccaccaggctgcgctgcccatttccaggggcggctgcctcccccagcagggcagggccgggggcactgctggggtctcctccaggaggcagagggttgttggcggtggtagccgtcggggtgttagggtgggtgcccccagtcccaccacctgtgctggcagctcccactgagttgggggccaggtcctgactgctgtcctcaggaggcccctctgggggcagagcaggcggggcactgccaggggccgggggtggcggcggcggcagtggaggtggctgggactgcggggtgcctgctgacggcgtgctcaggggtagcggttctggggtggggggcactttaggggcctgcagaaggacaaagagagcatgagacaggtaaggggacgttccacccagtcctgctgctcacagaggcgccacgctcacctggtcaagcttggcccggggcacgttctgctggtggtaggcgaggatggagtcggcccggccctgcagcactgcctctgcagccctgcacagagtgggggcaccgacagctcagagaggtgagcaggagggagccccaccctcacccaccccaccctgcccctgcacggggctccctcggaaccccaggctgagaggtgctgggcagagagagagagagacttggcctgcccaccaggcacttacgtgttggccaggtgggtggtgaagacatatacgaactgcgagggaggctttccggggacgcccccgcccccgcccccgcccccaggggcatcaggccgaaggccaggaggagggccgtgcggggcgcctggcacgctgctctcgctgaggggcagttgggtggtttggccgggacccagctgtggggccgccatggctgggtctgctacattacaatctgcaggagagaggacagggaaaggggctaagtggtctagatacaagaaggaccagctgatgccccctcccactgatgctcacagccttacagctcgtgcccacagggacatttgatgtcagtatctggtgttctcaccaggctggtttccacgatggcaagagtggtgaccatgtggagagcagggacagagaaaatgtgtcctctccacaggctcccatgggcctggcattctgctggggacttaacaggtgtgatttcatctcatcaacacaccctgggaggaacgtgtcacacactccacttaacaaaggaggaaataagttcctcacccacagttacacagccagttagtgcagagccagaactgaacccagggccgggactctgaagctccgctctgagctgctgcccctctcactgggtaagtgtatgtgcacacagtctagtgacccagttagggagaaggcagagagggtacacaagctgatgatccaaatgatggatggtttttcactctagccccaccactaactgactttgtgattttatgaaccagacatccctctaagcctcggtttcttcatctataaaatgtaaaatactaacctcctccttgcacagggggcaggccaaagaaatatattttttaacagtaagtttaaatcaatgtcacagactaaaaaaatccatttgaaaaacagagagccgggagcggtgtctcacgcctgtaatcccagcagtttgggcggtagaggcgggcggatcacctgaggtcatgagttcaagaccagcctggccaacatggtgaaaccccgtctctactaaaaatacaaaaattaactgggcatggtggcgcatggctgtaatcccgctactcaggaggctgagacatgagaattgcttgaacttaggaggtggaagttgcagtgagccgagatcacaccattgcactctagccagggcgacagagcgagactgtctcaaaaaaataaataaataaataaaaataagaaagaaaaaacagttagaaaaagctgacatactggaaacactctcaagacagaccagctgccctcagcaccaagggaagttttgttccatggttagacacttgactgtaagtcttagcgtagaaaaaaatctacaacgggtctaggtgagtgggtagacccattcgcatgccaagaaaagcaagtcacagttcctggcccgcagacagtaagtaccagcattctcagttaatgggagacagattgcctgaagttgtctccatccagccagggcagtgaccaccttcccatgggcccagtgtcaggctgccctctttggaaaaagtttcttctgcaccttcttctctgatggacccaccccaaaacggccctgctctggaccctatctatccaattttacatagaagagcagagccagaaatttgcgggggagcttgagagctgacctcaatgtgtgaaggctgctgagtagctcttggatacgagctatggggagacaggcagggcttagtccaacaaggaactttctagtacaataacaatgataaaagctaacatgttacatgtataacctcatttactcctcataccaaccctatgagataaataatacttttacagatgaggaaactgaggccctttcccaaatttacagaaataacctgggttgcaaacgaaggcagcctgatggcagaactagtcctgtcaatgtctacgttctatcgcccctccagtaagaactcttcaagaatctaagggcaggccgggcacggtggcttatgcctgtaatcctaacactttgggaggccgaggcgggcggatcacttgagggcaggagttcaagaccagcctggccataatggtgaaactccatctctactaaaaatacaaaaattagccaggcgtggtgacgcatgcctgtaatcccagctacttgggaggctgaagcaggagaattacttgaacccaggaggtggaggttgcagtgagccgagattgtgccactgcactccagcctgggcaacagagtgagtgagactctgtctcaaaaaaaaaaaaaaaaaaaaagaatcaggccgggtggctcacgcctgtaatcccagcactttggggggctgaggcaggtgtatcacctgaggtcaggagttcaggaccggtctggccaacatgctaaaactccacctctgctaaaaatacaaaaattagccaggcgtggtggcaggtgcctgtaatcccagctactcgggaggctgaggcaggaaaatcgcttgaactcaggaggcagaggttgcagtaagccgagttcgtgccattgcactccagcctgggcaacaagagtgaaactccgattcaaaaataaataaataaataaataaataaaagaatctaagggtagtacgactaaaatagtcgccttgagtatgggatgttagcaatttctactttgtatttccctatgtttgccaggcacagtggctcactcctgtaattccagcactttgggaggccaaggcatgaggatcgcttgagaccaggagttcaagatcagcctgggcaacatggcaagactgtctctacaaaaattagccaggtgtgatacatgcctgagccccagctacttgggagtctgagatgggaggatcacttgagctcaggagtttgaggttgcagtgagctgtgatcacaccactgcactccagcctgggtgtcagagagagaccctgtctctaaacaataaataaataaaactcacaaagtttctacaatggtgcagtctgatgtgacataagtgaactg

SEQ ID NO: 1442 - DNA, 2824 bp, Homo sapiens
gctgccacctctctagaggcacctggcggggagcctctcaacataagacagtgaccagtctggtgactcacagccggcacagccatgaactacccgctaacgctggaaatggacctcgagaacctggaggacctgttctgggaactggacagattggacaactataacgacacctccctggtggaaaatcatctctgccctgccacagaggggcccctcatggcctccttcaaggccgtgttcgtgcccgtggcctacagcctcatcttcctcctgggcgtgatcggcaacgtcctggtgctggtgatcctggagcggcaccggcagacacgcagttccacggagaccttcctgttccacctggccgtggccgacctcctgctggtcttcatcttgccctttgccgtggccgagggctctgtgggctgggtcctggggaccttcctctgcaaaactgtgattgccctgcacaaagtcaacttctactgcagcagcctgctcctggcctgcatcgccgtggaccgctacctggccattgtccacgccgtccatgcctaccgccaccgccgcctcctctccatccacatcacctgtgggaccatctggctggtgggcttcctccttgccttgccagagattctcttcgccaaagtcagccaaggccatcacaacaactccctgccacgttgcaccttctcccaagagaaccaagcagaaacgcatgcctggttcacctcccgattcctctaccatgtggcgggattcctgctgcccatgctggtgatgggctggtgctacgtgggggtagtgcacaggttgcgccaggcccagcggcgccctcagcggcagaaggcagtcagggtggccatcctggtgacaagcatcttcttcctctgctggtcaccctaccacatcgtcatcttcctggacaccctggcgaggctgaaggccgtggacaatacctgcaagctgaatggctctctccccgtggccatcaccatgtgtgagttcctgggcctggcccactgctgcctcaaccccatgctctacactttcgccggcgtgaagttccgcagtgacctgtcgcggctcctgacgaagctgggctgtaccggccctgcctccctgtgccagctcttccctagctggcgcaggagcagtctctctgagtcagagaatgccacctctctcaccacgttctaggtcccagtgtccccttttattgctgcttttccttggggcaggcagtgatgctggatgctccttccaacaggagctgggatcctaagggctcaccgtggctaagagtgtcctaggagtatcctcatttggggtagctagaggaaccaacccccatttctagaacatccctgccagctcttctgccggccctggggctaggctggagcccagggagcggaaagcagctcaaaggcacagtgaaggctgtccttacccatctgcacccccctgggctgagagaacctcacgcacctcccatcctaatcatccaatgctcaagaaacaacttctacttctgcccttgccaacggagagcgcctgcccctcccagaacacactccatcagcttaggggctgctgacctccacagcttcccctctctcctcctgcccacctgtcaaacaaagccagaagctgagcaccaggggatgagtggaggttaaggctgaggaaaggccagctggcagcagagtgtggccttcggacaactcagtccctaaaaacacagacattctgccaggcccccaagcctgcagtcatcttgaccaagcaggaagctcagactggttgagttcaggtagctgcccctggctctgaccgaaacagcgctgggtccaccccatgtcaccggatcctgggtggtctgcaggcagggctgactctaggtgcccttggaggccagccagtgacctgaggaagcgtgaaggccgagaagcaagaaagaaacccgacagagggaagaaaagagctttcttcccgaaccccaaggagggagatggatcaatcaaacccggcggtcccctccgccaggcgagatggggtggggtggagaactcctagggtggctgggtccaggggatgggaggttgtgggcattgatggggaaggaggctggcttgtcccctcctcactcccttcccataagctatagacccgaggaaactcagagtcggaacggagaaaggtggactggaaggggcccgtgggagtcatctcaaccatcccctccgtggcatcaccttaggcagggaagtgtaagaaacacactgaggcagggaagtccccaggccccaggaagccgtgccctgcccccgtgaggatgtcactcagatggaaccgcaggaagctgctccgtgcttgtttgctcacctggggtgtgggaggcccgtccggcagttctgggtgctccctaccacctccccagcctttgatcaggtggggagtcagggacccctgcccttgtcccactcaagccaagcagccaagctccttgggaggccccactggggaaataacagctgtggctcacgtgagagtgtcttcacggcaggacaacgaggaagccctaagacgtcccttttttctctgagtatctcctcgcaagctgggtaatcgatgggggagtctgaagcagatgcaaagaggcaagaggctggattttgaattttctttttaataaaaaggcacctataaaacaggtcaatacagtacaggcagcacagagacccccggaacaagcctaaaaattgtttcaaaataaaaaccaagaagatgtcttcaaaaaaaaaaaaaaaaaaaaaaa

SEQ ID NO: 1443 - DNA, 1119 bp, Homo sapiens
atgaactacccgctaacgctggaaatggacctcgagaacctggaggacctgttctgggaactggacagattggacaactataacgacacctccctggtggaaaatcatctctgccctgccacagaggggcccctcatggcctccttcaaggccgtgttcgtgcccgtggcctacagcctcatcttcctcctgggcgtgatcggcaacgtcctggtgctggtgatcctggagcggcaccggcagacacgcagttccacggagaccttcctgttccacctggccgtggccgacctcctgctggtcttcatcttgccctttgccgtggccgagggctctgtgggctgggtcctggggaccttcctctgcaaaactgtgattgccctgcacaaagtcaacttctactgcagcagcctgctcctggcctgcatcgccgtggaccgctacctggccattgtccacgccgtccatgcctaccgccaccgccgcctcctctccatccacatcacctgtgggaccatctggctggtgggcttcctccttgccttgccagagattctcttcgccaaagtcagccaaggccatcacaacaactccctgccacgttgcaccttctcccaagagaaccaagcagaaacgcatgcctggttcacctcccgattcctctaccatgtggcgggattcctgctgcccatgctggtgatgggctggtgctacgtgggggtagtgcacaggttgcgccaggcccagcggcgccctcagcggcagaaggcagtcagggtggccatcctggtgacaagcatcttcttcctctgctggtcaccctaccacatcgtcatcttcctggacaccctggcgaggctgaaggccgtggacaatacctgcaagctgaatggctctctccccgtggccatcaccatgtgtgagttcctgggcctggcccactgctgcctcaaccccatgctctacactttcgccggcgtgaagttccgcagtgacctgtcgcggctcctgacgaagctgggctgtaccggccctgcctccctgtgccagctcttccctagctggcgcaggagcagtctctctgagtcagagaatgccacctctctcaccacgttctag

SEQ ID NO: 1444 - DNA, 28430 bp, Mus musculus
  misc_feature (4762)..(4781): n = a, g, c, or t.
  misc_feature (21523)..(21759): n = a, g, c, or t.
  misc_feature (23376)..(23892): n = a, g, c, or t.
aggacctctggaagagcagacagtgctcttacctgctcagccatctctccagcccctaagcttaactttataataaaagatgcttggatatcgtcaagtgctattaactagtctctaaatgttaaagtacaaatgaaatgacagtatggatgagtagaatcaatttaacatgctttatttttttggttgagactggtttctctgtgtagcctttgcatctgggaactcactttatagaccagggtgccctcaaattcagagatctgtctgcttctgcttccctgtgtgccactactgcccagcccatctgttttactttttaaagattaaacagttagatcagcacccagggttaggattataacaacaggtcttttcatgttattaaccggtataattaatgttttcaaatatgagttgaaaatacttcagtacttgtcttaaagctatttgtagacagagataactaaaaaggaatttgaaaaccattccctttgatttgggtggaaacagggcccactggacatgagttagcagctgtcagtgtctcagaagcagttgtactgttggctaattgctttcctttcctttttgagtggcaggccatgtgtctttgctgattctgaaatgttaagacatttcctaccatcaaggtcatagctttttatagaaaggattattgatttctgtactggaacttcattctcaagttcccttcttaaaggaggaagtgcaggagtgagaataaccaaggagcaactctgaaactcttgagagttgttttctctaaccagttaaagaagctgctgttcatctatttacagatactgtggttcctagtataaaatacacgggatactttatttactgtctaggatcaaagtcgatagaaggagggaaattaatagaactcttctaaatttcaagccagtgcgccggtttttgtttgataaagcgaggtaaataaccaggctggagagaagagttgtctcagcagtagtcagcagagttagagtaagtcaagagaatgagcaatttcagcttgagactagttaactaaatgagaagtgttgaattggtaaatacaaattctcttcagattgcatgccttcagagcattctcagaagcgcagagtgcagtgcttcactcagtactacagtactcagttctcagtacaacagggagctgttgacggtcagaatgattttcctctatagtctgagcaggtgccaatgaatgtcacggtcacttagggtcttggctttcaccttcaatatccagtctgtggacacagccttctgggttctactttagagtgtatctgaaaactgactttttcttatcctctggattgttactgtcttggtctcagtggcgttatctcctcgattatagcaacaggcccctgcccatctttttgcttccacccatatcattttttccagtctatctttataaagcagctggagtgatctctttaaaacataaattgttgtcgggcagtggtggcacacacctttaatcccagcacttgggaggcagaggcaggcggatttctgagttcaaggacagccagggctacacagagaaaaaccctgtcttgaaaaaccaacccccccccccaaaaaaaaaaaccataaattgccattcacaaatgaaacccttaattggcttcatttgagggttgttgttctctgaatgaaatcgaaaaacctcatggagcctaaaaagttctcacttctgactctgagtgtctttgccctctatcccagtagggttggccctcctgtttttcctggaacacccaaagtatgtccttattttataattgtaaccatagcctatctatttgtctaaaatgttctctgaatatctatttggttcgcaccttctggacatagttaaaatgtcacttttctagcaagttcttgccgatgggctttttaaaaaaggaatcccggtttcttctggaactgcagattgttttactttgcatttttctcaaaggagtggcattatatttatctttgttttgcccactaaaatataaaattcatcccagtaatttcctcccccagtagtaatttttaaaattgctttgctttaagaggtatgtgacatatatccagtagatatttaaattaatatgtccttaacgagacatatacaaagaaattttagcacattcgggtaaatttccaaatcagttggatttatttcaatgggaaatgcagatgtttttgttcatgtaaagtggatttgttttggggaatatattacaaggttttggctgtgtatactgtgcgtgtacattttggctttatgttgcttgagcatagaggctaatcagactcacatggcttcccatagaatttctgatgagtaaaataacagtaaatacacttgttttaggctttggggtttaggatctatttccttctgtctagaattcttttattgtgcatttgtattctaatgtgctgttttaatttggtgaatactggtataggtcatcacattagggcttatatgacttaatttagagttaaaaggtggaacgcttgatgggagtggattgatgtaagtaagattggatcaaattaaataggactgatctctcttgctgctgaatagctgtattcacatttaaacaggactgtagttgctgtggcacgacatgaagtttgctgagtctttaacaaatatgaaaactgtcttcctggtactgtgttactggcttgctcaaggcagagggactagccctctggaggccattactaataatattgtttggaacctaaattttaagccattagaggaccttgatcatcttagaattttttatgatacatggaatagctaaaaccatttgaaaggtgcgtgttaagaatagcaaattaatgcttctgtccttcagcctcccctcccctcttctctacttccgggaaaccttacccttatctttgtaacatttcagatagcccttgggtttggaagtacccacaaatacatttttaaaagcataccatttattctgccatgcatctttaaagtttgtttgctcagtagtgtctttcatctatctttacctgcttattatagatcttttttttttttttttttttttttttttttttctgtttgtttttcgagacagggtttctctgtagccctggctgccctggaactcactctgtagaccaggctggcctcagaaatccgtctgcctctgccacgcccagcagatttatttttttaagctttgcttagttctccattttaagaatataccctgtatccaggaggtgcacaaaatgcctttaatcccagtactcaggaggcagaggcaagaaaatctcttgagtttttgaggccagcctggcctacagagtgagttcaggacagtcaggacaaaacaacaacaaagaagaatataccctgattaaaggatgggtactggaccatattatacatgttggctgtagattctcatttgggtagatacaaatggtaaaatactgataccaggatttcagctgttttaaacccccagagtggttttttgttttgttgttgtttttgttttgtttttaataattaactaattggtgttttgtgagtatgtgtgctagattccttggaactggagttatagacagttgtaagctgctgtgtgggtgttgggaattgagtataggtctggaaaagcatatccaccgtgccatctctccagcccctgccctcagagttttacatagtccttgtgccattgactggcagtacactggcagctagttaggactctgcttgcttgcctagtcttccaaacccctacatcttttccccctgctctccatccctgctatcttagatggaggggtttctgtcacagaccatgcttttcaattcttctgtgaaaatactcttgctgaaattaaaatgttacataaaaacagacatgtatttaacatacctttttttaatgtatggacttgtctgtggaggtatatgtgagtaagggtggcgctcttggtattgtgactgcctgacgtgctgggaactgagtgatagtcttctgacagagaagcaaattctctgaaccccggagccatttctttaccatcccccccccaatgtaacctttgtaaaattaggctctataaaaggtaggctattttgtgcttaatactatgctgttatttgtcaagtataatgtatcttgttgctagtaagttttttgacatagggtcttgaactccctctctaggtgaggatgccttgaggttttgaggccttatgcctccacctcccgagctgccaaataggactccacttttaaaaatcaagcgctggattttgggtttgccaaaaatgtgttctcccactgagctactttcccaggtcaataatgatttttcttttttgaagtaagtagagtagaattaatgccagacagtttaggaaaaaaaaaattcccctgtatgggacataagagcagtatgtatgtaaatacaggatcctgcagcttttgagcattctagctgtggtaggctatggtggagattatgatttgtttttaaatcaggtttcgctggacagtgatggcgatggctttgggtctatgctgttaagagtcactgctggaagcctatgtggtggcgcatgcctttaatcccagcgctcagggggcagagacaggcggatttctgagttcgaggccaacctggtctacaaagtgagttccaggatagccagggctannnnnnnnnnnnnnnnnnnntcctttgcattaagtgtcaactgtagttaacattagttcagctgaagtgacaggtgcaaaacttgtactatcaatgtgtatgtagttggactcttgggagaagaggtgggacaaaaacttgcttttatcatgtgcctgttaattttgatagaacatactgttttttttttttttaaagatttatttattatatgtaagtacactgtagctgacttcagacactccagaaaagagggtcagatggttgtgagccatcatatggttgctgggatttgaactcatgaccttcggaagagcagtcagtgctcttacccgctgagccaccttaccagcccaaacatactatttcttttggcagaaattctgttgttggaactcctcagtattaagaattgaaaatctaataaaaagttatcgttatccctggaaatggttcttccagagtgaactgggaggaataagaaggcataaagcgtgttttgtttgttcagcagacaaacactggggactaggtagaaagtgtaacgctaggactgaaagcttttaagtctggctgccaggacaatgcaatccttctactgcttctactgatcggatacacagtagctgtgataagcttgagccagaggatccaaatgtgggttagagttccctgtgttttcctgtgctctatgcaagccattgttctgagtagcgttttaatgctcctttcctcagagaagtcatcagttgcagttacttggaaaagttagacttgcatggaaagagaatggaacttgaagaatatgtgggtgcatccaaaatcgaaggaaaaaagtaaccaaggagtcaggagatctaggctcttgtcagtgatttgtttagttaatagtgttggcttgaatacaaatttattctcttgaacaagattttttagtttttaaaggttaggatagaatagtttatctttgcatttctcttagctctaaagctctttgactgtaccaggactgttctgttaaatgtcatgtataaccccaggtacctgtgtttgaggttgcagttacaattgagagttgcaagagtagtcataatttggacagggcctctatgtagccctgcttgtcctgaaacttgctatatagacctggctggacttacagagatctgtacgtagcctagcgtggtttcaagtttctgtgtatccaaggatgaccttgaacttgtgattatacaccccaccttcaccctcagtttcaatgtatagccctggctgctctggaactctctgtagaccaggctgccctccaactcaagagatccgcctgccttcccctccccagtgctgggattaaaggtgtgcgccattatccatgcagcccctccccacccctgactggccaggaatttgctttgttgcgcaggctggccttgaactttgagatctggttgcctctgcctcctatgtgctggttctgaaggctccagagctggggaatactttagaaatgttttgggtttgtgttcatggttatatcgagtgcaccatttataaagtaagaatatctgtaaggaaaaaaactgagactagaagatgtttgaaagtttgtagcccaggttctgtatgtcactttcttccccaaatatgacctacaccaatgtatagtatatccttcataatcttttctatctgttcacatagagcctttatttttatttttctttcagtactgggaacggaacctgaggcctgtgcctgctgggcaagccctctattactgaagtacatccagcacaaatgtttttattgttataaatttaatacggtttttgagacaaggtctaacaatgtaaccccggcttggcctggaacttggattcttctgcttttgtttcccaagagctgggatttataggtctgtgccagtgttccaaaccttttaaattattattttaacttttacagtgttggggtatcaacccagggttttatgcatattaggcaagcatggactatatttttagtcttgaaacttcaaataagtgtttagttactggtgacttatagaagaggcaagagacaaattttagaccattttcctgtttccagaggcactttgggttatatagacaccatctgattgagccagtttgtaatgaaacattaaattgtttgaaagcaccaggcctaaactgatatcatagaagctacaacgtctctgactagtgttgttacagtaatacttggagagaatgctgtggaatcactgaccttcagatagctcctacttgtttgctttttttcttcctggttgtcctgtaactcactgtgtagatcagactggcctcaaactcaagagattggcctgcctctgccttctgaggacgggatcaaaggcctgcactgctgctgccagtgccacccagctttttttgatggggtgccccacatgcatgcagaagaagcctgagaggtcaagaggaggtgattggattgttggaactggagctacatacagacagttaactgcaatgaggatgctgggaaccaaacccaggccttttttggttttttgtttttgtttttgttttttgttgttgttgattttaggttttttgagacagggtttctctgtatcaccctggctgtcctggaactcactctgtagaccaggctggcctcaaactcagaaatccacctgcctctgcctcccaagtgctggaactaaaggcgtgcactaccactgcctggtgaaacccaggtcttttgcaaaagcaacaagaaatcttaatactgagccatttctgtagcctccagaattgtttttttttttggttttgttttgtttttgtttttttgtttttgtttttttgtttttgtttttgtaattagttctggagagatatctcagtcagtgctggttaagtgtactcactgctcttccagagtgaccagattccaaccccagtacccacaaagtaactcacctatcactttaggtacatgatgtaaagacataattcaggcaaaaatacccatacatagaaccattaatattcaaaggaaagaaacaattatattttaaaaggtttgttttattactacttttaactctgtgtacttgtgtgctggcatccttggaagccagaaattttggatctctggaactgaaggcataggtagttgtgagctgctcagtgtgggtgttgtaaatttaaagtcttttgcaaaagcagattaccttctcaaccacggagtcatctttctagtcctaaaattatggattatgtttattagacaggggattactatgtaactctggctgacctagaactccctgtgtagactaaggtggcctcaaacatacagaactccatttgcttctcaagagatgagactaaagttgtatgccattaagtccaacttttttttaaaagatttatttattgtatgtgagtacactgtagctgtcttcagacacaacagaagagagcatcagatcccattacagatggttgtgagccaccatgtggttgctgggaactgaactcaggacctctggaagagcagcagccagtgctcttaaccgctgagccatctctccagcccagtccaaattttttttgggaggaacaaaacttaaattatttgtgatagagttacctatctcactatatagctgtgtagacaaagttggcctaagaattgccatttccctgtctcagcatcgtgggtgctgagatcacagtcatgcctggctgattttgtactcttgaggtagtgatgtgaaaaggaaaacctggaccagaagtgagagcatgtatgtatgtgagagcatgggtatgtatgtgagagcatgggtatgtatgtgagagcatgtatgtatgtgagagcatgggtatgtatgtgagagcatgtatgtatgtgagagcatgggtatgtatgtgagagcatgtatgtatgtgagagcatgggtatgtatgtgagctgaatccacagacagatacagtaaaaacagccacatggcccagttaattcactgtgtgacttgaggcaaatccttttactataccagctcttgtgtgtctgtgtgtgcatgctcgagtgtgtgtgtgtgtgtgtgtgtgtgtgtgtgtgtgtgtgcatgtacaccacgcttgttctaaacttaacaaagaatggccttgaattctgatctttctgcttctaccattcaggcgctaggattactgggtatgtgccatacacccaatttatgagatgctgctgaccaaactaggcttgtaatgtagggaagcgctctaccaactgaactgtatctctagtcctaaaataaaagatttgactgtgcttaatagattaatatcataattggggaagcagttcgtaagatttttataaaatcaaatttttgaagtaaaaatttgttgattatcctcagcttatttacaaatggataccctattttaaacagagtacatgtgaaagagcaagtcaccaaaagcagaaaaatacagtagttttgtgagctgaagttaaaaaagagtccatagaaggaaattttcttcaagtacccttaatgtatgatttgaatgaatttttaagatctcaagacaacgaagaatgagttagacgtgattctaagactggttggtgtttaagatcttgttatgtatgtcactcccccttacctgaatgtttgttacgttttacctgttttggtttcttagagaatctattctttctgaaggcttcatgtctattccgttctgttactcactttattttacctttgttttttcccccaggtttttcgttggaatatacgttgcacatttatggcgattctgagcgtgagggcagacttctgccaggctcagcacagcctttccgctgacaagtgagcttggggttatacgtgccataattaacattgccttgacgactctggacaccgagactggcctcagaagtagtaggcttttttttttttttttttaaattgcaagcgtattcttttaatgactccagtaaaattaagcatcaagtaaacaaaagtggagaagaacctacacttttaacttgtctcactagtgcctaaatgtagtaaaaaggctgcttaaattttgtatgtagttggatttattttggaagctgaaggtatccatctgcagacattgaggctcaagttgaatttggattcaagtggattcttaatacttctgcctgtgctgaagagagaagcttcctaaggaacaagcaagttgaatagagaaaatagtgatcaataataggcattttagtggtctttttaatgttttctgctgcggaacatttcaagatttattgatttcctcctccccccatttttttcccaccacactcacacacgcacgctcacactttttatttgccataatgaaccgtccagcccctgtggagatctcttatgagaacatgcgttttctgataactcacaaccccaccaatgcgactctcaacaagttcacagaggtaagattgtagcatagtctacttttgggattgatttttcttaactatgagtgtttatccttacgttgggttgagttgttaaaatagaatttttgaaagaatatggaatttggggatactatatatagattagtacttataattgtgtgttctttctgtgtttattagtagtactttttgtcatcttcagtaaaaaactcaacatttattgaccacagtatgtactcagcattgcagtaagcactgaatactcttccttttttaaggtcaaggtgcgcatctaaaaccacaggtccgattacttcctccctcctagaggtgataccactcagcttcaaagctgtttagtcatttgcccaaaggctcattgtatttggtggaactagcaccttaagcctgtcatacacactaggacacatgttaaggcgtgggtgagactggtaaaggaacttgtcatgtgtgacaacttgagttttacccttgggactatgagaactgacccccccccccccccccccgttgtcctctgacctctgcacaccataacacacacgtgtcccatatgcactaaatgaaaatgtaataattaaataaactcatacttcgactacaaactacttagtaacagtagttatcacaaatacaggaatccggaaacggggaaggaagtggtcaggagtagtaaaacatggagcctcatttcccctcctttaggtaatgatgacagtgtttactctttaggggatatttaaatgtaaagtttttaatcttttataggttataccatcacatgtggattctgttgctgtgttatggagtagagagagcagtagggggaaatcagtcatcagtcatgttttatgggtggcaaaactgaggccagatagttttaccataaaaaattgtaatggttttctgaccccccccccccaatttttgtggtgctggtgacagaacactgtgcaggtttgcatggactttaccactgagctaccaataccctcaacacataaactttgaagtcttttctcaacttgagtggcactggaaatggagcctggggcctcatacatgccaggaagcagtgccatcaaatatgcccccagaccttctgtgcttgctttttattttgaagtactcactacatttcttagcctggccttaacttaatcctgtagctcaggtggtcctgtggtccttctgtttagccatctaagtaggggagatgacaggtctgtgccactaaaaatactcatttttaaaatttgtagctgggagctggtgagatggatggatcagtgggtaaaggtcctcaccaccaaacctgatgacctaaaacccatatggtggaaggagaggactgaaacttgagtattgttcacaagcacaggcatggacatgaacaaatgtaaatcattggttttcgacgggatctcactatatggccctgtctagccttaaactccagagatcgcctgcctttgtcactggagaaccattcctggcctgtattaactgtttaaaggtgtaactggctacaattgtgtgctagcttttttttttttaagatttatttatttttattatatgtaagtacactgtagctgtcctcagatactccagaagagggagtcagatctcattacagatggttgtgagccaccatgtggttggggagatttgaacttcggacctttggaagagcagccgggtgctcttacccactgggccatcgcaccagccccccctttttaaaaatattatttatttaatatatacaaatacactgtaactgtattcagacacaccagaagagggcatcagatcccattacaggtggttgtgagccaccatgtggttgctgggaattgaactcaggacctctggaagagcagtcagtgctcttaaccgctgagccatctctccagccccgtgtactagctcttttaaaattaattttttgccgggtggtggtggcgcatgcctttaatcccagcacttggggggcagaggcaggcgcatttctgagttcgaggccagcctggtctacagagtgagttccaagacagccacggctacagagaaaccctgtctcaaaaaaacaaaaaacaaaaagcaataggtgattactgcaaaaaaaaaaaaaaaaaaaagaagaagaaaatagccagtctgtggtggtgtacacctttaatcccagtattggtggggcagaggcccatctctgaatttcgggccagcctgatctacagagctagttccaggatagccagagccacacaaagaaatactttctggggggtagggggagatacagaaaggcaaaaaaagctcaacagctgggagtcagacaggcaggtggatctctaagttcaaggaagcctggtctacaaatcaagttccaggagagccagggtggttaaacagaggccctatcttgaaaatagacaacaaaagcaaaataacagaaattaaaaacattaaattgttgttacataccttaggcttctagattttttccctcgtgtgtatattcagaaatacacgtgtaagatcataacacatatttaatatgtttcccccagtctcttgtgttatttctgtagccatcataggattcactgtgtgtgtgccacaccccttttgaagacagtaataaacaacatttctacctttaattattctgttatgtctatggtgaagatgctgtgtaagttgtcctgtctttaatacctgttatatgaagtcctaagaatacagtttttaggtcattgtatatatgaacttttaaaaagtttttgtgccatgctactgaagatgagtatttctccaaggagtctgtgtctgctgtgctcatgcagtgaggtcagtttggagctttgtctaaggatactccctagtttcagtttctcatagcacatttctaaaacccaggtttcagattccaaaagcaagttccctgataactgtttgtctttaaaggaacttaagaagtacggagtgacaactttggttcgagtttgtgatgctacatatgataaagctccagttgaaaaagaaggaatccacgttctagtgagtgtccagtgtctgtgtttgcttgtttctgtgagctcactgacattccaaacactggtgtttgtgaagctcggaactcaaaggcgaagttagtaggcagtttaatagcagtctcctaacggttctttggatcaatcgtgagcagtgttatccattgtgtcctttgagtctacacttgcagtgtagttttcaacaaatgaaaggcaaagttgagtgcacacttatttctaaactgtggaaattggggcctggggagtgcttgctgtcagctcgagcacctgagattgacacgcagaacccaagtgaaaagaccttgcctcaaaaaaattttagggggaaagagggtgggtatggcaacacctacctttaactccagccttgaggaggcactctatgatttcaaggtcatcttggtctacatagtgagttccagaccagctaaggctacaacagtgaggcctgtctcaagacccctcagagatgaagttagcaatagctgggtaggaacaacaggttgttctcagactccagcatgcctaaacacaatgaaatttttggagattcatgaagttacacaataatgaaaagaaaatgttataaaaaaattaaagcaatagctgcctcagtatttaagagcaccttactgtgagccaggcagtcagtggtggtgcacacctttaatcctggctctctgggcacctcaccccccccccccccaaataaatagcctggagacatagtttagttgggagagagcttgcctagcatacaggatgccctgggttcaattcctggaaactgcataaaccagaccaaacacacctgaaaccccagcactgggaggtagaggaaagagaatcaattcagtcaccctcagctacaaagtgagtttgaggtctgcctagaaacatgcgactgcctctaacagtcaaatcccagggctgcattcgccatgtcttcttacaggatctccagcccacagacaaacccagtgttacaatgccaagcaataaaacatttatttatttatttacttatttatttaatgtatgtgagtacactgtaactgtcttcagacacaccagaggaggtcatgggatcccgttgtaggttggttgtgagccaccatgaggttgctgggaattgaactcaggacctctggaagagcagtcattgctcttaaccgctgagctatctttccagcccttgactatgacagctcttataaatgacatttaattggggggcctgcttccaagttcagaggtttattctattattcacattgcagaagcatggcaatgtgcaggcaggcatggtgctggagaaggagcttagagtgctacaccttgatctgcaggcagcaggactagtctttattgagcttctaagaccccccaaagccagcttccacagtgacctacttcctccagcaaggccactccctgtggccaagaattcaaacacatgaatctgtggggccattcctagtcaaacaccacagtcgccaagaggagtaatccatcagtgcactagtgaagaagagaccagtgagactcatttggcatacgggaccagtgggctgaaagcataatagcaatcctcctgctctcagctttcagagttttctctgttttgtctggttgctaccctgaccatataagatttagggctggttaaggtagggctggggggagggggagtggtcagtggtggaatacttgcctagtgttatagatccctagactcagtttaaaatatttgtgtgtatgtatttgtctttctttagatgggtgtgacataagatttcatttgagaagacttacttgacagattcagattttggtcttggatagtttttcagcagtgatcaggaagttgttgagaatagatgtaccggggcagtggtggtgcacgcctttagttccagcacttgggaggcagaggcaggtggatttctgagttcgaggccagcctggtctacagagtgagttccaggatgggtagggatacacagagaaaccctgtgtcaaacacacacacacacacacacacacacacacacacacacacacacacacacacatttaagtaagtacctggttggtggtggctcatgcctttaattccatcactttggagacaggtggatggatctccctgactcgggggtggggggtagggggattaaaatggaataggtaaagtgttttatttagctaacattgtctgccctggctattttcagctcatttttattaggaagtttgtaagaagtcgtttcttttcaggattggccgtttgatgatggagctccaccccctaatcagatagtagatgattggctaaacctgttaaaaaccaaatttcgtgaagagccaggctgttgtgttgcagtgcattgtgttgcaggattgggaaggtaatttactttttctgaattcactctgatatctaaataagccaactcaaatttttaccttggtaggatttgcattcagcaattaaatgatactaaatcaccagaaaggaaatgaggaaatgccagtgtaataagctctaataagagccctttgggttgtgtctggttctacttctaatgccatactgaatgtaatgaaggtcaagaagaagagatttaggtcattaagcgggcaacaaaattaaaattgttttagagattaaattatctgtacatgtttgggtttggattgaaatgaaacaaaatgaagttagttaacaggtagaagattactttaaactcttgagcagaaatgtgtacacaatgaaaattgtttgtgtaaaacttttcactgagcattgcttctgatagttttttgcactttgatcatcagcaggctaaatgccaatttatggtgtgcactgtgcactcagaacataactgtgagatgctgttgcctcaaggtggtggtgacccgtgtcattagttctgcttagcactttagtatggcaaggtttctccataaggttggatgtttaagttcttctgaaggctgatggtggtgtgaggccttcctgggtggctttgtttctattgcctgtctcagtgtagttggaggcagtgctctaacaatgtgcttaagactagagagtaggactgggtggtgttggctcactccttttacttctcagcacttgggaagtagaagcaggtgggtctctgagttcaaggccagcctggtctacaaatcggggatggccagggctgcagagaaaccctgtctcagaaaaacaagaattgagaagctgggggctggagagatggctcagcggttgctcttccagaggtcccgagttcaaatccccgtaaccacatgatctgatgccctcttctgttgtgtctgaagacagcgacagtatacccacataacatacatgaaataaataagtcttttaaaacaatcacaagaattgagaagctgagtacagtggtactgggaggcagaggcaaggactgttgtgagtgtcacgccagcctggtctacatggtgagaccttgttttagaagaaaacattaggtttgcctgcctatcttccaaatgctgggactaaaggcatatatgccactacatccaacacaaactcaagtttgtaatgtgtaagcttttgattaaaacctaaaagtctctgattctaaaggctgtgggcacttacagatgacttctacctgcagggctcctgtgctagttgcgcttgcattgattgaatgcggaatgaagtatgaagatgctgttcaatttataagacagtgagtatgaagctgtatgttcagaaacttgaagcggggctgtgcgtgcggaaggggttatgggaggaatcatttggaagatgcaagcactggttgctttgggcttaagacactgaagattaaaaacaaaagggttaacgcaagtgatcgttgctgctttcataatagcaccaatgcatttccatgtgacagcaggcaaaagcaatgtgtatggagaaacagtcatcacttggtgttctctctctcaagatttatttattttatgtatgtgagtacactgtagctgtacagatggttgtgagccttcatatgattgttgggaattgaatttttaagacctctgctcactctctggtcccacttgctccagtcaagtccacttgctcactcagtccctgcttgctccggctcaaaatttattattatacataagtatactgtagctgacttcagacgcaccagaagagggcgtcagatctcattacagatggttgttgtgagccaccatgtggttgctggtatatgaactcaggaccttcggaagaacagtcagtgcttttaccctctgagcatctcgccaagtccccacttggtactcttgagtggcctgttgtcatacatagttatactggtagtatcccgacagtccgcgccttggtctgaaagaataggccataccgttctttcttagtaaagttaaagcatccctgtctgtcccgaacctaaacctgaggctttgtccttgtatgctctagtttccgtttcgttttgttttttaaagcatcctaatacttgtcattctcatctgaagaatctgttaatctaaaaggaaagagtgatctggtgttcaaaactctgctgatttctgttatactacagtaacaggcagagaaagaaacttgggagggcagaggcagaggcagaggcaggcagattctgagtttgagctgtttacaccacaaattccagaacaactaaggctacagagagaaacactttcttggaaaaacaaaaggaaaaaaaaaagttgatgtttcagctttgtaaagtaatgtgctatggaaactatgtaggctttcagctagggagagctaactagaagtgttattctagacatagctctttgctacatgatagtgcgctgttcttatgttttcagaaaaagaagaggagcattcaattccaaacagctgctttacttggagaagtaccgacctaagatgcggttacgcttcagagataccaatgggcactgctgtgttcagtagaagtagaagcaggctggctggatcgtggcattagagggaactcttggtacctggaaatgtgaatctggattcttacctgtgtcatcagagtagtaatggattcagtactcctcaactcctaatgattgagaagaaggcaaacgataaagaaatccctctattacacgaataaaatgtttaagaaaagaaaaaagaaaggaaaggggattaatttagtgaaagatgattttgctcctagttttgatttctgccaggattgaattatttcaaaatctcctgtgttttttaagctttttcaaaatagatgtctgaggaaaaccagcagaatattaaccagtgtggagccagttgttgggagcacacacttccattatgcttggcacataggtctccttgtggtgggtgggatctgggggaggtagattttcctcatctctcttcctgcctccctcccatctcctgatccacatagatggaatagaaagcagcctttgttgctgtagatgtgcgtgtgtctggcagccttaagcccacctgggcacttttagggaaaaaaacaaaaaaaacaaaaaaaaccaacaaaaaaataaataaaaataaaagcaaagaaaaggcagtggcgcatatattctgtggtccaggctgtttctagtctattgatgatggatgcttatattagttttttttttttttaacccccttgtgcccctgatctaccattagggtgtgagaggtagccaggaacctttggttttataaatggtgacgaaatgacatcctaaacagagtctttctcctgtaatttagctgagagaattctttttcccaacagtgaaacaagtgggcctcctagaaactttattgcagagatgactggaggccattggtgtttccaggagagctagcatgtttctacaagtgtaggactggattgtggatctgctatctaacaatgtcatggaaaagtggtatcttaaaattttaggaccgatttcagaaatagtcaaaggagcaacagaacattcattgtattttggtcttgagaaatgcctatagttttccaaattattcttgtacagttttatttgtacagttcagtgtaaccacctatcatcttgttaacactagattcttctgagattcaaaaagaaaaatcactgtcagagctagccttgcctagtgagtctgtgtccacaggctgtaacagggtggaagagcaacagtaggcagcccagtgagcagcatatgctcacggcatcatgtggcagtggtgtggggtctctgctcagtgtgttgatacagaaaagctgtttttccttgtttgcagaagttgaccagacaaagcaaatggaggggcacctctgtgtaccctcttcacctaagtgtttataaccagcagtaccctgctacaagccttgggtgcagccatcactggattttgatcgtcaggccagcaggatggatgacatctcattgatagtacccagatgttggtggctttctgagttgcctgtttactgttgatgcaattgttttgatttttaactaaatgcaaataccttcctgcctcatcccagaaaatgaaaaataatgcttttgacactgtttctagaattttaaagttgaaaaatgatgatataatccagaaattgttacttcggagcatgacaatagatttctttaacaaagactcaagatcaaatttcttacctaaaagtttaggttaactgttgactcctcaagggttttgatcaatatcacccaaaccttttccacttgacatgctagaattttggtgtgtgtgtgtgtgtatttgttcacgagcacaatagctcccatgggggtctgcacatgcaggtgtccaccagcatagcctgcctgagatagtgtcattcctggttctggggagaagggtgtgtgaaggagaataaagcagccctttgtcttaaagaagactaatgttaattgttctcagaactggatgttttttttccccccatcaaaattaaaactctttcttttggatttaatgaagtattgctaactgaagccagtttgacttgtgagagaggttagactgacagaaggtgtgcagcctgatttacaaccaaaccctgaacccttttgaagaacaataaaacatattttacatgctttttgtgaatttcttccccactcctaaacagttcatgtttgctctcctttctctgcttggcattctcaaggtctgatttgtgtcccattattaatggatacgttagagaggtgaagtgagaggtatttagtaagtatgtacttgaccaatctcattctaaggaattcatttttgttataggtttgcataatgtattacaacttagatttaaataaacctttttgggggagtggggtgggttggggaggggagggggctttgcaagacagggtttctctgtgtagctctttctgtcctggaactcactttgtagaccaggctggcctccaactcagagatccatcttgctcagagatccatcttgctcagccttctcctgagtgtgggattaaatacctgtgctaccactgcccagctctttttacacttttttttttttttttcttttctggctttttaagacagggtttctctgtgaggtctttaaagtggagaattagctgctttaatgtatcatagaatttctctttagtcactggtaaactagataaatttaagcaggacttcaacctaaagaaaacaaagttttagtgggtacaatgagaattttggtttctttaagaacaaatgtgtcaggaatgtttaatcccctatgtgggacttggagctgctttagagtgtccgcaacagctggttgtgatttgcttcatgctccagcaggggagcaattacaccagctgcaggtggtttctgcatgtttttgacattcgcagttctagggactctttgaaaggatatatatggtagatccaatcaaccacttttgctatttgtcaagtggttgtgggtaaagaaatgaaaagaaattggatatcctgactggaacaaacttgcaccaaggaacttggtgcctcaatgccctcttttccctagtgttaggggcttggaaggtagagttgggggtggagggagaagggnnnnnnnnnnnnnnnnnnnnnnnnnnnnnnnnnnnnnnnnnnnnnnnnnnnnnnnnnnnnnnnnnnnnnnnnnnnnnnnnnnnnnnnnnnnnnnnnnnnnnnnnnnnnnnnnnnnnnnnnnnnnnnnnnnnnnnnnnnnnnnnnnnnnnnnnnnnnnnnnnnnnnnnnnnnnnnnnnnnnnnnnnnnnnnnnnnnnnnnnnnnnnnnnnnnnnnnnnnnnnnnnnnnnnnnnnnnnntgcctttccttactttagttctaattggtttttaaacccaagaaacaaggaacctggaaaacagctcagcgggtaaaaaggctgagctcatccctggagcccgtgcttgagagagagagctggatgctacggatagttgtcatcccagcactcctgaggagagagagcgagcagagccagcttgtgatagtgctggatggtctcaacaatgacagctgaaagctgtcctctcactgtcacagtgtgccctggccagtgtgtcccagcgctcacaccaaagctttgaaagaagcttgccaggttacaccttacccagccatctctggtgggcacgcaatgccactgtcttagttactactaccaacatacccagtgtaaagggtcccattctatagtatttctaagatttagaaaagaaaaatttgagtgtgtgtgtgccacatgtgtgcaggtatccatggaaaccaagagacagaattggatcccctggaactactgctgaagaaacgtgggccctctgcagaacctgcaaaagcactcacaccgccaaccaactctccagccacctcccttttatttttttagttttaaggcaagcatttccatcttcttaaatctcatcccttatttgattaaaggttcaaatttaagtgcctttttctgatacccttttcattaacttttctacataattcccaccaacttataaacatactatttattgcatgataagagtcagagctgaggctggcaagatggctcagtggttaagagcgccgactgctctttcgaaggtccagagttcaaatctcagcaaccacgtggtggctcacaactatccgtaacgaaatctgatgccctcttttggagtgtctgaagacagctacagtgtacttacatataataaataaatctttaaaaaaaaaaaaaagctggagttggtggtataaacctttaatcttggcattatttggatagcagaggtcggaagatcacttgagtttaagaccaccctggtctgtgaagtgagttccaaggtagccatggctttgtagagagaacctgtctttatttggtttgaggagttggcaagatggccaccatgcctgagtttgatccttggagcctgtgttgtaacacacaagtgtgtacacgtacaaaagacaaatcgttttgatttcacatctaccttgttctgacacagaaacacaccctgtactgggaattgaacactacagttaaatttctctttaatttacagtaaaactaaacttacattctcctttgagtctgttccagcatagattgttttgtggtttgggttttttatttttgaaacagggtctctataggctggtctataacttcttatgtagaccagacgtcttatttgggatttttatcctctggccccttttaagtgctgggtttcaggcatgcactgccctctctgtctcccagtgagaatttttatttcattgggattgctcctataaagaccaccagaagttctgttgcacttagtttagtggtgggttctcctagtgttggatttgtctacctggtgggattgatgccactgaagtcttcattgagctgggcagttgtgctgcatgnnnnnnnnnnnnnnnnnnnnnnnnnnnnnnnnnnnnnnnnnnnnnnnnnnnnnnnnnnnnnnnnnnnnnnnnnnnnnnnnnnnnnnnnnnnnnnnnnnnnnnnnnnnnnnnnnnnnnnnnnnnnnnnnnnnnnnnnnnnnnnnnnnnnnnnnnnnnnnnnnnnnnnnnnnnnnnnnnnnnnnnnnnnnnnnnnnnnnnnnnnnnnnnnnnnnnnnnnnnnnnnnnnnnnnnnnnnnnnnnnnnnnnnnnnnnnnnnnnnnnnnnnnnnnnnnnnnnnnnnnnnnnnnnnnnnnnnnnnnnnnnnnnnnnnnnnnnnnnnnnnnnnnnnnnnnnnnnnnnnnnnnnnnnnnnnnnnnnnnnnnnnnnnnnnnnnnnnnnnnnnnnnnnnnnnnnnnnnnnnnnnnnnnnnnnnnnnnnnnnnnnnnnnnnnnnnnnnnnnnnnnnnnnnnnnnnnnnnnnnnnnnnnnnnnnnnnnnnnnnnnnnnnnnnnnnnnnnnnnnnnnnnnnnnnnnnnnnntctccctctgtagcttgctctactttgtaggcaaggctagccttgaactcacagagatccacctgtttctgcctcctgaatgttaggattaatggtgtgtgccatcacatctggctttaaaccttaatttttaaaattacatttaattcgtgtatgtgtttgtgggtaccccacagcatttgtgtggaggttagagaacagcttgcaggaattggttcctccacttttgagtcccaggaagtgaggttggattgtaggctgatgccaagccactctatctgctgaaccatcttgccagctttttattttttatttttattatacataagttacactgtagttgacttcagatgcaccagaagagggcatcagatctctttatgggtggttgctagcattcgaactcaggaccttcagaagagtgctcttacccgctgagtcatctcaccagcccatcttggcagctcttaagttttccttttttttttttttttttccctagttacgtaaccaaaagaaaacaaaaacctaggttggcctaggactcccagtggtcctgtctctacacacccagctgtggggctcatggtggcacacacttgtagctagcatttggatggctgaggcaggaggatctaggctacatagggagtccatgtatcaaaaccccaagggattaaacacagcttgttgagtgctgtgacaacctcctgtgagtgagcggtgtgcctgctacgtgtttacccactatcctagccactgaggataccaggggagggaacatgacaaactggcaagaaattattaagggataggagaagaacatttcagttaaacatcagtgcaataagagaacgtgaggaagagcctaggaattagtgattaatgcagtcagacggaatggccatgagaccgaggaagatgaaggaacccgctatatgctgagatatatgaagatggtaccagtatttcccaaggagtttgtgtaaacttgaaaaactgcttggtgtgggttggcatagcagtgcagatcctgaatatggtaaggaaggcaagcaaatttagtgaggttgggaaggtaggttggtgatgctaaggcagggatctcagtaaatgggcagtgtactctctctcacagggacagccttagccatgtgctttgttcaagagatcaatgtctcagcaccagcaatatcttgtttcgtctttgagacagggtcttacatctagcccaggctggctttgaactggctaagaatagttgaggatgaccttgaatccctgatcttcctgccaccgcctcctgagtgctggggtggaggggggacacacgtttgtaccactagtttttgagacaggattatgcctactttggcctggaattcccaccacctgcctcagcctccagagtgctgggatcacagcatcagaatgacacccagcccacacaagtcatctgagtcagagcctctaactgtagattgccgctttctgcagagcagaggcacggaaggtcagtcagtgatcagccgttgcaagatcaggtctttgtgcaaaaggttatgtaagagtcctcttgagttagaggctgtgtgtttaaagggtgactgactcgtactgtgcatgtgggatgtgtcatccaagtggaggagaatgaacaagaaaaggtagaagctgaggaatcctaatggctagtgatgggctgccgtggtgcaggacagaagtttcaggccttaaggaagggagcgagagatgactaagacagacttccttctgcaccattgtgcagatcagtgtgaaaggtcagcagtatattctcagtcagcagttcaaggagatagctgggatgtttggccatggaccgggggtggggtggggtggagtggtggtgagcccttcccacgcccacctatctctcatcctctccacagctcacgcagactgaaagcaattagaatacttcaggcttggcagctttgccatctgccctgcagaagagccactggcaggtgtagcacacagtggcactggttaagtcacttgtgtctgcttggttgttttgaagatagggattcggaaagatggagtagcaagggtctaacagtacccatatctgtctagttcccttgtgctccgggttgtgcctgattagatttagtcttcactggcctcaccaccagtcccatttttaaatgataaactacagcgtaaactgactctaaaattggcccttgactgcccagcttcctaggctgggaagatgtttgttaatgatttcttaggtatggcatcatgcaaaggggtccttgttaattgagctgtgtcgttacattaaatgcaggggcaggagaagggttagcatgcaggtgcacgtgtgtgtgtatagtgagtctgcctcgtcagtgactttaacttgtgtaaaccgtgtgtaatgggccttgccagtaacaaagcagggtatctgagccgagtggtttatagtttataattggcttcttattactgttggctgcctttcctacacatcgagtattactctaggattggtatttgatttaagaaattttcaaattgattttatctcagtgcattaatgcgtggcctcaattcctgcagaggcatcagataaaaccagcctggatgtgttttaggaatcataactggatctgagctgccagtggcccagctctcagtcagcatagataaatccctttgctgaaaaaaaaaaaattctaagtccatcggcttcttagggcatctcaaattgaggccccatgcaactggaaaaatttccccaaataatgctaaaacacataaatgagaatttgctgacatgaatagatctaatcactctcttccttctgggatccaacacataaatattcaaggaataccgtggaaatcagcctaactgtcaagggtgcccaattgtgatgctttccaaaatcaggaaatgcgaaatatgaccctagcaataaaaatgctattactgcggttgagtgcatgggaagctggagtgtgttctgtctgtaatttcatgaggattagcataggtaaatgtttgtaggttttatttttttttccatctctaaaagtgcagaatagattgcagctgtgtggaaatacctattaatcatcttctaatgcttttatgcaaatgcttatatttgactttaatttagagttgccattaacacctggaactctaagattgataacaggtaaaaatttaatgaatgcataaattaaatatttgagtcatatttaggttaatttatagcctctttgttcctggctccacagccccctgataactaaaactcacaggattaggcaggaagagagccctgagtttgtcttatcttttttcttttttcttttttttttttttccgtttttcgagacagggtttctctgtatagtcctggctgtcctggaactcactctgtagaccaggctagcctcgaactcagaaatccgcctgcctctgcctcccgagtgctgggattaaaggcgtgcgccaccatgcccagcgagtttgtcttatctttttgttgttgttaagatttatttatttttatatgtatgctttgctttgctggggtgtgtctgtgccccgtgtgtgttcctactgtccaagaagccaggagagagcatcgggtccactagaacagaactcacagatggctgtgagccaccaagtgggtgctaggaaccaagccccagtactcggcaagagcaggtgctcttgacctctgagtaatcctgtagtcctcccaaccctgaccccattggaagacaggatttcactgtgttgccctagctgggctagaacttgatttatagatcacgctggccttgaacctactacagagttccacctgcctctgcttccgttctttgcaaataaattagctatgctaggtatatgagtagcaagaagattttttggttgttttatgtcctatggatatagatactttagatctttttggggggtgggtttggtgtttgagacagggttgctctgtgtagccctggctgtcctggaactcactctgtagaccaggctggcctcgaactcagaaatccgcctgcctctgtctcccgagtgctgggactaaaggcgtgcgccaccatgcccggctttagatcgtttttatattacttgttttattacattattagtgttgaggtaggttttttcttttctttttctcctcttcctcctcccccctgctcctcccttcctttttgtgtcagagtcttgctttgtaagcctgacttccctctaactcactgtgtggaccagtcactgtggcctttaaccagctctctgtcttttaacctttaatctgtcctcctgcctctgcctcccacgtgtcaagaaacaggtatgtgccatcacatatgggtttttttaaataaaaagtaaaaaattatgtatgtctgtgtttctgtgtttctgtgtgctgttctagggccagaggtgggtgttggaggccccagagctagagttcaagcagatgtgagccagt

SEQ ID NO: 1445 - DNA, 723 bp, Mus musculus
agaagcttcctaaggaacaagcaagttgaatagagaaaatagtgatcaataataggcattttagtggtctttttaatgttttctgctgcggaacatttcaagatttattgatttcctcctccccccatttttttcccaccacactcacacacgcacgctcacactttttatttgccataatgaaccgtccagcccctgtggagatctcttatgagaacatgcgttttctgataactcacaaccccaccaatgcgactctcaacaagttcacagaggaacttaagaagtacggagtgacaactttggttcgagtttgtgatgctacatatgataaagctccagttgaaaaagaaggaatccacgttctagattggccgtttgatgatggagctccaccccctaatcagatagtagatgattggctaaacctgttaaaaaccaaatttcgtgaagagccaggctgttgtgttgcagtgcattgtgttgcaggattgggaagggctcctgtgctagttgcgcttgcattgattgaatgcggaatgaagtatgaagatgctgttcaatttataagacaaaaaagaagaggagcattcaattccaaacagctgctttacttggagaagtaccgacctaagatgcggttacgcttcagagataccaatgggcactgctgtgttcagtagaagtagaagcaggctggctggatcgtggcattagagggaa

SEQ ID NO: 1446 - DNA, 504 bp, Mus musculus
atgaaccgtccagcccctgtggagatctcttatgagaacatgcgttttctgataactcacaaccccaccaatgcgactctcaacaagttcacagaggaacttaagaagtacggagtgacaactttggttcgagtttgtgatgctacatatgataaagctccagttgaaaaagaaggaatccacgttctagattggccgtttgatgatggagctccaccccctaatcagatagtagatgattggctaaacctgttaaaaaccaaatttcgtgaagagccaggctgttgtgttgcagtgcattgtgttgcaggattgggaagggctcctgtgctagttgcgcttgcattgattgaatgcggaatgaagtatgaagatgctgttcaatttataagacaaaaaagaagaggagcattcaattccaaacagctgctttacttggagaagtaccgacctaagatgcggttacgcttcagagataccaatgggcactgctgtgttcagtag

SEQ ID NO: 1447 - DNA, 31236 bp, Homo sapiens
gcacataaactgaagtctttaaacataaaccccatagaaaagatagccatgatacttttgtcacaaaagtatggatgaatagaatccatttagtaaaactatttaatgtaatttttaaaagattaactgaaaacaattagattaatactcaatataaggattgtgctgttaggattttttaatgttattaccagtgctattccaatactttttaaagagaaagtcggcgttggccatagtgctgttaacctgcatttaaattttatttatgaaaggaaaaataccaattttagataagagattcattttgagaattggaaatctttagaggaaaaatggagtacaaaattgtaaagtaaatatttttaagtgtggcctgaaaatatttaatgcaatttttgtcttatagttatttgtagaggtagaaattactagaaaaggacaaccgttaatcaccggggtacatgcacatctaaaaccactcccttttcattttggtgggaacagggcccacaggacttcagtgaataactgtcactgttctcagaagcaggtgcgattgttgactaattgcttcccttatctttctgagtggctggccatgtatcttctactggttttgaaatgttaagacattttcccaccatcaaggtcatgatttctttttatagaactgattattgatttctgtactgggacttgagtctcaagttccctccttaaatgaggaagtggaaaagtgggaataaccaagggagtaactatgaaattttttttttttttttttttttttgagacagagtttcactctgtcacccaggctggagtacagtggcacgatcttggctcactgcaacttccgcctcccaggttcaagcaattctcctgcttcagccacctgagctgggactacagccatgcgccacaatacctggctagtttttgtatttttggtagagacagggttttgccatgttggccaggctggtcttgaactcctgacctcaggtgatccgcccatcttggccttccaaagtgctgggattacaggcgtaagccatcgcgcccggccaaaaaattttttttaacagtaaaaaaagcatcttatttttggcttattcactgacattttggatccttatttgtgtagaattgaattgatacctctttatcaccttcctaggactgtagttattgtgggtaaggagggatattaatattaatattatattgtatataattatattatgctatatattatattattatatttatatattataatatataaatatatgttataatatatatttgttatatataatataatattaatttaaatctaagtttcaaggactagattattttagtttgataaatggaacagtagagggataaacaaaggtaggtagtgcagaggatagatagaactgttgttctatctacttgatttgggagtaggttataagagatgaataaattttcagtttgagaccagttaatcagaagatgcgtgtttactaattaaacgctttactaattaaaggtgaggttttttagtttacaagttttcagacacttttttcccccaagtggtcaaaatacaataggtacagtagcattttacagaggactttccctactactttgatggttgagaagattttacaatctattgtctgaatagcctctgaatattaagttggactccacaagttctgtagttactcagagccttgactgtttttcataaactctatatccagtctgtggacaaatcccacgtcaaagtgtatcttgaaactgaccccttcttatcttccctactgctgttaccctggtctaagctaccattatatctacttgtctccttgcttccacccttaccatttttgtaatgtttccacatagcagatagagtgatcctttgtaaaacctaagttatcactctttttttctctcctttttcagcttttatgttaggttcagtgtgtacatgtgcaggtttgttacgtgggtaaattgaatgtcgctcgggtttggcgtacaaatgattttgtcacctcgtcaccagttagcaagcatagtacctgataagtagtttttcaagccccactctcctctcaccctccaccctcaagtggtccccagtgtctgttgttcccctctttgagtctatgtgtactcagtgtttagctcccacttataagtgagaacatgcggtatttggttttctgttcctgcgttaattcgcttaggataatggcctccagctgcatccatgttgctgcaaaggacatgatttcattattttttatggctttgagttgtcactcttgagtgaaacccttcattggcttcatttggagaggcatcattttctgaataaaagtcaaatgcttttagtggcctataaggctctcttttatttctctgactctattcattccattgtcctctctgttccagtagcattggttcccttgttcctagcatactctaagcttgtccccacctcataacctttgcagcagttaatcctctgcctaaaatgctccccaaatacctgtttggctcacactctcagctcttggataaaaagtcacttttttcagtgaggcctttcctgttagccttatttaaaattggaacccccctccctctggcactgctaattcccctacttctaatttttctccagagcagtgacatttttatttctttttttctgcccagtaaagtgtaagatccatcccaacagaaatttttgttttgcttattgctcttgcacctgtaagagtatgtgacccatagtacatgttctgtaaatatttgaattaatgaaagaatttgaggaaaatgcctagctcttcaggaggataaattctttactgttgacagattagattttttatacttattttaaggggaaataaaagtggctattgacatgaagggaatttgctttaggaaaaaaatgttgcaaggtgttagttgtatattacattattaggctttcatgttgactgattgttgaaaccaagctgactcaaatttgcattacttcctgtaaaatttctggtaagaaaagtagcagtaaatatatgcatactcgttttttttagacctttgcttttagactgtatttccttaaatctagaattcttttattgtacctttatattttaatgtgctgttttaatttggtgaatactggcgtagctcaccaaattagagggtttattgtatcatttaatttggaaatgtaaagggatgatttcttagaaatcctgatgtgagtggattgataggagagataaatatatatatatatatatatttttttttttttttaattttttgaaacggaatctagctctgtggccaggctggagtgcagtggcgcaatctcagttcactgcaacctccgcctcctgggttgaagcgattctcttgcctcagcctcccgagtagctgggattacaggcatgcgccgccacgcccagctaatttttgtatttttagtagagatgggccagtatggcttcgatctcctgacttcgtgatccactcaccgtggcctcccagagtgctgggattacaggcatgagccactgtgcccgccaattgataggaattttaaaaggatgcccggtaaaattgggttaaattaaatgaggctgcttttataaaattcccttatacttctaaattcaccttttttttttttgagatggagtcttgctctgtcgcccaggctggggtgcagtggtgcgatcttgggtcactgcaagctctgcctcccgggttcacgccattctcctgcctcagcctgccaagtagctgggaccacaggcgcccaccaccacacccgactaatttttttgtatttttagtggagacggggtttcaccgtgttagccaggatggtctcttatctcctgacctcgttcgtgatctgcccaactcggcctcccaaagtgctgggattataggcgtgagccacggcgcccggcctctaaattcactttatttgtagttagaattacagttgccaaggcaggacgtgaattttactcatttagcctctttaacaggaaagaaaacactttatggaattgtgtaggtacagacctgcctgggacagaggactagccctctggagcctctttctaatcctatgattatagaactgttaagaacgtagtttgattgtaaatcattatagggttcttatcaccttagaattttttttaaaggtaataccatatgtacatgggaaaagttaaaacagttcaaaaggtatatgttaagatgtagtaaatcgtgctgttgacctccagccttcagtcctgtgttcctggccctgccccaaccctaggaaaccactgttatctcttatctttgtaatcttccagatatcccatgtgcatgaatgcatacagtactcacacatatttctaagcacactgttgatactgtcatgtactgtgcctttttttacttattagtgtcttttagctgtcatttcatatcagttcatacagatgttttctttttaacctctggatagttttttctttttttttatcccttatctccctcctttcttaatttaaaaggacttctctgtcacagactatcctttctcatccttcattgaagttgtattcttttgttaaaaatggaaatgttgcctaggaaatggaaatatcccaaattcaacattttaaaagttaggttttatgataaaattaaatggagagagagtatttgggtgtatatttgaatttaccactgttatatgtcaagtaaactagcctttttcatcacttggtaagttaaaacaataatttatttaagtagatagagcagaattaatgtcagagagacaactttaggagaattttcctgtatggtgtacatgcactgaatttatgttaaaacatagggttctgcaacttttgagtactttctagctgtgataggttgtttatgattttttacacactgtttgctttgcattcctaagtgtgtcacaggaattaacattagtttatctgaattgacaggtgcaaaaatgtaactgttgatgtgtagttgaactcttgatggagggggagggaacagaagcttgtttttatcatgtatctgttaaaagtgctagaacatactgtttcttttggcagaaattcctttgctgggttctcagtattaagaattgaaaatcttaataatgaattatctttattcctggaaatggtctttccaaaatgaggttgggagagtaagatgggataaagcttgttctgtttgctgagcagacacacactggagactaggtagaaaacttaatgctggagctgtagcctttaagcctggctgtcactacaatgcaggtctttcagtgcctttactcagctgacacacatttgcagtgataacgtcattgaaccaaagggattcaaataggttagaatttccttgtgttttgctctgcattgcatgcaaactattgttctttgagtagttactttaataaactccacccagtctcccaccttattttaaggtcgcagagttggagatgaacatccaagcagatatttggaaaaaaaattatacttgtatggaagattgcaacttgaaaaatatgtggggctggacttagtggctcacgaggcctgtaatccctgtgctttaggaggccaaagctggaggatcgcttgagcccaggagttttagaccagcctgggcaacatagcaaggcccccgtctctccaaaaatactttaaaaatattagctgggcgcagtggcatgcacctgtagtcccagctactcaagaggttgaggcaggctgggcgcggtggctcacgcctgtaatcccagcactttgggaggccgaggcgggcggatcacgaggtcaggagatcgagaccatcctggctaacacggtgaaaccccgtctctactaaaaatacaaaaaattagccgggcgtggtagcgggcgcctgtagtcccagctactcgggaggctgaggcaggagaatggcgtgaacccgggaggcggagcttgcagtgagccgagatcgcgccactgcactccagcctgggcgacagagcaagactccgtctcaaaaaaaaaaaaaaaaaaaaaaagaggttgaggcagaaggatcacttgtgcccagaagtttgaggttgccgtgagctatgattgcaccactgcattccagcctgggcgatagagcaagaccctgtctctgaaaagaaaagaagaggctgggtgtggtggctcacgtctgtaatcccagcactttgggaggccaaggtgggcagatcacgaggtcaggccttcaagaccagcctggcctttggtgaaaccctgtctctactaaaaatacaaaaatatgcctgtaatcacagctacttgggaggctgaggcaggagaattgcttgaacccaggaggcggaggttgcagtgagctgagattgtgccacttaactccagcctgggcaacagagtaagactctctctcaaaaaaaaaaaaagataaaaagtatttgggccgggcacggtgactcatgcctgtaatcccaagactttgggaggccgaggcaggaggttggttttcatccaggaattcgagatcagcctgggcagcatagtgaaaccttgttgctacagaaaatcaaaaattagcctggtggtgtgcacctgtgttcccagctcctcaggagcctgaggtgggaggatcgcttgagacaggaggttgaggctgcggtgagccatgatcgcgccactgcactcagcctgggtgacagagtgaaaacctgtctcaaaataaataaaagaaagaaagaaagaaagaaagaaagaaagaaagaaagaaagaaagaaacaaacctgggtttttgttcttaagctgctaccagttagcagtgcgatcatacttaagccattttaacctctctgagccccaaactttgttttaaattttttttttgacagagtttctctcttgttgcccaggctggagtgcagtggcacaatcttggctccctgcaacctctgtctcccaggttcaagcaattctcctgcctcagcctcccgagtaggtgggaatacaggcatgtgccaccacgcccaactaattttgtatttttagtagagatggggtttctccatgttgatcaggctggtcttgaactcctgacctcaggtgatctgcctgccttggcctaccaaagtgctgagatacaggcgtgagccatcacgcccggccaacttttttattttttaaaaggtcagggtagttgatgtttctgttggttctaaaatttcttgactgtacaaggagtactttatgaaatgttttcctctgtaatctaaggtggctatgttttggggttacagttagaattttgaggtaggaagagcgatggaatgtatttttgtttttagttttgagggtagacattttgtgtttttactgtagcgagtaactcattctgctgtagtattattgaagttcttagaatgccattttgaatttcatttgtgtcttttatattattttagttttatgtttgtgtccgtggttatataatcacaagtatgcaatttacacaataaaatgccataagagtatcataaaaaaagcttgaggatagatgaatagtgttgaagctttgtaggcctagctacttacctatatatttcagtttcttcctgaaaatggttccgtagtcattatctttcatacctatttctgtctggttacagctattttttagagacttctaaataagcctttattggtaacttagggaaaaggcaagtgaaagaacttaagctttgtccctttttccagaggaatttatgattatgttgatgttctctgactgagccagctgtaaagattactgtgtttcaaagcagcaggcctaaaaataataataaaaattctgtcacttcttgctttgtttttttggtagggattaatgtttggggagaagtgtgtgtgaatcagtgaccttcaaataattttgtattcttgaggcaattattatgtgacaaataataaaaaggtaaactgaaatagaaaggagaggatgaggtttatacattagttgagtcaggaggcatttgtggtacattggaaaaaacgggactaacagaagacttgggtttgaatttgggctcagttaaaaacttccattgtgtgatgttaggcaagtcacttcatttttctgatcttctttcctcattccttatatgttgtaacaactactcaagacttgtgaggaaaaggggaaatgatttttaaaaaatcaattctttatttacgtaacaagttggttatgtccactgcattgtgtgaaacattacagtatcatataggaaagtactgtcagtacagtgttggatcacaggattttttgagagtgccttatgagttagtctcatcattgagggccaacacatatactttggatagaaagaataaaatcctcaaagtgaaattttgattaatatcctctacccatttataggtacaccttattttaaccaaagagtatatgtgaaggacctaaccatcaaagcagaaaaataaggagatctttgtgaagtttatgaagagttcatgggccaggcgcagtagttcacgcctgtaatcccagcactttgggaggcctaggcaagcgaatcacctgaggtcaggagttcgagatgagcctggtcaacgtggtgaagccccgtctctaccaaaaatacaaaaattagccaggtgtggtggtgggcacctgtaatcccagctacttgggaggctgaggcaggaaaatagcttgaacctggggggcggaggttgcagtgagctgagatctcgccattgcacttcagcctgggtgacagagcaaggctccgtctcaaaaaaaaaaaaaaaaaaagttcatggaagttttaagtatctagtaatcatttaaaaattatttgagttaaaagtaatcgagtctctgattttttttgtttttttgttttttgagacagagttttgttctcattgtccagactggagtgcagtggcacaatctcagctcactgcaacctccacctcccaggttcaagcaattctcctgcctcagcctcccaagtagctgggattacaggcatgcgccaccatgcctggctaattttgtatttttagtagagacggggtttctccatgttggccaggctggtcttgaactcccgacctcaggtgatctgcccgcctcagcctcccaaagtgctaggattacaggcatcagccaccacacctggctcaagtctctgattttttttttttttttttttttttgaggcagagttttgctcttgttgcccaggctggagtgcaatggtgccatcttggctcatcacaacctctacctcccgggttcaagcgattctcctgcctcagcttcctgagtagctgggattacaggcatgcaccaccacacctggctaattgtgtatttttagtagcgacggggtttctccatgttgatcaggctggtctcaaactcccgacctcaggtgatctgcctgcctcagcctcccaaagtgctaggattacaggcatcagccaccacacccggctcgagtctctgatttttaaaactcttcataatacccctttatccaattcttcatagatggtaataacgtataattggtgacatttcacatcgctttgggcttataaagaatgtattttgacttcaggcatttgtgtttactgtgccatcagcctctagttcattttacttattcttttcttctccaggtttttcgttggaatatacgttgcacatttatggcgattctgagtgtgagggcagacttctgccaggctcagcacagcattttcgctgacaagtgagcttggaggttctatgtgccataattaacattgccttgaagactcctggacaccgagactggcctcagaaatagttggctttttttttttttaattgcaagcatatttcttttaatgactccagtaaaattaagcatcaagtaaacaagtggaaagtgacctacacttttaacttgtctcactagtgcctaaatgtagtaaaggctgcttaagttttgtatgtagttggattttttggagtccgaaggtatccatctgcagaaattgaggcccaaattgaatttggattcaagtggattctaaatactttgcttatcttgaagagagaagcttcataaggaataaacaagttgaatagagaaaacactgattgataataggcattttagtggtctttttaatgttttctgctgtgaaacatttcaagatttattgatttttttttttcactttccccatcacactcacacgcacgctcacactttttatttgccataatgaaccgtccagcccctgtggagatctcctatgagaacatgcgttttctgataactcacaaccctaccaatgctactctcaacaagttcacagaggtaagattgtggcatggtctactttttggattgatttctaggtaaaatcccattaaaaaattctcttagcacaaagccatttattctgtatttggagtcatcctgccaatcctggtttgaattgggttgggttagttacagcagattttttcaagaacattttgtgaaatttggggactgtagagatatctagtactgttttctctgtgttctttctacatttattgacaggtttttttggtcaaacattcagtaatgataattaacatttattgaccacgatatgcacttagcattataacaaacaatgttacacattatgcaacgagcagtgtttgtgcttaaggtcacaaatacaaaaaccctatgaggtgtagctaccattatttccctcttaccaatgaggaaacaggttcagagccatttagtaatttgcctaatggcacatagtatgtggtggaactaatgtacttgcctaggtgtctgacactaaaaaccattctgtatgtacttcagatattctaaccacctttgatgaaaaggcacccccagactacttcgttgtaataatcgtatacaagggtccagaaacttgggtgaaggaaaggtggtagaggtagtatttttatgtcagatccttaatattttttctattggtaggagaaaaaactctttgtacttctttgagcaagcatttgaacataagtttttttttttttttgggagatggagtctcgctcttcgccaggctggagtgcagtggcactatctcggctcactgcaagttccccctcccgggttcacgccattctcctgcctcagcctccctgatagctgggactacaggcacctgccaccactcccggctaattttttgtatttctagtagagacgggatttcaccatgttagccaggatggtcttgatctcctgaccttgtgatctgtcacctcggcctcccaaagtgctgggattacaggcatgagccaccgtgcccagcccttttttttttttttttttttgagacggagtgcagtggcacgatcttggctcactgcaacctgcacctcccaggtttaagcgattctcctgcctcagctcccaagtagctgggactacaggcgcgcgccaccacacccagctaatttttgtatttttagtagagacgaagtttcaccgtgttggccaggatggtcttgatctcttgacctcgtgatccgccttcctcggcctcccaaaatgctgggattacaggcgtgagccactgtgcctgaccagaacataagctttttaatcattcttgggttgttgagtttaaatgatttttcttgctgtatttatggagtagagttagaaaggtgggtgaactcttagtgattttcattttatagatgggaaaactgagaccaaaagaggatttgacttgcttaaggtcacaaataccataaaaaattttatcgcaacttttcaatgaatggctattacagagtttattttaatgggattttatttgtattttgaaacatttttaaaattcctgacaatacttctacctttcttgagtctgtattataagaaggcctttttgtgaaaaatgaagtcctttagcaattaaaataattttacactttagataactaaatgatggacccttcttataggatatcactgtgcctgcttatttatacttataattccctgagcttcttaactttgtatacacagcgtacaagttgattctacgcctgtatgccctcagattgttcagtcacctttaagcctggctgaattatgtggtactattttcaacctgtggattccttggccatagtctccagaagtggcacaggccactgtcctcctgcaactataaaaaagatattggtagccccttgaagataggtagtcactgggttagggattcaccgtagggagagttttaaaggagcaaggcttctggctataactgcattagctgtctttttaatataccactttttttcttaatttcagaattttatttctttaaaaaaagcatgtttatttcataaaaatataaagatacagataagcaaaaagaatttaacaacatttaattgttaataactggcttctagatgtttttctctgcatatatctgtgtgtattcataaatacacatacagataggatcacactatatattttttaaaatctttccccatcttccttggtattgtttttatagctgtcatagtgttcactatatggatgtgccatacttctttaatcattcccttatttttggaccattaatgtggtttctaatttttcaccattccagtttgtggtgaatgtgctgttacctaaatatttgtatatgtctttaattatttcttttgtataaactcccagaagtagaatttttaggttgcagtgtatgtgaacttttgtgtaagttttcacgttatgctaccaaactgccctttagaaaggtgagtctcacactgccactgagatttcatgagtgtccattgaatatataaccacagtgagaacaattctgatctttgtctaaaaatgatatctcattgttttaatttataatagtagatttctttttttttttttttttttttttttttggagacggagtctcgctctgtcgcccaggctggagtgcagtggcacgatctcggctcactgcaatatctgcctcctgggttcaagcgattctcctgcctcagcctcctgagtagctgggattacaggcccgcaccaccacactcagctgatctttgtatttttaatagagacggggtttcactatgttggtcaggctggtctcgaactccttaccttgtgatatgcccgcctcaggcctcccaaagtgctgggattataggcgtgaaccaccccgcccggcctataatagtacatttctacatttttggctgtaggtttcaaaaacaagttccattataattttttttttttttaaaggaacttaagaagtatggagtgacgactttggttcgagtttgtgatgctacatatgataaagctccagttgaaaaagaaggaatccacgttctagtgagtgtgtagtatttaaatttttcaaaacaagttgtatctttcaaacataaatatttataaaactaggccaggtgcactggctcacacctataatcccaatattgtgggaagatcacttgaacccaggagttcaagaccagcctgggcaatgtggcgagatctcatctgtacagataattaaaaaactggtggggcatgttggtgcacacctgtggtcccagctacttgggtttttgaggtgagggaatcacttgagcccaggtggttgagactgcagtgagctgtggccacaccaccacattccagcctgggtgacagagggaaaccccgtctcaaaaaaaaaaaaaaaaaaaaattaaaaacttggtattaggtgggcacggtggcacacatttgtagtcccagctacttgggaggctgaagtgagaggatcgcctgagcctgggaggtcaaggttgcagtgagccttgattatgccactgcactccagcctggatgagagtaagaccttgtctcaaaaacaaaaacaaaaaaaccctggcagtaatacttttggatttttttaaggttgtagtggaaaatacattattgatagcaatctttcaaattcttttggattaacaaattggcagttttgttcatttgtgctcttaaagcctacaaatcatagtattttcaactaataaaaagcaaaatttagtgtgctcttattttaacaacatgtaaatttgcaagttttattttttaggaaattaatacaatatttagcttttgtttctaggctactaatttgaatataatgaaagtaatttccatcagacattcttaagtccatatggaactctgccactttgcaagtacaagattagttacttaatattttgtggataacttgtaggaggcaaaaaggtgggataagaggatgaggagaggtagaaggcatcctcctccagagtaatcagcatagtttctgatactttttgttaggtttctgaggagctttagtatgattagattttttgtctagctcaatttgagcacaaagtgattggaattattttaaattaagttcctttttagcatcaaaataggctgtttccttatagcaaatgggagcatcagattagttaacattttattctttcttccctaagtagttgtctaagttgtaggagcagcttttaggagcacgtaatgaaatgatcttgtaattttagatgtctttgagctgttggtttgattgtgggaaggttatgtagtaggaagagaactggagattttataagtagttaggaagaacgtaacaaggaagatactggtttaaggttatgttcctgcttcttattgagaggtagttctgtagtctttattatattggtcagtggttgggaaggcagttgatgcaaaaagaataatgacctattggtaaggcagtcctcttatatctgatccatagtttcctcatgtccattttggtgaaaataaaaactaaatagccaaatgtgttttaaaaaaatgtgttttagggccctgtgtggtggctcatgcctgttcccaccactctgggaggccaaggtaggtggatcacttgagtccaggagttccaagactagtggggcaacatggtgaaaccctgtctctccgaaaaatacaaaaattagctggacgtgatggcatgcacctatagtcctagctacttgggaggttgaggtgggaggatcacctgaacccgagaggtcaaggctgcagtgagccatgattgtgctgctgtgctccagcttgggtgacagagaccttgtcagtcaatcagtcaataatgtgttttaatagtttggcatggtaataatttgcttgcagtcaaatttctaaatgactttactgtccactgctggaaatcactgggaatgagtgtaaacatgtcaaatgcagccctgtgtttaaaaagtagtaataaaatttaaacttccgaaaataagctgcatacaagtttattttgctgcattatgaatatgttctctagtgagcaaaaatcaacttgttttgacagatggcagagtgagaaaatgactggattgaccatagtctgtttgagtcagtaatgttggtaaacatctttgtgaaatagaaatgaactaaagaacttgaactagtttgaggaagataatggtaggcctaagatttattccaggcctttaaatttaggtttttgttttgttttaaatagctgtgatctgggaaatgcaaatcaaaagcacaatatgataccaccttactcctgtaagaatggccgtaatcaaaaaattaaaaaaaaaaatagatgttgtcagggatgtggtgaaaagggaacacttgtacactgctggtgggaatgtaaactagtacaaccactatagaaaacagcgtggagattccttaaagaactaaaagtagaactatcatttgatccagcaatcccattactgggtatctacccagaggaaaataagtcattaaaaacaaacaaacaaacaaataaataaatagctatgatcagataaaatgaaaggtttaacttacacttgaaaaaacaagggcatttagccttaagcttggaatttccttttcccagacagagattttaagagttaatctaattttgctaggtgaggagggttttggaacatttcatggtaagaggatatccccaaataaggcctgtcagtcctctgaatgctcttgcaaaccagacacacattggaatagactaatggtggttttagctgtatcaatttgaggttcagatgtttctaaatgattaatgatttttttaaaaatagacactacttatatgagtaagtgaagcatgttttatattgtttcttaactaggtgcattttagggagtattagaggaagtaagctcttgactaaggtactggttttattgctatttacagttaaactctctagtgacatttataataacacagtcctttaattatggggcgtagttgtcaactcaatcatgtactgttttggctaatgggctacatgaagtgttctagtggtgccaataatgaatgcagaatcaatttaatgctctgtcacttttctctttttcctcccctaatatcttaaagtgtccttatccaatctcattagaatagccttatgtttttaaaaaaattcctaacagtgtttttgcatttctatctttgaagcttagatggcaggagggaaggcttgtaaaatgtcagcccccagtccccctcctccactccccatttgtgttggtttcttaggacctcttgctaagtagtgaggaagataaacccctgcctatactgtgaatgctcgtgggattagtcttaattgaaagatagcccaaataggtgaatacagaaagagaaagggatacttgacaaaatggtctccatttgcccaggaccctgtcatgcagccctgtccttgttaaatggggacatatataatttagtaagcactttaaaaatactcactgcttgccttttaataagcacaaagatggtagtttgtttctgttatgatttactaactattggagatttcttatcagataacctttctctaaagatgtcataacttagttatcttgaattataatcttcaattatctgtagagaccaatgagacaccagttggtatgctttgccagagtggacttttaaatcatgttgacatgtgctgtgtcctctgttactttgtcttggctttaattacagttttgtctattatgtctaattactactctattcagatatcatttttgggagaacactagctcttatgactctgatagagatttctgtaagtttttgtaaattcagatgtgtgcgacactgcattgagaagggtaatttatttggcaaactttaatttcaatcctggatcattttacagcaatgatcagaattgtgttaacaataggtatatatagtgcagttagttcagttaggcctgccgtgtgtactgtgtgcaggtattctgtattaggatgttaatcatggagaaaatatcaatttaatgtaaaaggtcatttcttttcaggattggccatttgatgatggagctccaccccctaatcagatagtagatgattggttaaacctgttaaaaaccaaatttcgtgaagagccaggttgctgtgttgcagtgcattgtgttgcaggattgggaaggtaaactcttacctttattaccctttttgtctgaattcattaccatgcctaagttagttgaaagtttcactttggtagacatttgcatatattatactaaataacattaaattacctgaaaggaaaggaaatgagaggaaaaactagtgtaatgatttctcaaaagagcctgttcatttcatctggttgtctgattctgatgccagcctggattgtgggtgttttatttttctccctatttcaagtaatcaaaagttcaggtcactgaaattggcaacaaaattaaaataattttagagtttgatgaatctatacatggttaattttggactgagatgaatgggaagttaatagatagcagatatctgaactttaaactcttgaaagaagatgtatggacaagaattgactttgatcttaaaaccttttcccctgagcattgcttagaatggtgttgcaacgctgtcatcagcagcagattaaatgccaatttaggatgcacactttgactcaaaacattagtgtaggctgccattgcctcaaggtggtgattactcaagctgttagttctgctctgcccttttgtttgctatttccttttttgtagtgtggtactgtttgttcataaggttagaagttttagtccttatcctgaaggttgaagataatgttgtaacgtgagttggcagttttataactagtagctatcctagttttaggtagcccaaaattggtgccctgtaatgggctttataaaaacatcatttcctttgttaaatttttttaaaaagatagaacttcttctagtcatcaattcttgggcattttcctagctcatcaaaaggattttcttgaaaacgtctagcacctttttagcatttgataaggaaatattaaaatcaattggtaatgaaaattctgacacattggagataagtaatatgtttggtcatttattttactgtgataatggctaaaggccaatgaaggatttttgatcatatctagtgatgagagaatttaatatataatgtgatgttttaaagagtaaagatttcttaaggtttagaatttagtgctttactaaaagtagataatcaggctgggcgctatggttcacgcctgtaatcccagcactttgggaggcggaggcaggcagattgcttgagcctaggagttcaagagcagactgggtaacacggagaaaccccgtctctactaactattaaaaatcaaaaattagctgggcatggtggcgggcacctatagtccgagctatttgaggaactgaggcaggaggatcacctgagctttgggaggttgaggctgcggtgagccgtgattgtgccactgcactctggcctgggtgatagagcgagaccctgtcccctgccccgccaaaaaaaaaaatcatagaattaatgatgatgagatatatttactgtattaggcagataccagctactttagtatacaggaaaaagaaagctcatgcgttgcattggtaatatgcagttacaggtttttaaaaatcctttcactccaagacttatggatacttacatacaggtttctttctgcagggcacctgtgctggttgcacttgctttgattgaatgtggaatgaagtacgaagatgcagttcagtttataagacagtgagtatgaagtttttgtgttcagaaacacagaaagcaagatcatgcatgaggaaggaattatggaagggatattcatttatagtatgggataatttgctttttttggcttgaagtattatttgaagatgtaaaaaatttagagcaagtgatagagactcagtacagctggtttccagattcaaaagttttctaatttggacattatagactgtgtccagtatattgttttgagtatctaggaatctcaaaaatgccccttttaatagattccaaataccttccaaatataattctctgttaggaggaggcaagaagaatgtgtagaggagcagttaatcacctgagactcttttttttttttttgagatggagtctcgctctgttgctcaagctggagtgcagtggctcaatctcggctcactgcaacctctgcctcctgggttcaagcgattctactgcctcagcctctcaagtagctgggactacaggcacgcaccaccacgcccagctaatttttgtatttttagtagacggggtttcaccatgttggccaggatgatctcaatctcctgatctcgtgatccgcccacctcggcctcccaaagtgctgggattacaggcgtgagccaccacgcctggcctcacctgggactcttaagtgatctattcagggacaaaatcaggatggtagtgcacagacaggatcttgacattgatctggaataacgaatcatgctattttgttatccagaattctttgacaatttttgtcttgccctttccctttcaacccttcctttaaaaaaagaaaacgaaagtagaaactattctgatctttattaaatggttaatagactataatgacagtcagcaagaaaaatttttctattccttctaggagggcttagaaagttcatgttgcaacttagctctttaagaattgttgtagtatgggaaatatgctggttttcagctgtgtggaattagaaaggctttaggatgtaaataatgcatttcagtgaatcagacagctctttttttacatgataaagtttgccattcttgtattttcagaaaaagaaggggagcgttcaattccaaacagctgctttatttggagaaataccgacctaagatgcgattacgcttcagagataccaatgggcattgctgtgttcagtagaaggaaatgtaaacgaaggctgacttgattgtgccatttagagggaactcttggtacctggaaatgtgaatctggaatattacctgtgtcatcaaagtagtgatggattcagtactcctcaaccactctcctaatgattggaacaaaagcaaacaaaaaagaaatctctctataaaatgaataaaatgtttaagaaaagagaaagagaaaaggaattaattcagtgaaggatgattttgctcctagttttggagtttgaatttctgccaggattgaattattttgaaatctcctgtctttttaaactttttcaaaataggtctctaaggaaaaccagcagaacattagcctgtgcaaaaccatctgtttggggagcacactcttccattatgcttggcacatagatctccctgtggtgggattttttttttccctttttttgtgggggagggttggtggtatatttttcccctcttttttccttcctctcctacatctcccttttcccccgatccaagttgtagatggaatagaagcccttgttgctgtagatgtgcgtgcagtctggcagccttaagcccacctgggcacttttagataaaaaaaaaaaaaaaacaaaaaacaacaccaaaaaaacagcagtgatatatatatatatatatatatatatatatatatatatatatatatatatatatatatatatatataatataatatatatatatatatatatattttccaggtggtttttagtctttactgatgaaagggtgttcatgttagtttcttcaaaaccctatctaatactaggcaaagtagccaagagccttttgttttgtttttattttgataaattagtggagaaatggcattttaagaggagtctcttctcaacttacctgagagtcgaattcttctcttccctaaccaatgaagctaagtggttatcccagaaacttgtcttctaaaagggaggactccaggccatcaataaagatgtccaggcagtgagcgtactttttacaccctgtagaattgtgggctgtagcgttactctgattttctgtctagtatcagagaatgctggtagcttaaaatttttattttaggacttgtactctgaattttcaggaaccgtcaaaggagcagcagcaaattcacatattttcgacttgagaaatgcttgtggtatgtgttttccaaactgccccctatatgtaaagttcagtttaaccactgattgccttgttattactaggttttttgagattaaaaaaaaaaaatccctggtttaaaaccaacaatgatgcctagtgagtatgtgtccacaggccataacagggtagaagagagacatcgtgcaacccaatgagtagtgaagggactgtgttgcttgtgaagcggtgtagtagcatttttgcagattcttggctgggtttagtgtactgatctagaaaagctgtttttctgctcctttgtggaaggcagttatgatcaggctgcatggacaaagcaggtagaggggcaccatcaggggctcttgcactattttcacctctaaatattacgtactcagtagtgccctgcttctagggctctgaatacgggcttaaagtcatcttgtcctgctggaatttgctgtgcagagccataagcctcccattttgttagcgtcagctaggccaataggaacagaccgggaccttgtctcacactgatgatacctcacatgttgaccggctatgtgaactgcctatttcctatgctggagttttgatttttaactaaacgcaaatctgtagattctctcctctcccatcccagaaaacaaaacaaaataatgcttttcgaaattgtttctaggactttaaaacataatggtatatccaaaattctttatttcagaatgcaacaatagattccattaatatagactcaagatcaaaacagcatacctgctaagctaagatagatggtgttgattccactgggttttgatcaatacaataacaaacctttttcctttgacatactctgaattttgttgtttggggggagggggtgtgtgtgtgtgtgtgtgtgtgtgtgtgtatgtgtgtgtgtgtgtgtgcacgcgcagtgtccatcagtatcagtgcctgcctgagttaggaaaattacattcctggttctgtattgaggagaaggatgtataaagcaacatgaaacattagccctccttttattttaaagactaatgttaattgttcttaaaactggattttttttccttaaagcaatttttttcttttcgatttaatgaagtattgctagctgaagccagtttgacatagagagatgtcagattgatttgaaaggtgtgcagcctgatttaaaaccaaaccctgaacccttttaaagaacaataaaacatattttacacgctctttgtgcatttttttcctccatcctcaagagtttatgtctgtgcttataaagcggagtttaagctgggtgcagtggctcatgcctataatcccagcacttcggaaggccaaggcaggcggatcacttgagccccaggagttcaagaccagcctgggtaatgtgttgagtccatctctacaaaaaaaaaatgtttaataattagctgggcatggtggtgtgtgcttgcagtctcagctacttgggaggctgaggtgagaggaacacttgagcccaagaggttgaggctgtagtgagctgtgatcatgccactatactccagccttggtgacagacaccctgtcccaaaacaacaacaacaaaaccaaaatttcacttacatctgttcccctttctttgcctgctattttcaaggactgttttgggtcctgctagtttactgcaaggaggtaaaatagaggcttggaaattcaaagattttatgtcactgaggtgttcaggaagagccaacttaaccatagctgggatacatctagtacattttctggttcagttcttgtatacaaccctgtaggaattcagcatcttgtcaaaggcttggtttataccatagattattattttttagagacagagtcgtgtagtgcttcccaggctggagtgcagtggctattcacagagtcaataatcgcatatactatggccattctgagtagtctctcactgcacccagcttatttataccataggttttggtgaagcattgcaactttgtacttgaattcgtattaaagaacaatgaggaagtaacagctctgtattaatatatcaggatttgggagtgtggaatttccctttcactatgggtaagcatccatccacccaggtaacaacatgctcagatactaggaaaagatacgacactcatttcactttggagtacctcagtctggagggggtgtcagatatgtagacataaaacagttacagtgggtggttatagtactatttatagatcattgatccacagcctgggcaacatggccaaaccccaacttgacaaaaaatacaaaaagtaactgggtgtcgtggcgcactaccatctggactacagtcccagctactcgggaggctgaagtgagaggattgcttgaacatgggaggctgaggttgcagtgacctgatactgtgccactgcacttcatcctgggtgacagcgagacgagtctcagaattcattgatcctgccacttctcttcacctcttttcacttcttcatgtccttcattacctagcttaggttctgtgatgcactgtgacaatcagcttttcagccttgccccatctcttgttgcattgtacttccctggctaaaatccatttttggttaagttcagtactccactttctgtgcacttaagtacttacacaactgaacatgctgattcagtctctctaaggtcatgacctccccgggccaggtggtacgcgcctattaagtctcagttactcaggaggctgaggcaagagaatcacttgagcccaggagttttgaggctacattgtgaaatgattgtgcccgtgaacagccactgcactccatcctgggcaacatagtgagaccctgtcttgaaaactaaagctatgacctcacatgagcctcaaaacctctcaatcctagtacatttctctatcccatttacactttctcttaaatttttaacacctttgccatcctctcagcttatgactttttaaaacttagaaataaaattttcacaagctcctcccatcacatctactcacccacctgcatctgtgctactgtcttttagttactataggcagactgtccttgcccaatttttttttttttttttttgagactgagtcttgctctgtcacccaggctggagtacagtggcgcaatctcagctcactgcaacttccgcctcccgggagcaagcgattctcctgcctcagcatcctgagtagcagggattacaggcacatgccaccaagcccagctaaattttgtatttttagtagagacggggtttcaccatattggtcaggctggtctcaaactcctgacctcatgatctgcctaccttggcctcccaaagtgctgggattacaggcatgagccactgcccggcctgtccttgccctatttaaggcaagctcttccacttgtgtgctaaattccatcccttaacctgttcaaagggcccagaggtgtagccattttccttctctgtcctgctcattaacttttccccctactagatcattcccatgagcttataaacatgctagtattccatattttaaaaaaatccttgtttgaccccgcatctgccccttcagctgtcatcccgcttctttgctcttctctagtacaagttgagaattatctatctatgctctctacttctctcctttgagcttgcaccaatgaggattttgactccacagaacagcccgtgttaaagatcgccagaggctgggtgcagtggctcatgcctgcactttgggaggccaaggcagacagatcacatgaggccaggagttcaagaccagcctcccaacatggtgaaaccccgtctctactgaaaatacaaaattagctggatgtggtggcacacgcctgtaatcccagctactctgggtggctgaggcacgagaatcgcttgaacctgggaggcagaggttgcagtgagccaaaattatgcttctgtgctcctacctggtcaacagagtaagactgtctaaaaaaaaaaaaaaaaaaaaaaaaaaaaggatcaccccgatcgatggtcaattctcataacttttttttgagggtcttgttttgtcacccaggctggagtgtagtggcatgatcatagctcaccgtaaccttgaactcgggctcaaacgatcctacctcagcctcctgagtagctaggactacacgtgcatgtcactgtgcccagctaattaaaattttttggttgggtgtggtggctcacatctgtaatcccagcacttcgggaggccgaggcgggcggatcacctgaggccaggggttcgagaccagcctggccaacatggcgaaaccccgtctcttctaaaaatacaaaattagccaggcagggtgatgcatgcctgtagtcccagctactcgggaggctgaggcaggagaatcgtgccattgcactccagcctgggtgacgagcgaaactctgtctcaaaaaaaaaaatttttttttttttttttttttggagagacatagtcttcatagcctttatttatttatttatttaggacatggagtcttgctctgtggcccaggctggagtgcagtggcgcgatctcggctcactgcaatctctacctcctgggtttaagcaattctcctgcctcagcctcccaagtagctgggactacaggcacgtgccaccacgcccagctaatttttgtatttttagtagagatggagtttcaccatgttggccaggctggtcttgaactcctgacctcaagtgatccctccacttcggcctcccaaagtgctgggattacaggcgtgagctaccgtgcctggccaaaacatagtctttttatgttgcccaggctggtcttgagctcctggtctcaaatgatccccctgcctccgcttcccagagcgctgagatgatgagcatgagccactgtgcccaccttcataacttctttgacatgtcagcatatggtacagttgaccacttcctctttgaaatgcttcatttgcatgtaggaaaataatgcccttctcccctaaccccccctcaaatgtccaggttctaaatccctggaacctgtgaatgttatcctacatgtcaaagggactttgtgggtgtgattaagttcggaattttgagatgggaagaatatcttggattatcttggtaggcctgatctaatagcatggatccgaaaagcagagaacctttcctagctgaggtcagagggagatgtgtctaggatagaaggatcagagatttatttgaaggtggagggaaggggccaggagccaaggagtgacggcagcctcgaacctggagaaggcaaggaaacagattcgcccaacagcctccaagaaggaacttagcctgctaacaccttgattttggttgcatgtaggatttctacagaactgtagggtaaatctgtgttgttttcagccacaatgtttgagataatttattatagcaccaatagaaaacgaatacaggtttttgcctctagaacactacactcctgagttttcacctagtttagttgccacacctcagtttcggtttctggttcctcattagcttctacacttctgttctatctccctggactctattctctggattctagacccatatccaatacctccctctcatctctcactgatgtgtcatagtggaaacttaactttaattcttgctcaaatgttagcttgagtgaagctttccatggccaccctatttgtcccactaagctttagtgtcctctgtaatacttaccaccatctcacaagcttcttttttttttttttttttttttttttaaagtttcactcttgttgcccaggctggagtgtgatggtgccatcttggcttactgcaaactccgcctcctgggttcaagcaattctcatgcctcagcctcccaagtagctgggattacaggcatgtgccaccacgtccagctaattttgtatttttagtagagacagggtttctccatgttgatcaggccggtctcaaactcccaacctcaggtgatacgcctgcctcggcctcccaaagtgctgggattgcagacaggtgtgagccactgcacccggcctcgaccttttaattatttgtttcccccaccaaaatataagctcaacaaaggcatagctgttttttgttttgtgtttcgttcaccgtatcttcagcacctcaaatagtgcttggcatgcagcaggtgctcagtggatactgaatgaatgggtatggatagagacatagacgaattatggtactgtgatactagggggtaactaaaactgccctggagcacatcaggagatgctgcagtgggcatgtttgagctggattttgaaggatgagatagaaaaggttgatacacaatgagatagcatgttccatccatcagaatggctatcataaaaaagatggaccataacaagtcttgggaagggtatgaagaagttggaacctttatacattgctggtaataatataaagcgatggtgcagtcacttttgaaaaacagtttggcagtttctcaaaaagttaaacacttgccatatgacccagcaattccaatatgtacaattttcaattctacatatatacaagggaaatgaagacattacggttacatgggctagggcggggacagggtttctttctgtggtgataaaagtgttctgggattagacagtggtgatggttgcataacagtgtgactgcattaaatgctgctaagttgtacacttacaaaaaaaggttgatgtggggacagtacatttcaggttgaggaaataatacaaggcagtggaagtatgaaagagcatggtatttttgggagaaggggcaagatttggtctctctggagggtttggatttgtgctaggcaggtttggttgtcatcagagtagaagaggtactagacaccccttccttgtacctccccgtctacccccgaggccatagatgattggatcagggatagacagttgactcaactgctgacattggccagcagattctcgtttttttttttttttgagatgtagtgttgctctgctgcccaggtgggagtgcagtggtgtgatctctgctcactgcaacctctgcctcccgggttcaagcgattctcctgcctcagcctcccaagtagctgggactacaggtgtatgccacgaggcctggctaatttttgtatttttagtagagatgaagtttcaccatgttagccaggctggtctcgaactcctgacctcaagtgatccacctgcctcagcctcctagagtactgagattacaggcgtgagccaccgtgcccagcccagattctcaatttcaactgaggtagactcttggatgtgaggggccagtagggccatgtgtatgttgggtcatatgtgagacgagtagacataggacagaggaaggaggacggagaagcagcccaggggagcagagagaagagactgtggcctgggattaggggagcaatgcccctgaattcagagttctttttcataaagcccagctgcacgtcgtcccctgaagtcctttcgatggtttctgtcccttccctcgccccttgtttaaaatagcttgagtcagtttcttaataaccaagagagccttgactagaagggattatacaaatagcatgttaaatgctgtgactgaagctcctataggtagagtggtgatttatgctacatcctatacactattctaggcactgaggatatagtgggaaacaagaaacacgctctgccctggtagggcttacattctactggagaagacagagaataaacaggtacacaaattagtaatctattttcagatagtgattgcttgagctcaggagtttgagaccagcctggctaacatggtgaaaccccatctctacagaaaatacaaaaattagccaggcatggtggtgcatacctgtagtcccaactacttgggaggctgaggtgggaggattgcctgagcccaggaggcagaggtggcagaaagaaagaaatttgaaactttattgatcatttctcaatctggagaagacatcagattcaactatgtggtttattaaaaatgtccacgtccaggtaccacccagatcattctgaatcagtctctagttgtgaatccgctttgggcggtggggagccatgaaggttggtaagcacagcagctacgtggtcagatctattctcagaaagttattcaaggagctccttaaatcagagaccgtacctgttatgtaaacccagttcctgatttgtactatgcatgcaacaaatatcagctgaaggaatgagaatgaattggagagactagaagctgagagacatttatggatggtgggtggatgatagttgcagcagttcaggacagaagtgttggggccttaactaagggagcagcggatggatggggtagaagattctttccttttagccaccagatcccagatctacatgaaaaggtatccagcatatctacatgctaatttctttctttgtttcttttttctttttttgagacggagtctcgctctgttgctcaggctggatgcagtggcacgatctcagctcactgcaagctctgcctcccgggttcacgccattctcctgcctcagcctcccgagtagctgagactacaggcgcccgccaccacacccggctaagtttttgtattttcagtagagacggggtttcaccatgttagccagggtggtctcgatctcctgacctcgtgatctgcctgcctcggcctcccaaagtgctgagattacaggagtgagccatcgcacctggcctacatgctaatttcaaaggattaatttacagggatatctggccatgggaaagatttgtaaaaccgcccctacctcttattttctccacagatcacacttgcacatgaaagtaaatagaatcctcttcactacttgcaaccctgctaaccaccccaaacaggttaacagaagtgtgatattagccatgttacttctgtttcctttgctgttttggggtctggcagtcaggaagatagagaaataaaatgataatactggccatcatctgttgagtactactgtgctcagaatttcatgtgcatgatctaatttaatcttcataggctactacataggcttcatcattgctaatcccattttataaatgagaaaatcaggaggtgaagtaatagcaagttggtggcaggggcagtattagaatctgggcctgggccgggcgtggtggctcacgcctataatctcagcactttgggaggccgaggcaggtggatcacctgaggtcaggagttcgagaccagcctggccaaaatgatgaaaccctgtctgtactaaaaatacaaaaaattatctgggcatg

SEQ ID NO: 1448 - DNA, 1526 bp, Homo sapiens
gtttttttttttttttttaattgcaagcatatttcttttaatgactccagtaaaattaagcatcaagtaaacaagtggaaagtgacctacacttttaacttgtctcactagtgcctaaatgtagtaaaggctgcttaagttttgtatgtagttggattttttggagtccgaaggtatccatctgcagaaattgaggcccaaattgaatttggattcaagtggattctaaatactttgcttatcttgaagagagaagcttcataaggaataaacaagttgaatagagaaaacactgattgataataggcattttagtggtctttttaatgttttctgctgtgaaacatttcaagatttattgatttttttttttcactttccccatcacactcacacgcacgctcacactttttatttgccataatgaaccgtccagcccctgtggagatctcctatgagaacatgcgttttctgataactcacaaccctaccaatgctactctcaacaagttcacagaggaacttaagaagtatggagtgacgactttggttcgagtttgtgatgctacatatgataaagctccagttgaaaaagaaggaatccacgttctagattggccatttgatgatggagctccaccccctaatcagatagtagatgattggttaaacctgttaaaaaccaaatttcgtgaagagccaggttgctgtgttgcagtgcattgtgttgcaggattgggaagggcacctgtgctggttgcacttgctttgattgaatgtggaatgaagtacgaagatgcagttcagtttataagacaaaaaagaaggggagcgttcaattccaaacagctgctttatttggagaaataccgacctaagatgcgattacgcttcagagataccaatgggcattgctgtgttcagtagaaggaaatgtaaacgaaggctgacttgattgtgccatttagagggaactcttggtacctggaaatgtgaatctggaatattacctgtgtcatcaaagtagtgatggattcagtactcctcaaccactctcctaatgattggaacaaaagcaaacaaaaaagaaatctctctataaaatgaataaaatgtttaagaaaagagaaagagaaaaggaattaattcagtgaaggatgattttgctcctagttttggagtttgaatttctgccaggattgaattattttgaaatctcctgtctttttaaactttttcaaaataggtctctaaggaaaaccagcagaacattagcctgtgcaaaaccatctgtttggggagcacactcttccattatgcttggcacatagatctccctgtggtgggattttttttttccctttttttgtgggggagggttggtggtatatttttcccctcttttttccttcctctcctacatctcccttttcccccgatccaagttgtagatggaatagaagcccttgttgctgtagatgtgcgtgcagtctggcagccttaagcccacctgggcacttttagat

SEQ ID NO: 1449 - DNA, 504 bp, Homo sapiens
atgaaccgtccagcccctgtggagatctcctatgagaacatgcgttttctgataactcacaaccctaccaatgctactctcaacaagttcacagaggaacttaagaagtatggagtgacgactttggttcgagtttgtgatgctacatatgataaagctccagttgaaaaagaaggaatccacgttctagattggccatttgatgatggagctccaccccctaatcagatagtagatgattggttaaacctgttaaaaaccaaatttcgtgaagagccaggttgctgtgttgcagtgcattgtgttgcaggattgggaagggcacctgtgctggttgcacttgctttgattgaatgtggaatgaagtacgaagatgcagttcagtttataagacaaaaaagaaggggagcgttcaattccaaacagctgctttatttggagaaataccgacctaagatgcgattacgcttcagagataccaatgggcattgctgtgttcagtag

SEQ ID NO: 1450 - DNA, 67191 bp, Mus musculus
  misc_feature (47049)..(47068): n = a, g, c, or t.
  misc_feature (54343)..(54461): n = a, g, c, or t.
  misc_feature (60604)..(60623): "n = a, g, c, or t.
  misc_feature (62084)..(62482): n = a, g, c, or t.
acatggtggctcacaaccctctgtaatgggggatgggatgtcctcttctggtgtgtctgaagacagtggcagtgtcctcatgcatgaaatagatatttctaaagaaggaggaggaggaaagaaataataataataatacagggcatatacagggctaacaggattgttcagcaggtaaaggtgcttgctctcaagtctgataactgagttttattctcaggatatgggggcttaggtggtggtggtaggtgaccaacttctacaggttggcctcttgcctccatttttgcatgggatgtgcctggaccccagcccctgtggctggttaaatgtaattaaaaagaaaataagaaactgggcacggtggtgcacatctttagtcccagcactccagaggcagaggccagcctggtctatatagttagttctaagccagccagagttgcacagaaaaaccctgtctctaaaaacaaacaaacaaacaaaaaagggctagagagctggctcagtggctaagtgttaggagtgcttgttgctcaggtttaagtcatagtgaaagaacctagtggagaaaccccccactcaattccgagttggtgtgcacccaaggaatcacgagagactgtcttgatgcaaacacatgaggtagtttaatgacggagctccgggccgacatgtatctcacacaggagattgcggttgtcgaccactaggcttgaaagctaggggtttttatagaaaagggtctggggctgggggaggaattggcgcggtttcacacgattggttcatttaaacatcagcagagtgtatgtgcagatggaggtaacagcagagcatctggttaacatttaacccatgtcagaagggtgggagatagggaggcgccaggccagtctggacatgtctttgcattctctttatctttatggccaagcagcctcaggaatgtcttaatgatgggcctgcccaggcatgtcctggcctgttctgctatgttctcagtcccaggcttcaaagctcacaaacaactctttgggctattacatgaatcacaggactcaagttttattttctttcaatagcaccacatggcaatccacaactctctgtgactccagttccaggatagtcaatgtcctcttctgacctccaagggcatcaggagtgcacacataaatacacacaggcaagatactcatacttataacattttataatcataacaaggcccaggtacatgtgaggtccacatgcatgcacgtgggcactgcaggctgtgtaagtatgggtatttacacacgctgtttacaaagcactgttcgctccgggagggttggatggttgctctctctcctccatctccaccccagcccatcaggtagagaagaatccataaagacagacctgtctttcagtgcgccttggggtgtggttccagagaaacttggttttgttaaaagcaccagttaaagagctcacataatttccttcctagatgatgtttctaacacgattttcctctcatatgattattgatctgatagaaggaagatatttggcagatgttttgtctcagatggcctggcaatgctgggctaacaaggaggaagtagcctgggagcatcctggctctgggagcaccatcagcctctggaagctatgggagtgtacatggacccaccctcacacacagtcttccccgtccctttcaagcctgctgtctgaggaccacctgtgggagactaaagagtctgagcaggccctgtagtgggcttagggggtccccagtgactcagggaaaagcttctcctggccatgccccttaacagtggtgacagggactgcaccactgtgcacaactttactctgagaagatgcacagtacgccccagagattttaaagatggctcaagtgtgtgagcggccaatccacagagtccatgaaactctcatcaagatcacaggccccagctggagagatggctcagcggttaagagcactgactgctcttctgaaggtcgagttcaaatcccagaaaccacgcagtggctcacaaccatctgtaatgagatctgacgccctcttctggtttatctgaagacagctacagtgtacttacatataattaataaatctttgggctggagcgagcagggccggaacgagcagaaatcctaagttcaattcccagcaatcacacgatggctcacaaccatctacagtgtactcatatacataaaataagtaaatcttttttttattaggtatttagctcatttacatttccaatgctataccaaaagtcccccatacccaagtaaatcttttttaaaaattaaaaaacatcacaggcccttcagggaagtgagggacgaaatgaaatctggaataaacacaaagtgaggaagccccaagtgaggatgctgtgcctcctggaacagggcagatagtgccccctcaggcttggagtcatcataacaatgtggctggactcagagacagctgctgaccaacccacagatttagggcagctgagcaacaggctgggaatgtggcagagccttgccaagcctgacaagatcctggattccatgcccagagctgcaaggtcaaaccaaaccaaaaacaaaaacaaaaaaaaaaaacaaaaaaaccccccaaaaaaccaaaaaaaccaaaaaccccaccaaattaaaccagaaataccaagcagagaaaaagggaaatagaaaaatgaagggcacagaagcagtcattccttaaggatgctcaaaggcgaggaaccagttagatggccgagaagaagggaacaggctggcataggtgtatatgcgggtacacccagcagaggggtcaggaaaccctatctaggttcaaggtccctggctacctgctgggaagactctcgtgatccagatttgcacagacatttgcatgttgctttgaactagacttcaggtcaccagaattccatgttccaggccttgagcagaactaccatgcctctaacagccaataggggagccccagtggcaggactacggtggcctgcaggatgtcagtgggatggcaaggctgacaaccagagttccatctctggggacaaaataataaacgagagagacatctccccccagctgaccaccccaccccccgcagtgggaaatgtgtacccacacatgacacacaccaaataaaatcctttttttttttggtttttcgagacagggtttctctgtgtagccctggctgtcctggaactcactttgtagaccaggctggcctcgaactcagaaatccgcctgcctctgcctcccaagtgctgggactaaaggcgtgtgccaccactgccctgctccaaataaaataaaggtcatctaaaacaattacaaacagcaacacagatgggggacactcctgactctctggccccaggagacaaggtctgtgggctgtcccgtggtgtctgcagccaacagcttaagaaaggcgagggcacaaggtgtccttttgggcttgctggtctgcaggcgcctcctcctaggagaacaggcttcagtgttctggcacgttcctcccacttcagggagacaaggcaatctgcccagactctacagctagaaacccaaagaagcacaagagcgtccatgtttcttctcttagaacgcctgattctgcttacaacagagtccgcatagatttctaatcagagtaagggctgacaggcacttccttggtacttggtccactcacagagtgaagctgtagtgtgggctgaggccctccagggcaacaggaccagcagagatccactgtggaggtaaaaaggccagcttaggaagtttgggaaggtcatgaaacacttgcccctccagaaggaagaggctaattaacatttctcagaccttagggcagaactgccctgtgggtggggacacatcctgcaggacaccttcagacaagggacgtccttgtcacttcattccctaaagaccaatcagtttaaagggtgcactgctccgccaatcacgttgtgcctagttgctgatgctctcttctgcccctggaaaccatataaaaactccctgaatgggtgctgggggtcgccgcctctccttcgggtctgggaagaccccagtgcactggaacaaaaattcctcttgctttttgcatctattccggctccacgtggtccactcaggggctccctggtaagcagaggctccctggagtcttgcagagggacgggactctgtccaacaagttctctgtctcaaagctctgtggcatcagtagaggcccctgctcaggggttggagcctagctcccgtgtagcggctcagctcctccagcaccagcttctcctggttgtacatctggaacacagcagagcacaagctctggagggactctggggacccttgtcccgagtccgagtcctcccagggttcacctccttctgaagcccccctagccgctcccccaggctctgcacaagtctatcagcagcacctgaacagagactcagagagctgtaggtagatgcaagatcaaaggacaggacagcagggagtgggctcccaaaggaagggggagaagctggggtacacatggggcccagggaagtgtggggcagggagggagtgggcatagacagggctgggtggtagcagaagcagactgcgatctacttttaatttgaaaaaaaaagttcattcatgggtgctggagagatggctcagcagtggagagcactcactgctctcacagatcgcctgggttcggttcccagcacccgtatcaggaagctcacaaccagctgtagttccagtttcaggggatctactccttcctctgcctctgcagataaccagcacacacattacctacaaacgtaacccaagcctattggacaacgtagtgggctttaagtgtggtacccattggccgttagaagaaaaaaaccatgacttagcattatttgttgccaactgatgggtaagggttttttttattattttttattttttgtatgtttttctgaacattaagtgtcccttgacccccatcgataatagctagcattcagggaatttaactttcacctgcctgtccagggtgcctttcaggagtgaagtatcatgaggagccagagccttcaatacaagacctcacctttccaggcaggatggatggaggctgtagttcggcctcttgccatggggtttcgaggtgggggaggggaatgctgggcagcagcctaagggttaagggtgtatctggggtagccccttgcacaggtacccctcctaccttttgccactcggctttggagctgtgggtgaagcccagcaggtgacagagtccatgggtggctgtgacctgttggagtaattgagaagtcagctcaggggatgatctaccagacggccgccccttcgggctcacagaggacccttgtaagactgagttgtcctacgccaggaccctggggcaggatacacagttgctgccctgggttggagttaatactcagttctctcctgtctaggcaagtgctaccagtgagctacatcccaacctctatcgcctcctgtctaaaacagaacaattcattcactcagttcacttaattagtgtggagcaacactgtttggggttgagaccaggtaaaaagagttgattgtccctggcagtattgggaatctgactagatagaattaagcaagggtgaatcacggttgtagtatcagtggtctagaaggttgcagtgaagtattgattgaatccaagagttcaagacctgggtggtatagtctacatcttttcatttatttacttattatttttaaattgtgtatatgtgcacatgagtacagacatccttgcggcctgagaggacatctgataccttggagctgggggcaggcggttgtaaaatacctgacccagatgctgggaagagaactcgtgttcaccagaacagtggctcctgatacccacggagccatccctctaggctagggcgtaaaacaaggtcagggcacctgtgcagagtaggcatggtggtcaggcaaagacaggacaggactcgagtaggtggagggagaggctggacgcagcagaatcagtgtcgcctgcttctaactgcagacaggattgggttatagcccgcacaagaaggggtagaacagagtccagcagagggcactgaagatctgaagagcccagctaatgaagagcctgcatgatgtctagctttggctgaccagaacaccaagatttatagagaggactactgcaagctaagctaaagttatctctagcaatctttagtaccctctaataaccatttactacgaaccttgggatctgccctaataccctcatgttgagcagatcacctcttggaaagcatggttagtctgacacacttctagcctcggccatccctaaagccagggacactcagtggttgtgtgggaaacctacagaattgccaccacctccctgtatactgtctgtctaacgtctgcactgaagtcactggtgacatgtgccttttgtctattccgggactatgagagttcacacaaccccttccatgttgtacagtaacccaaatctgttctttggcttcagtagccaccctcatttggctcagaataaactagtttcttatttcctttaaagcagaggtgttattttatgtcaactggcagtgccgctgctggctctgggccacttccttcacagcagagaattataacttccccaactctgtatagcacaggctgcactatccgagatcaaggagacagtcaaggccaaggccttaactctgggtcaccaccagggcctgctttgggtcactcttcaactctaggaggcccacagacagcaaggctgtgggtgttctgccaaagtggagctcttctactgaacactggtacatcgcgtctcttgttagtttcccctcctgccttcaaactctgaagtgtggaggctcctgttctgttctgggtagtgtaataagaagccaatccagcaaatttcaattagggaagcatggtcccatttctagagataaaagctgaaagaagtccctggggacaccaggcttccccccccccccccagtgtgttctccttccctcaagtctggagcttccagtcccatcaatacaagtggtatgtgtggatgctcgtgtgttaccaggagtctcctcttccaccttctctaaggttcattttgaagttcctttgcgagcgtatgtggctccgcacccgacttaccgtcaggacatcacagtaatcctcactttctctgcaatgctgaagaatgtactccacccctaggaaaatgtctcccagattataatcatccggtgagtgtggctgaggaaattcgccagctttcagattctgaaaaggagaaacatcaccaggttacaaggacctggctcacttgtttagcagagggcacgggactcttaaccacaggatgctcaagctgcataatgaaggctaaggaccatcaaagagtctgagggggtggaatgcagttatcacacagtgaccctcacgtgctgtttttatcaaattatctactcacccccccaacccctctcaaagtcacattcaatatcattgaattggcatatggacacaatcacactctttccccacttgtgtgcctgccattttttcctgttaagggaaacaggctggagagtggctcagtgggtaagaacactgactgctcttctgaaggtccggagttcaaatcccagcaaccacatggtggctcacaaccatcggtaacgagatctgactccctcttctggagtgtctgaagacagctacagtgtacttacatataagccgggcgtggtggcgcacgcctttaatcccagcacttgggaggcagaggcaggtggatttctgagttcgaggccagcctggtctacaaagtgaattccaggacagccagagctacacagagaaaccctgtctcgaaaaaccaaagggtggaaaaaaaaaaagagaaaagcagaaagaactttgctttgacaggggaagaaacgtgtgtatgctataatccactatatatatatatacagaaacaaatccttcattagctgtggcctcttcagacatgctgtagaccttcagtcccctctgctgggctctgttctacccatcttgtgcgggctatagcccaatcctgtctgcagttagaagcaggcgacactgattctactgcatccagcctctcccaacgcacacctcgagtcctgtcctgtctctgcctgaccaccatgcccactctgcacgggtgcctgaccttattttatgccacaatcacaaggcttaactttccagggttaagcctgcatccttggctctttccttctcttttctatcctttgaagcaccatttactaccaattcattccccaaaaggagtattcccatttcttctgctaacaatgggggaagctatttagacaatgtggttccttgtagctatctatcgcaagggaatctgttgataatgcttaccagtttttacttttctgtccaagcatttactactgaggtacacttaaaactgcagacactcttatttgaatttcctgagggcactgagttagtgagagtggtccctgcatagaggaattgtgatgtttagggctagacatacttaatgggtctatgtcatattgcttcatttctgttttttatttgcttgtttttgagatagagaggatttttttttggaccgagtttctctttgtagccctggctgtcctgttaatcactctgtaacaccagggtggacttgaattcagagatctgcttttctctgcctcccaagcattaggactaaaggtgtgtgccaccactgccacccggctgagaaaggggcttcttatgtggcttttgtctggccttaaactaaccaggcagaccaaaggtggctttgaactcacaaagattcgactgcctctgcctcttggatagatgggattaaaggcatgcacagtcacaccaggctagacttcagtgcatttccagaaaacttcaaaatcaaagataaccagatctgtaatgtaattaacaggaactattctggaaggaaggtaagctgtacgagaagaacatatatacatacatatatatttattttaaatatgaggtatacatatttacctcatgaaatgagaaagaaagcacgtcagttgggacatttttattcctgtagatcctattaatgttctgaatagtcttgttgtcaacacagatgatccccaggtcaaatttcttcactcctaagatactcctgactaaatccatcttcctgcgaagtggcactcttctgatggggaccacccgctgcagatttttaatcaccaaactcatttcgggaagaacacccagccctttaaaaaaaaaaaaaaatggttggaaggaacctgtggttaaagttcgagaaaagacccgtaactactagagagtgataagttatgtaaaaacacacacgcgctcacaataaaactttatttgatgggatttatctggtggcaatgctaagggaaatcacctttatttaccctaggaaactaataaacagggtagactgggcacaacgtgcagaataaggcaagtggtttggggcggttgcaatggtgcaggaccaggtgaggatgagtgtgggtgagcaaatggggtcgctgtgggtccagcgtctctcgggcactcaggctggaggatccacgcacgaacgaggggcttccacgccgcacaatgcgggatcgccgtgcacttaccgaatccgaccgtgaagaaggtcgggggtctggcgggccgcctgccggaagatcagcagcagcacaccccagagagcggaagccggatgcggaggaccggaagttggtcctacaaatttgatgtccgtagcgcacacccaagagcccgctccagtggccggtttgttgcggtgcggtgggcccggtagaggctgcacgcagactgtgggcgagcacaagcgctggcgacagtggccgtatctggcggacttgctcctccctccgcggcctccgctgtcccttgtgtctttgccgagttgctgaaggccttcactagtcttcgctcgaaggcgtctgttaacctagcggccggcttccggagtgttaagcatcggggataaaaagctattatttctagaccagggcatcgcaagttcgagttaccgggagaaaaatgagatggtaggaacccaaagcagtaacattttaaattacggtttttgtgtttttatttatttatttatttattttgccttggagatcgcaagaatctgataagtgatgtgttcccgtcttattactgaggttttgtttgtttgtttgtttgcttgttttttccccgagaaggtatcaattgaataaaatgctttgcatttttattttaatcataacggatcaggcttcacctaagcctgctggagcacacctgtggtcccagcagaagggagaccgaggcagaagaaaggaacttaaggttgtgcttgattgtagtaagcttgaggcaagcctgggctaagcgagaccttgtcttttttttttttttttttttttggtttttcgagacagggtttctctgtatagccctggctggcctggaactcactttgtagaccaggctggccttgaactcagaaatctgcctgcctctgcctcccgagtgctgggattaaaggcatgcgccaccaagcccgttttacgagaccttgtctttaatgaaaagaaaaagaaaaaaaaatctttaaacctcccttacaccataatccatttctaataccctgtgtccaaaacctgttgatctgtgagtggtcggcggcccgttgtgcccttgccttttaaataattgtcttagaatttctgtgatttaagagttggagcaaaatatgctgtgatgtcctaacctttttttttttttccaggtcatcctgaggatgaaggagagcttcccctggcaacagataatttaaagaggagagctacttgtgtatagtccatatttattgccttcagataattggcttgaagatgcacccggtgaaccccttcggagggcagcagcccagtgcttttgcggtatcttccagcaccacgggaacatatcagactaaatcaccatttcgatttggccagccttccctttttggacagaacagcacacccagcaagagcctggcgttttcacaagtaccaagctttgcaacaccctctggaggaagccattcttcctccttgccagcatttggactcacccaaacctcaagtgtgggactcttctctagtctcgaatccacaccttctttcgcagctacttcgagttcctctgtgcccggcaatacggcattcagctttaagtcaacctctagtgttggggttttcccaagtggcgctacttttgggccagaaaccggagaagtagcaggttctggctttcggaagacggaattcaagtttaaacctctggaaaatgcagtcttcaaaccgataccggggcctgagtcagagccagaaaaaacccagagccagatttcttctggattttttacattttcccatcccgttggtagcgggtctggaggcctgacccctttttctttcccacaggtgacaaatagttcggtgactagctcaagttttatcttttcgaaaccagttactagtaatactcctgcctttgcctctcctttgtctaaccaaaatgtagaagaagagaagagggtttctacgtcagcgtttggaagctcaaacagtagcttcagtactttccccacagcgtcaccaggatctttgggggagcccttcccagctaacaaaccaagcctccgccaaggatgtgaggaagccatctcccaggtggagccacttcccaccctcatgaagggattaaagaggaaagaggaccaggatcgctccccgaggagacattgccacgaggcagcagaagaccctgatcccctgtccaggggcgaccatcccccagataaacggccagtccgcctcaacagaccccggggaggtactttgtttggccggacaatacaggaggtcttcaaaagcaataaagaggcaggccgcctgggcagcaaggaatccaaggagagtggctttgcggaacctggggaaagtgaccacgcggccgtcccaggagggagtcagtccaccatggtaccttcccgccttccagctgtgactaaagaggaagaagaaagtagagatgagaaagaaggtgagtcctaaacatgtgtgtgccacaaaagtgtgctgccgagctcttgtgaggtcccttgtggtcacttgattttaagtcccacgatcttggcttttatcccgtggtggctccttttgcctggaagtgttgtccctgacagacttacttgtctgctctctaaattccagattctctcaggggaaagtctgtgcgccagagtaagcgaagggaagagtggatctacagcctcgggggcgtgtcttctttagagctcacagccatccagtgcaagaacatccccgactacctcaacgacagagccatcctggagaaacacttcagcaaaatcgctaaagtccagcgggtcttcaccagacgcagcaagaagctcgccgtgattcattttttcgaccacgtgagtactcccgagaacctgctgcctgtcgctttttctgcattgcaaagaatcacacccagggctctgagcaggagatgcaagctccgcccctctgagcctgtgttctcagtcctcaacttggtcacttgaaaaatacattttttaaaaaattatttttaatttttgtgtatcagtgttttgctggcatgtttgtctctgcatcacttgcatgtctgatgcccatagaggtcggaagagggcatcagatcctctagaaccagagtaacagatgattttacaatgggtggaaccatgtgggtgctggaaataaaacgcaggcctccgtctggaattgcagcaagtgctcctgcctgctgcctgtctatctctccagctccaacgtcgtcacttgcaaactcttttcccttttcagccataagtcacttgcttgatagatggtagggaaagcactcacgtagctttccttttctctttaaatagctcattctaggttcagaattagatttgtgtgactgtgtggggtatggatcatgatagagaaggagtttgagaggacgacgagattttaaagggaaggttgataaagaggataatggacatgtgacgtggaaacagaagggagacttgggggtgtaggggtataggtaaatagccagcagaggcccggggcatgatgtaagggaagggaaccaattagagtaaggtataatgatacatgcgtatgaaatgccatatgaaacccattcctaggcatgcttgctaaaattactatttttaaaaatttattttatgtatatgagtacactgttgctgtctgcagacacaccagaagaggctgtcagatcctattacagatgattgtgagtcactatgtggttgctgggatttgaactcaggacctctggaagagcagtcagtgctcttaaccactgagccatctctccagccccctgaaatttttttttttttttttcgagacagggtttctctgtatagccctggctgtcctggaactcactttgtagaccaggctggcctcaaactcagaaatccgcctgcctctgcctcccgagtgctgggattaaaggcatgcgccaccatgcccagctctgaaatgattttttaagaatctcttcttcacttgaggtcgggatgacatagtttgttttcctaacctgggcgtgtgcaggtctgagttctctggagagtatggtgctgcaggggaggaccgagctgtgcctgtggagtctggttcctctgaaaggtctgagagtcactgtagacacatagtactttgtttccctcttgagacagggtttctctgtgtagccctggctgacctggaactcactctgtagaccaggctggccccaaactcagagatctgtttacctctgcctcttcctctgcctccccagttctgggattaaaggtgtgcaccaccaccacctggcttgcataatactttttcaaacttgaattttctgcttttgcttttgtattacttggctaagttcatggttagtctaaacattcaaacaatacagagaagaaaaagtcatgatcctattccctagaaaaaactgttgggtttgtagcattggctatatgatttcaccttgtgtaaatttatatctttgttatttttctaagtattcatacagaaagaggaaactaataagaacttaaaaaggagaatgcatgttctcataactttcatttttgtggtgtgtgtgtgtgtgtgtgtgtgtgtggtataggggcagaggcatatgtctgggggtcagaggacaccttggtggaggtgtgtatgatgtgtgtgtgtgtgtgtgtgtgtgtgtgtgtggtgtaggggcagaggcatatgtctgggagtcagaggacaccttggtggagtgagctctctcattctaccttttttcggggtccgggtattaaccttgggtcagatgcttcactcactgacagggctcgctgttgtttgcccatacgtgttgtgtctggaagggtctgtatgttgcccgtgctctgtcctgcttctgcctcccaggccctgggagagcaggcatgggccaccattcctagcttacagcttctagtctgatttcccgggatagggtcttgctgtgttgcccagactcacttggaagtgcagggcccttacctcagcctttggaggagttcaggataagaggcatgctgcatcctatccaactaattgttgctgttttctgcagtgaataggaagcctgtggttactaaatactacaaagtgtttttgtctgtcttgtttatttgcttactcagctttctctgccttttggggggtggggtggggactgcgtttggctcttgagtcttcaggctagggattgaactgtgggccttgagcatgctaggcacacgctgtcccgccaagctgcatcccagtgctcaccacccacccaaccccgtaggtatgctaggatgtggtgttgctgtgtagctaatggtctatggcttggtgtgttgcccagcttagtcttgaaactgtgagcaatgtcagcttcccaagtgcttgggttgtttgtacatatgccactgtaccttgcttctttatgtatttatcggatagcttttgtccttagtacagatctcagagaacaacgtttttgtgccagaatgtattcagtttgagggattttattgtttatttcttcataataattaaaaatgaatggctttatattcataattatgtacattacagtcacttcctttggacacaaattctctagcctaagctggtctagaacttgaaaacattttgcataaattattatttattcaaaattattaaaataataatgattattccttctgtataagtattttgcctatgtgtatgtctgtgtactccgtgcatgcttggtgcctgtggaggagagaagaggatgttgaatcctagagctgggttacgggcagctgtgagctgccatgtggatgctgggatctgaggctgggtcctctggaagagccaccagtgtcataactgccaagtcatctctccaggccctggcctagaacctttggccttttccttccccttcctgagtggcctgattaaaggtgtgcacagccatgcctggtgatcataacacttctatttccagaatgttctcatcagaccaagcagatattctgtaatcagtaaggcgcgtctccactctctgaccagcctttggttacctctctttttctatcattatgaatttgcctagtctaggtatttcatggatgtggaaccatacaagttgtctttatatgtagctcatttcacttggcatgttctttctatattgttatatggatgagaacttgattcttttcgatgggtgagtactgttctgttgggttgtctacactttgttactattgttacaacactactcttgtgttgttgcaatgggctattgtgaatgcttggtgtattggtatctgtttgcagcgctgactgctgtaattttgtgtgtgtgtgtgtgtgtgtgtgtgtgtgtgtgtgtgtgtattcttggccatagagttgccatattttatgatccacattttaaaaaaatgttatatatggggctagagaaatggctcagtagttaagagcacttgctactcttatagagggctgaggttcagttcccagaacccagatggtgactcgtaaccagctgtaactccagttctagtggatccgggtattacatgtgaactgtgcacctacaaacccacaggcaaaatactcacgtgcaaaatgaaaaataagcaaaatctaaaatgttaatgtgtatgcatctgtgtgtatattttaatgcttgttgttttgggagacagtttcatgtagtccaggctgacttcaaaattgctatgttgctgacggtgaccttaacacacacacacacacacacacacacacacacacacacacactcactctctctctctctctctcttcctcttcttctcctcctcctcctcctcctccactccttccttctcctcctttttctcttcctcttcttcctccttctcctcctcctctcctcctccttctcttcctcctcctgtccctctcctactactccccccactcccacccccacccccgttttcttcacagggtctctctctctctctctctctctctatatatatatatatatatatatatatatatatatatatatatatatagtcctggctgtcttagaactttctttgtagaccatgctggcctcacactcccagagacccacttgcctctgcctcttgagtggtgggatgaaaggcattgggcttccacgctgttgtggatttgttacaccacacctagcctttttttttttctttttttaagttttgtgtgtgtgtgtgtgtgtgtgtgtgagtatccttgaaggggaagggggttggatctcttggagctggaattacaggtggttgtgaggcatctgtctggtagaggagcagagcagcaagttctctttaacgctaagccatctcattaggtcctaaggtttacataatcattttcattctgtgtgtttgcacatgtgcgtgtgtgcatgtataggtgtgtgcatgtaggggcaggggcatcggtgtacctcggtaatcatctggaggtcagagaacaacttttggaggtccattccttccactctgtgagtacaggagattgaaccgtcttgtgtcacggtgccaggttccagctcagccatcttgctggccctccttttatttttgagtagcctgttctgtctttcagcattttaacatagtgtctggtctctctgtgtccttacactttgtgttgtgaactgtttttcaggcatcggcagccctggctaggaagaaggggaaaggtctgcataaggacgtggttatcttttggcacaagaagaaaataagtgagttttccactcttgtgtccccagtctgatgctctctctctctctctctctgtgcagggcctttgacgtgcaggtgtgggttctttccctaagggcagcagcagtgcggctagctccagctgcatcccggatctcatagctgtttcttcgagttttgcaaaccttgttctgacacttgtgtcttcaggtcccagcaagaaactctttcccctgaaggagaagcttggtgagagtgaagccagccagggcatcgaggactccccctttcagcactcgcctctcagcaagcccatcgtgaggcctgcagccggcagcctcctcagcaaaaggtaggactcatctccctagtaactgttgatggaggagaagcaggggagagcttcgatggttgctatggggcaggtgtatgaagagctgcttttgaatctcctccctcacagtgcgtgggtcttcgcagttgccagtgttagcagtgacatggctttattctgaagttccccaggtcctaggtctttgaaaaagccctctttggagtgggactaacttcaagcagatttttttcttttagggaaagccttatcacaaagctgcaatttttgctctagtccttcatttatgttttaaaaaatgtagttggtggtggtgctgtacactctcatcccagcagaggcaagaactctaccaacagactaacatttctcatcccccatctcagtgtctataagatttgaaggatttcagaattactgattgctcactgctcagcctagcctcagatcactcgctcaagcaatcctgtgccagccttgttagggcaacatctcatttatttaggctttgtgctttttattgttttgttttattgggggaggggagttgagacagggtattaggactctgactgtcctaaaactcattatgtagaccaggctggcactgaactcacagagatccacctgcctctgtctttcttgtgctgggatcaataaagtcacgtgtaacaacgcctggctggcttctttagttttaacgctgtattttcttaactttgaggaccagaatgtcttgaaacattaagaagtgggaatgatacgaaggccccaaatgtgctgtcttctccatagctctccagtgaagaagccgagtcttctgaagatgcaccagtttgaggcggatccttttgactctggatctgagggctccgagggccttggttcttgcgtgtcatctcttagcaccctgatagggactgtggcagacacatctgaggagaagtaccgccttctggaccagagagaccgcatcatgcggcaaggtacgacgcacagagacacacattccagattccctggcaggattgtaccaggcagtttctagggagccacagaggctctcctaccgcgaagtcttgggatttctgataatctgttcctggtattactgcgccctggtctgctagagatgtgagctgtgtgtactaatgtgatgactacatatgcttatatgtgtatgggaggatgcaggggaattaactgattattggtagagaggaacaggggtctgaaatgcagaacggagaggggatgctccatttcaggattgttccccttcggaatgttaaactgtgaatgcattgctctcaaagaatgttaaaataatgttacagatacacagaacccatatggaaattcatggactcatttacaatttttaaaaatatttatttatttattggttttttttcaagacagggttctctgtatagctctggctgtcctggaactcgctctgtagaccaggctgacctggaactcagaaatccacctgcctctgcctccctagtgttaggattaaaggtgtgtaccactaccgcctgtctacaattttttttttaaagatttattattatatgtaagtacactgtggctgtcttcttagacataccagaagagggtgtcagatctcattatggatggttgtgagccaacatgtggttgctggggtttgaactcatgaccttcagaagagcagtcagtgctcttaaccactgagccatctctccagtcctcatttacaatttttaaacatttatttttatttcccttgcattggtgttttgcctgcatgtctgtgcgagggtgtcagatcctctggatctggagttacacacagttgtgagccaccatctatgtgctgggaattgaacctgggtctttggaagagcagcttgtactctaacctctaagccacctctccagcccctacacgtttctcttaagtttcagctgtgtggaatgtctttacagctattaagctcatactcgctttgaacttacagtgctcctctctcagcctcctgggattgtacatacctatcacacctgacaggatttgctatttaaagctgtgaattagtgtaccaatcacagagctttcttagcatggtgatgaaaactgtctctatgatttataggcttggtgatttgtacatttctaataaatttgttgtcttaggatttctcttgctgccatgaaacactatgaccaaaaagcaaattggggaggaaagagtttattcagcttacacttccagaccatagtccatcatggaagaagtcagggtaggaactcacacagggcaggatcctggaggcaggagctgacgcagaggccatggacaaatggcgcttattggattgcttccaatggcttgctcattctgcttatggaacccaggaccagcagcccagagctggtacccccactgtgggctgggctcttccttatcagtcactgattgagatgcactaactatagggcctacagatggatcttacggaggcattttattgattgagtttccttctcagatgacttttgtttgtggcaagttggcataagaatctccagtatacttattacaaggaaaacctgactcagtctcacatacctaccaccccagcacctggcccggttgtagcctagtgctctagtggaagcaggacagtctgctgtccacagtgagctccaagatagcctgagctatgttgtggtaccctttcagaaaagcaaaagcaaaaccaaaaaatttaaagacgcttatactaagtttctaaaagtggaactaaaatgtgtatatgctgttttgagaagttttgcttaaaacctttcattctgtgagtaaaaagtggtctgcttactgagggaacaggtgttcccagtaacagtgtacttaggtaacttcattatgcagttctgaacacttaacagaatcccagactgggatatttttacccctccctacctcagggtttctctgtgtactgtagaactggctattgtagaactcgctctgtagaccaggctggccttgaactcacagagatatgcctgcctctgcctcccggaagtgctgagattaaagaaggtgtgcgcgcgccactgtcgtccagcctgcagatgtactttttggttacactcctgcattagtattgtgatttttccaccgaggtcctgagaaccacagagtgctggcagagcacacttgtctaagtgaaagtgatgtaacgcttcgtctgcttttaacattttaaactttctttttattttatgtgtatgagtatcttctctacatttatgtctgtgtaccacttgtatgcccgatgccaacgacggccagatccccttggactggagtcatagacagttgtgagctgccatgtgggtactgggaattatgcctaggttctctagaagagcagctaatattcttaatctctgagctctctctccagttctgtcttccttcttgagtctgtagtgaatgtgtttgattattagagaggggtgtagccttggctaggggcttttgttagccaagatacccattgcctggcagggtgggctacgaggcctatctcagaggcccaaaatttaagaaacatttctttttatgtgtgactgttcaggggcagtgcacagatgagacaggatcttatatattctagactaaccggaactcattatgtggcccaggctggccacacatttaggatccctttgcctcagcctcctgagtgctgggatcacaggctgatttttttcccattttatgaaagtatacttcgtgagttcttttttttttttttttttttttttttttttttaagatttatttattatatgtaagtacactgtagctgtcttcagacactccagaagagggcgtcagatctcgttacggatggttgtgagccaccatgtggttgctgggatttgaactccggaccttcggaagagcagtcgggtgctcttacccactgagccatctcaccagcccccacttcgtgagttcttagtactcctgtggtgcacgcacccttacgtttggcttggtatcattcagctcgagtgaagaggacggacctggacaaagccagggcatttgttgggacgtgccctgacatgtgtcccgagaaggagcggtacttgagggagacccggagccagctgagcgtgtttgaagttgtcccagggactgaccaggtagaactctgtgtgtcctaatgatctctgctttttttcctgttgttttgattttgacttttaaaaatgtatttatttactctacaagtgcaaatgtgtgtgtgtgtgtagtgcatgtgtgccacaaagactagtgtacaagagcagcttctctccttccactgttctgaagactgaattcaggccttgtgtcgtgtgccctcacccacactgagcgatccagctgggctcctattgttttgtttctggctttggattttggagtcagggttcctctacatattcctggctggcctagagctcactgtgtgatccggctggactcaaactcagagatctgtcacctctgcttttgaccgctgggattgaaggtatgtgcaccgacaccaccactcagcaccatttttgcttttaagttgttttctcttcccaagatactaactgttaaatgaatgtgtcgaagggcatggcttcccctcacttgagttagagtgcgtgttctgagttgtttgccaagaatttgcaccagtctgcattcttgtgcccttcagatttgctctacccagggtccccagcccagcaacatgcctcaccatagacccaggactgatccacagagcagccagcagataagcaggggcctcatctctgcacctacccacgtttgttatcttctgtgtctgcgaattcctgggaagttgcacctgctccatcaggcctgacccacagggctctgccctaaccctttctggtctaaactccccacctctggtttatttatggtgtgttggtttaacttgacacttgaacacagatgagatctttcctgttgcctgagcccctttacctgtcacagctgtgctttgggcgggctgatgtgtcttcacttagatttctgttcctctggatgccttgttatatttgcccaactcaagtttcttagcttacattgtccttgaaatgtctcacgtttaacagaacgttttcatctaagagttacattctcaagcattgttctcatagggatgcatgtcttagggttttactgtcttgaagagactctatgaccaaggcaagtcttataagggacaacatttaattggggctggcttacaggttcagaggtgcagtctattatcatcaaggtgggaagcatggcagtgtccaggcaggcatggtgctggaggagctgagagttcttcatcttgagacttctatcttgattagagggcagtaaggagaagactccctctgtaggcagcaaggaggaggctctctcccatactgggtggaccctgagcataggaggcctcagagcccacctaagcagcgacacactcctctatcaagggcatgcctcctccaataatgccacaccctatggccaggccttcaaacctccacaatgtgtgtgtgatttcctcctgcgtcttaaggtccaaaaactgccataaagcagtttgtccctacttcttgcccccaggtggaccatgcagcagccgtgaaggagtacagccggtcctctgcagatcaggaggagcccctgccacatgagctgagaccctcagcagttctcagcaggaccatggactacctggtgacccagatcatggaccaaaaggaaggcagccttcgggattggtatgacttcgtgtggaaccgcacccggggtatacggaaggtaactgctccccactcagatgatggaaatgcgtgtagatttacaaagtgaacttcaaactttttgttttatgtggatatttttatctggaacaaaaatataattttatttgagccattataaaactgtatttcattgtttcgttgtgtttgtttcaagttgaaatgtagttcaactcataatcataattttttttctcaaagttgactctgcatgtatcttgtgtttgtgttttctgtgtgtgtgctcagtgcttgtgtgtgtatgtaattctcccctctaaccttgaacaggacataacacagcagcacctctgtgatcccctgacggtgtctctgatcgagaagtgtacccgatttcacattcactgtgcccactttatgtgtgaggagcctatgtcttcctttgatgccaagatcaacaatgagaacatgaccaagtgtctacagagtctgaaggagatgtaccaggacctgaggaacaagggtgttttttgtgccagtgaagcagagtttcagggctacaatgtcctgcttaatctcaacaaaggagacattttgaggtaggttttcagagtcagaagttgggctttgatgtatagaagtttcgtagtgcagttggcaaattgagtcaggtgtaaacattgggagcaagtactgagacccgtgtgctctgtataatccctccatgttcattcctgagtggaagcctcccagggatgcaggaggaaactaggcacgtaagctgagaagtcccttagagttgttggcagttcagctttcagactgctttgttagaaatactagaaggatgggttaaatgaaatcagagtagatcagttactggagtgaatggatttgaaatgcagacctgacatttcagtagatctataggtgagaaatacagggaaactaacatggaaagcgattcaggaagatgccaaacatcctttggccacctgtgtacatatgtgggtgcacataaatacacacagttatgttttctgttctgctgttttgctaacagctgccaatcagtcggctaaattattccttacttgtttatcatccttttaatttgtcattttatttatttatttattttgtttctttgagacagggcttctctgtgtagccttagctgtccttgaacttattctgtagctcagactgggtttaaaggcacatgccaccatgcccagctgtttattatctttttaagattttcatttagtattgtttttaattgtgtatagtatgtgtctgtgtgtgcacatgtggaaatgaatgcagggtcctgtcagggctggaagagggtgtctggtatcctggagctgaagttgcaggcagctgtgagccacctgacatgggtgctagcagtctaacttggctcctttgcaggagaagcaagtgcttttaacctttgagccatccttccagccccacagcttattatctctttaaagaaacacttttaaaaccacacatgtaaacctattagaagttcaaagccatccttgtgactacagagtgaacttgaatttcacctaggatacagaagattctgtctcaagtgaatggatggatggatggatggctgggtgggtgggtgggtggatgggtggatagatgatagatggacaaatggacggacagatgaacagacggatgaagactgtagagtacctgctgagtgtgaggatggcagctctggttatagagcttagactttagtggtttgtgtcagacttgctgtcacaggactgctgaaacccagttattatcagattgattaagaccagtgtcctgaccctctgccttcctaacttacagagaagtgcagcagttccaccctgacgttaggaactccccagaggtgaacttcgctgtccaggcttttgctgcattgaacagcaataattttgtgagatttttcaaactggttcagtcagcttcttacctgaatgcgtgcctgttacactgttactttaatcaggtgagtagagcccctgctaccaggtaagaacaggaacaacaatactgtagtgttgaagtgcttctctgtcctgcgctcttcccgtgggcagccagccagctgtcaactcatgcgacaggcacagcccagcgaggtgtttctgctttaatcttgtatgatgggataccatggctctccattaggaggggccatgcagtgtaaacatggttctgtgtctcacagaagcctttggagtgacaggtttagttcatgaaagcaaaccccaaaccacaaatcctatattgtacaaaagccttaactttgaagtcattagtattaataacatttttgagagaacagtagcatagaaagactttggaaaaaaacagttttggggggtgagctgtgtttccactctgccctgctgtgccttgggatgacagaggccttcagaagaccgctggctcctctgtggtgagaagtgtgagcagcagccgcagcagcagcagcactctgccttcccatgctgcctcgggtctgcaggtgtctgctagcaggaagaactgggagttattacagcctctgatcacaccaagtcctggaaatgctgaatattagcacagttatagtctaggcaaagaattcatttttaggagttgtattttttttttaactttttagtttttgagattataatacagttacgtcatttatctcctccctgtcctccctctaaactctcccatgttccagtccttactcctttccaaattcatggcttctttcttcataaattggtgtatatgtgtctatgtgtttatgtattagtgcatctgtctgtctgtccacacacacacacacacacacacacacacacacacacacacagacaccttaatataaggataccatgctcagtctggataatgtctgtagattttcggggctgaccacttggtgagctcttccctggggaagactgtttctcccacactcagcatcctttagctgcctgttgttctgtgtgtagggttggggcctcctgggctttcccctgtccgcattagcatgtctgttgctgtccttgttgaactcatgcttagacagtcatgccggtgagtcttcatgaaggtagcttctgactctgacacaatcttatggcaaaccgcctggccctccggcttctacagcctttcctcccgtctcccacacgatccctgagccttaggtgtgggagcggggttggagttgcaccctttggcattgggtccaacaactctgcattttggttggttgtggttttctagaattgtttccagcttgcaaagagacgtttccttgatgagggtgaggacgacacaggacagatatttaataaagtggcagttacaggaagatccataacttcaccagcctggggaggtggctaggtttcctgtatcaggaattgattgccctctgtccgagcaggccttaagtctagttggagagctattggttactaccaggctatgtgtgtcaccaacacacctggaaaggaggttgccactggggagctctgcatctacttctctgtgtcattacagtttatgtgtactctccttgcacacttgcagcgtgacagcggagaaagtcagggcagattctctaactctccagccacaggcctgcccttcacagccccaactctctaagctcctgctttccttgtggtcacttctgtttcctgtctctcaagtctttgcataatccagagaatcttaagtcaagccaaagtcacttgtctgtccattgcccaaatgttttcagtccaaatgacatctggtgttgtacattgtggtgagattttcccaaacttctgtcttctatactgttgccttctcaggcaatgatgtgcctgatgctgtctgccaccctgaagcagatgcttagtcatgaacttcctggtccagagcagtgctgtgtcatattagtggttgtcctcaagcagctaaggagggagagaatagtattactttttaaagtaatagtagtagtagtagtagtagtaatagtagtagtagtatattattggctactgtaggtagcttcaaataagtaaaattgggatttttttttagaattttatatatgcatatttaaagacttatttattttatgtatacaagtacactgtagttgtcttcagacacaccagaagagtgcatcagatcctattacagatggttgtgagccaccatgtggttgctgggatttgaactcaggacctctggaagaatagtcagtgctcttaactgctgagccatctttccagcacaaaccaggatttttttttttttttttttttaaagaagacctttccactggtggtgttctccctggtcctgagtcttaggccccttctccttgctctttcggcccagctctagctgccacagtgccttcctatttccttacttaccagagctcgccctgatctctctcagggctcgtattccctcagactgccttctttgttgtatataattttttaaaagatttatttatttattttatgtatatgagtacaccattgctctcttcagacacaccagaagagggtgtcacatcccattatagatggttgtgagccaccatgtggttgctgggatttgaactcaggaccttgggaagagcagacagagctcttaactactgagccatctctccagtctgtctataatttctattaagtgttctttacatatttaccatcattgctctagtctcttccctggcatgctagtagtgtggacacgggaactttgttggctttgtctgcattgtactctgagcattaagaatacagccaggcatgtatgcactctctctctctctttctctttttaagatttatttatttattatatataagtacattgtagcttcttcagacacaccagaagagggcaccagatctcattacagatggttgtgagccaccatgtgattgctgggatttgaactcaggacctttggaagagcagacagagctcttacccactgagccatctctttagccccttcatatgctctcttgagtgttgttggcaattaatgaccactgggaggaaacagcataagtgctcagaggccctgaaacctaaccagacttccgttaagattttcctgttttctttggttgtcttgttttcgttacactgctatgaatccattttgttttcatacttaatttaatgtcttacatttttttccccttgcattccatagattcccatagtttcattacctcagctacttctggttcaggggatgttggacacttggttttcatgccctttccttggtagatgcatgctagtttttcttacaagtaaaacttcgcataccatcttttcctttggggccgttttcacagtagtctttcctgagcatctgagtgtctgtaagagcgtgcacaggagctaagctgtagcaggggctcatggttgtgtggctggctggctgtggcttttctctgagcttgcattgacttgcttctttcagatccgcaaggatgccctccgggcactcaatgttgcttatactgtaagcacacagcgctctaccgtcttccccctggatggtgtcgtccgcatgctgctgttcagagatagtgaagaggcgacaaacttcctcaattaccatggcctcactgtagctgatgggtaagagctgaggctgtatctatagccttccgacttctctgccccctcccctcttttcctttttccttttctgataaagtctgcttgctgggctcttctgtgtgcagctttcctgctgtgaaactaggggcactcccaacagacaaggggccagaccaagtccattttttgtttaagatagggtctccctgtgtagtcctgcctggcctgaaccttgtgtgtagaccaggctggcctcactcagactcatagagatccacctgtctgtgcctcctaagtggtagaattaaagatgtacatacaagggatttgggaataaaaaaaccagaccaacttctttcttattcccaagtcattgtttttgatcagttagctgagaacctaaagataaagattaagacttttctattttcttcattggagattgactttgttcacccatgtttggcccctgcacacctgatagaggagctgggtagaccagtaggccatggcaaggccttctgttcctgtagtcagggtgagactggtgatactcacaaactgttgtcccaacaaatggcaccattacatttggcatcctctgtttcctcagcccacctgcagctcttccctctcgatctatcctcagggaagtgctgtggctttgaatgagtgggatgccatcattgaaaaaggagccctgggtcacgatttcctgagactggacgctttttcatctgatacctgtccagccttgctttgatcgggggatcgggtagttctgtgtgaggaggcttagccgtcttctttccctgctgactacttgctgtgctctttgtggtctgcgtagctgtgttgagctgaatcggtcggcattcttggaaccggagggattatgcaaggccaggaagtcagtgtttattggccggaagctgacggtgtcagttggggaagttgtgaatggagggccgttgccccctgttcctcgccatacacctgtgtgcagcttcaactcccagaataagtacgttggagagagcctggctacggagctgcccatcagcactcagagagctggtggagacccagcaggtgagtcaagtacgtttcccttcttggaagcctccctgtcactcgaagattctgtcttggccagatgcttaaatatctcttgctttgcctggatctggagttttgaagcccctgttagagcttgtgatagtgcgtttccacacagggcatctgtcatcctgtgccatgtccctgaatggttgtcaggagggcagtctgcccctcacgctacagatagctgtgtccttttctagagactgtagttgtgtgctctgctagcaagtgtcttcagcaccttgtgtctctttctaggtggtggcagaggagaggactgtgaggcagaggtggacgtgccaacattggcggtcctcccacagccgcctcctgcatcctcagccacgccggcgcttcatgtccagccactggccccagccgcagcacccagccttctccaggcctccacgcagcctgaggtgctgcttccaaagcctgcgcctgtgtactctgactcggtagggatcgtgcgtgttaaagcctcatgacgtctgtagcattctgtgtaagggtgctgtgttgcttggtctcgttagataggagcccgagtcgggagggggagggggagaggctggatctactcagtcagcctcaggtaccaacaggggcccatcttcatcatagtcagagctacacttgagtgcctccttccataccaagctgaaccctacatgtctgttctgctcatgtgcagcacccagcaaatggctgtccagggcctgtgggtcacgacactgctttgtacctgtcggcagagggaggctttggttttgagcagatcttgtttgttgcacaagtggggacttgattgtgtctcactggcctctcaggcagatgctggacactgtccctactggagggtcagagggtctagagggaaagttcataggtcacaggaattgaggatttaatgtgcacacaaaatgatggctaaaggtgctgttggggccacctacagggcagtcctcagcaggcttgcttgccctcacctctgtggaaggcatctttctgttgttcagagtcttcctgcagccctctacactaaggtccctgtgctttgctgggaacaccttcacaaatgtcactaagaagtcttcacgcaagatgtctctccttaggacctggtacaggtggtggacgagctcatccaggaggctctgcaagtggactgtgaggaagtcagctccgctggggcagcctacgtagccgcagctctggggtgagtggtgactagcgtgtcagcctttcttgcttggctgacaattgctttctgggcacagtcatgtccttcctaataaagctgttctctcttaccagcaagtccctgttccatgtgcttaagatccacggtgacaatttcagggactttgcacctctctgaggcctaaatgtttcttctggtctctagggaggtgcggtttctcctgtttctgacctttagttcttattagtatgtaatttccatttgtgattccttttttaaacggttcaagtcttaattatttgattgtttattttatgtgttgaagggtttagcttgcaggtatgtgtgtcctccatgtatacccagtacctgcagagggcagaggaaggcatcagctcccctggagctgaagttacagatggttgtgaggtgtcctgtgggtactgagaatcgaactcaggtcctcaggaatactcagtgctcctaactgctgagccgtctctccagtactgcccttttgttttagcttttgaactggacactgtagaccgtgctggcctccagctccctgagatcagcctgcttctgctccccctctgctggggctgaagctatacttcaccatgccagcctgtagccttgaactcctgactgccgcccctagcctcctgagcaccaggattgcaggcgtgcactgccagtctgtccgtccgtctgggagtggtggctctctgtctcccgttctttgtgacaggagtggcatctcattaaagcctgacttgtatgtccctcatggctggcggtgctgcttcttttctgtcctgtttgttcttctgttttcctggaactgtaagttaacttgttggcctctgcttgagctatttgtggtcgacttgtaggagcgtctttatattctggatgttaatctcttatcagacacagaagtgcatgtattttctctcattctctggatggtctttttcccctgtttcagcccccacctctcaagtacacctggcaggcagcgctgaggtgtgagcctttgggcctgttagacaagcactctacaaccgagccaccgccctggctctgaccccgcttctcttctcgcctcttgtaacgtctctaatgcatacaagagtcaaacctttttggagtctaatctttctaatgtttcttttgttacctgggcctttagggtcttacctagaaaattactgccaaatccaatgtcatgaaaatattcgtattttcttctacaagttttatagcttatgtttttttctttgctttgtctgtctgtttgtttgtgcatttgtttggacggtgtctcagtttggggccctggcttacctgaactcagtgtgtaaaccagactgtcccggggatgctcaaatgaccaacagggcctggagttgtagtgcaaactgtttctgtccttagtttaacgtactagggattctctcattcctgaatctaagcaatataccttgtgaaactagtttaccatttcatttacaaaaataagattatttatgataagagatatgataaactcacttatatattttttaacttagtttttaaacttgattactcttgaactcctttgtgaattatatcttttgagctatataattgcaaaagtcacagaatcatcatgtatatgtgtatgtgtgcatgtgtgtgtatatatgtgtgtgtgtgtgtatatatatatatatatatatgcgtatatattactatatatgtgtacagtattagtattaagacgattgcagctttgtgaggtagtaagtatagttgtatttctttactgtagatgcttttttagaagaactttattttgtttattattagttattactattgttcaggttacctgctagcacagcatggcagctttacggctgagccatcttgtccgcctgtgattggttttcatgtattgaggtctctgccttctagagacaagtctcccatggcaggagggaatggtggcttgctgttgtctgggtttgaatgccgcctgctttgttttgttaagcgtttccaatgctgctgtggaggatctgattactgctgcgaccacgggcattctgaggcacgttgccgctgaggaagtttccatggaaaggcagagactagaggaagagaagcaacgagctgaggaggaacggtgggtgtgtcttgctcctatagacgggcatggaggttagtttgccccagccctgacctctgacttctgatagcccttctgtcgtctgaccctgttggaccattcaccaccctaatgatttgactaagggaagggtgtgtgtgtgtgtgtgtgtgtgtgtgtgtgtgtgtgtgtatttgtatgtatgtatgtgtgtgtgtgtgtgtggtatgtggtgtatgtgtgtatctgtgcctgtgtgtgttgcagggtggatggcatattgatgtgtgtgcaggttcctctgggtgttaggtctctggagctgtagctacaggcaattatgagcagtgccatgtgggacctgaacctgcaaaaacactgcgttcttaaccactgaaccactgaactgaattctttaagtattatctttgtgcttttcttccgtttacccctaggttgaagcaagagagagaactgatgttaactcagctgagcgagggtctggccgcagagctgacagaactcacggtgacagagtgtgtgtgggaaacctgctctcaggagctacagtgagtgacatactgtgtcctgaatgtcaggaggaaggagggactgtggccaagctgttgtaatgatgtgtatgcatatcatggtctctctttctagccccggctgtcctgtagacaggctggtcttggcctcagacacagagagctccatctgcctagcttcccaagtactgcatcaaaagcttctagacagatgtagcatgctgttttctgatagggaggccctctgagtcagtgtccctatcaggaagcatgagatgtgtctgttggcagatttactagagaacctttgtatagtaggccatatgccattattcttcaactaagggagcctttctttcttttctttttttttcctttccctttccccatcttgctctggtccccgagagcagggatagggattgtttgtttgtttgtttgtttgtttctctctcattacggatggttgtgagccatcatgtggttgctgggatttgaactcttgacttccaggagagccctcagccctcttaaccactgagccatctcaccagccctaaggaagcctttctaaacttgtgtgtgaggcttccttggccttttcacttgagagctgttgaggaaggtctgccctgtgcttctgtcctgctgagagcattagctggacggagcacagtgcacggcacagcgcccaccgctcagaggcagtgtgtttgcagtccgtgttcttcctagtccgagacttgggagcctgtctctccagttgctataaggaagagatctcacaaaacgatgtcaaatgtccattctctgaggcaggatcatactttgtagcccagaatggcctagcacttactatgtagttcatgttggtcttgaacttgggttattctcctatgtgagccttccatgtactagattaatttagtatatcatttgttttgttttgttttgttttgttttgttttgttttctgagacaaggtctgactatgtagtcctggctggtcttgaactcactttgttacctgggtagtctcaaactcagagaaagccacttactgcctctgccttccaactgctgtaattggaggtgtgccactgtgtcaagctagtgagcttatttttatttttttaaaggagagggaagtttatgcctgtttcttttcaaatatttatgtgcatgagtacacagttgctgtcttcggacacaacaaaagagggcattggatcccattacagatggttgtgagccaccatatcgttgctgggacctgaactcagtaccttttggaagagcagtcagtgctcttaaccgctgagccatctctccagccctgtgaatttatttttagtcctaaataaaagcccagggcttgctaacgtgtgaggtaagtgcctgcggctctgggtgtctgagtctggctcggtctggagtgtctctggcactggcaaagatgggttattgggaaggggtctcctctgcttagggttacttctgctttaatggggtaggttgtttttttttttttttttttctgccttatttagtagaatccttttatttaaaagtttctttttttgggtgagagaaatacctcagtggttaagagtgcttgctaaacccagaggtcctgagtttaattcctagacctacgtcagttactcacagtcatgagtaaccccacctcccgggactctgctgtcctgatccagcctctgcaggctgccaaacacaggtggcatgccacaacactgtttctctttgtatctgggtacagcagtacttgcctgtcgtcccagtacttgtgaggctgagggaggagaacaggttttaggccacctcaggctacaaagcaaattctgtgtcagctggggttaactagtgagactctctttgaaaaagaggaaagtctgagatacaggtttacctgagggcaaccaccatctgaccagaggaagccattcctagtagccactagtatttatcatgtgtggaaggtacttctaattgtagataccacatattgctgataagactttgaagttgtctaagttgtcattaaaaataaaaattcagaatcacttgttgccgagcttaatgacctggagccagtctgcagaacccactcagtggagtaagagagcacttcctgcagcctccacgcacgtgtacccatggtgcactggggccctcacaccggacagagtaaagtttgtgtgtggcttcttgttatgttaggttcagctgctgtgctcaagtggtgctctcacctcaggctcctgggcgttagggttaggaagtttacgcaggccaccatagctttatgagttaaaactttatttctggattgttacagtggcctgtttggacttgatctggcacccccatgacatttttcgcttttcttcccaggtgatctgcttttaagtaaaaataaaagtcttgaactccctcttatagtggaaatgttatatttgttactgtatttccataggaagtcagactccagcttcttctagggtgggtgcagcagtcagaaccagggccttacacatgctaggcagatactgtcctaatttggttttcattgctgtgactaagactgtgactgaaagcagcttggacagggaagagtttattttttatttggcttacactgccacatcacagctcattatggaaggaagttgaaactgccttacggacttgcctattggcaattggatggaggcattttctcaattgaggtttctctttccgtataactctagctgtgccaagctgacattcccgacccagacgcacatttttaaagcaggcccgtaagtgtccatgccctttggtgtagctgcttctatggtaattgctctctattttaggagtgcagtagaaatagaccagaaggtccgtgtggcccgctgttgtgaagccgtctgtgcacacctggtggatttgtttcttgctgaggaaattttccagactgcaaaagagacactccaggaactccagtgtttctgcaagtatctacaacggttagtgctgtgttcctacagataacgtccacccacacaggagcttttatcgcgttcataatatgtgagctgtcaactccattagtcagacatgaaaggctcacagattgataggaatggagaactgaagtagagttagaatatcttgtatgtgaacagatatttatagagtacttgctttttattgtttgtttgtttattggctgtactggatacagggaaatgtctttgaatacattaaataattcgccatggcttcacgaatatgaatgaatctttcaaactggtattctcttacaaaaatctgatgttctctctaaaatcaaaaaatcaaaaccatgtatttttttagatttatttatttatttatttatttatttattttggttttttgagacagggtttctctgtatagccctggctgtcctagaactcactttgtaaaccaggctggcctcgaactcagaaatctgcctgcctctgcctcccgagtgctgggattaaaggcgtgtgccaccacgcccagctttagatttattttattatcttttttgtatatagtgctttgtcttcatgtacgtatgtatgtgaaccacacgcatgcctggagaccaaggatgtcagaagaggtgtcacatcctttggcactagagtcatagacagatgtgacctgccacagtgctaggaatcgaacctgggtcctctgcaagaacaacacgtactcttagccacagcactaactctccagctcctaatggcgatgctttttatgatggtgtttccccgtagtgactcattgtgaactacaaatgcatttactacccctgaccttcccagtaccatagctcagcaacagaacgcactcagcagtgtcgggtgactgccttccgggctgactgggcggtagctaggtgtagaggggtctctcatgatattgagagtattgtgtagcatatcacaagtctaggacaaactttcttgaatgtgggttctgtaactgactgtgagggttgcagagagatataataatgacaacagtaagaggctctgaacgtgcagtgaccaaggtcggttcacagtccaatgtgtaatgactgacacatcactgcagctggagacacagctgtggattctccgctgctgtgcccccatatgagtgaacattgtctgtgactcaagactggtctttcttgattttttttttaaagatttacttattattttatgtgtgccatgtgcatgcaatgcacagatagtgtagaaaaggtcagaggaaggctctcatctcctaaaacccaagtcacagactgtgggagctgccgtgtgggtgctgggaactaaaccctggtcctctggaagaacagccagtgctcttaactgctgagccatctctccagcccatgaaaaagctccagagacataatattttagtatcattatccctcagcagctatcaaattggtataattttgggttacattgtattagacaaaacaagcatatttgtgtccttagtatgcaaatttatattaatattcaatatatgataggattatatatatattccaaattgttgttttaagtaattctctttataatttattatcactaaatgtttgatttctatattttatatacctatataccaggggttttatacaaattttttgggtgaaaaaggaattgtaaattgaaaaagtttaagaaatcttaagctaggaaattaaattttaagtccatttttaaaaaatgaattcatatcactttggtgatgtcataaagttaaaaaaaaaagttcaggtattaagtttgagtttctctctccatagtagaaaatgatcagtttatgaagaaacatatacaaacagtatatatctaaactaaacagtgtagcccatttcaggttgggtaatggtgagcgtagtccaagcatggtgggggcacagagatgcctgtgtatcgctgtggcctctcagcagtaaggggcacccagtgtgtgctacttaggctcaccgctcatgttgtatgtgtgccaagggtgatccattttatactgaaatttaaagcaagtgataatggccttgatggtaacaacagtatcaaaaggaacacacccaggagaaaacttcctaggacagaccgccgtccttcagaagtagcagctgctggtacccttcaagaaactgtacccaataaaaggtgcaggcctgacctttgtagcatggtgtcaggttctcctgttactattataacagtgttgcagtatgctcttgggagtgtctgtgccttaagtgactgaccctctagtgactgtcacatggctctctgtggctgtggcagtgccttagcgacctctcttttattaacattttacatgtctgttcacacatgttgttgggacctacattcctggttgctggtctgagggatcactatactattaagtttgtgtccagattgcttttcagaggtaattcagtgtttgtacttacgtccagcagctcagagctcaccacttttgtttttcatcacacccacattttaattgagattaattttcattttaagcactcttgctgaagaaaaaaacttaagattgtcaaagccacacttttagactggagagatggcttagtggttaagaatatttgctgctcctgcagaagacctgtgttcggttcctagcacccgcttagtggctcacagaagttatgtacaaggtggacatacatgtacacaggcaaaacagtcacatacatgaaaataaaataaataaatctaaaaaaaatgataaacaaaaccaaatttccatatttatatactgaactatgtttttcgccagtggatgagccttaaacacatcatccaataaccgcatgctgttttgtcctctaggtggagggaggctgttgcagctcggaagaaattccggcgtcagatgcgggccttccctgcagcgccatgctgtgtggatgtgaatgaccggctgcaggcactagtgcccagcgcagagtgccccattactgaggagaacctggccaagggtcttttggacctgggccacgcaggcaaagtaggcgtctcctgtaccaggtcagtcccagtggcgtggcctcagggctccatgcccagctagttttagcttgagttagactgatgactttgcagctaaagatggatggagcctgaaagtgaggactgacacaggaatgcatcttgaaggctgtgtttcccacagttctgagcctgtgacttctctaccactaggaagggaggctctcgttctgcatgaccttgaaaggcttaggttctgtgggtagcctgccccagctctgcttccagacactgtcctactgtgctcctttcactgtgctccatccacctccatctcctctggcagagtcccttctttctgtgtcacccccatccaggccctcgttgctgttcctcctagtttccccattcaatgcagttcctgaggcccaaactgtccagtcatagcatctctggcttggtgtttctccgtaggcacagtgccagtgctgtcagtttgtttgtttgtttgtacagggggctttcacagctgtcctgcctcccagcgggcaggccttagggggcactatggaggtgtcgtaggcttaacctgatggggttatgtctcttcctctggtcatcacaggagattctcactgagcaattactcctaaggttttgtctggtcagttagatcaccaggtcatctttgtataactagagattatagtcaggcctatactctgaagtcagggattaggggccttactctgacccatgactgttgtgacacagtctggcttcctgaagtcatagttaactttggttttgtttgtttgtttgtttggttggttgttttattccgagacagggtttctccgtgtagccttggctgcctggctagccttcaactccgagatcacctgcctctgcctttcaagtgctgggaatcaaaggtgtgcgtcaccatgcctggtatgtaggcatgttctgtgagccacaccagccagcacagaggctcttctctcccatgagagcgtgctctaggatggcagggattttgtctgtttctcatagccagctcacagtgaatagtgcagcagatatttgatggggttgggtgacccgttattttatcagagtctattattctcccccaggaaacattgagcaattacttttcactcagaaatatcaataaatactatttattacttatttttaaatttttcatacagtatattttgattgtgttttttcctctcccctaacttctcctagattctttctctctcttaagaacaaaagataacaataacaaaacaaacccgtgaggtctgtttgtattggtcagctactgctgagcatgagacgtgaggtctgtagtccatttctggtactggggaagtaaatactactcgtttcttcccttttgtagtccttgtctttctttttttgttatttgtaggttgaggcggcttagaaacaagacagctcaccagataaaggtccagcacttccaccagcagctgctgaggtctgtccgtcattctcactgtttgagttgttcctgcttgggtactgcatattggctcatggtgatctgccccttccaggaatgctgcatgggcacctctggacctgccatccattgtgtctgagcacctccccatgaagcagaagcgaaggttttggaaactggtgctggtgttgcctgatgtggaagagcagactccagagagtcctggcaggtcagcagtttcctgtatggggagtgtggatactgatccggaggaggattgtgctattgagagtcgcaggcaggcaggcagaatgtttgtgggggtggacactaaaggtttgtgtctcagtgtactttgctcatatgtatttggatttttatcatttttccatgtactaggcattattccatgtaagtccaaaagctctaagattgaggattatttaaacctctgtatggtatggtgtcctgattagtatctacattatttaagattctgtatatttgtgcaccttgtgcttgcagtgcctaaggaggctagaagaaggcatcagattgtctggagctagagttagctgccatgtgtttgctgggagttaaacccaggatctttgtaagagcatccagtgctctttactgctgagccatcatctttctagccctgaggaatatttgtttgtttgttttgcatgtgccacagggtatgggggtcaaaggacagacttacagaaatctgctctcaaacttcctagtgctgtgactttagtacagctactcacactgtggtgaccttcaaccataaaactttcattgctacttcataactgtcattttgctgtggttaggaatcataaatatctgtgttttccaatggtcttaaggacccctgtgaaaggattgttcagtccccctaaaggggttgcagcccacaggttgagaacccccctgccttacaccatctgcattctaggggcagaactcagttggcaggtgtggccgcaagtgtcttttatctactgagctgtctcactggcccaggatcagaagtttgattctgtaaaatagttcggtggtggtggtggtggttgttttttgagacaaggtctcactcactatgtaccctgactggcctggaacttgctatgtagatcatgctggccccaaacacagagatccagctgcctctgcctcccaattgctggcattaaaggtgtgcgccaactcaccttactgaaatgggtatgtgtaactccagggatggtttctattgctcgggccctttcctcttcagctcacagttttcaatctcgttcgaatgagccaatttcacaactgtcctttgcacttacccaagtaaataacccagtagagggccaacctccattttaaaatgataacctgttttgtgagcttcacaattagatttggtgtctgggaccctgtatccatatggtatttctcttgttttcctgaggatttctgtaagtcattttaaaattagacattccctgaaatgttactttctttcatctacagaatactagaaaactggctaaaggtcaaattcacaggagatgacagcatggtgggtgacataggagataatgctggtgatatccagaccctctcagtctttaatacacttagtagtaaaggggatcaaacagtttctgtcaacgtgtgtataaaggtgagtgacagtcacttcatgtacatatctctaggtttcattttctctcctcagatgtctctgaaattataaattactatttattctcaaaggtggttttcaatgactctgagatgatcgaagtaaatgccattgtctgtttttctttacatcttgattaatataccacagccatctacttggtgtaaggttttagtacagattctgggagagcaatgtacttgccctctgtcgtggttacaaataataatatataatattatccagatataatccatttttttaagaggggaagcttactttcgctcatagtattgaaggtttcagtccatgactgatgcccttgttgcttttctgaggacgcacatagcagaagaaaagtgtacacttgacagccaggacacagctgaggaggttggcagcccacagtccttcaaagtcatgtccccagtgacctcatatctccacagatcccacctcttcagtatccctcccatctcccagtcatgccaagctggaggccaagcagtaaacacttggctcctcagggccagactacagcaagcactgagccttggctgccacattcctccttgagaatgtgatgcactctacaggattcctttctactttatcttttgcttgactcaagctgcagcctctacccaacagcagaccttaggcccctttttgttttattgcgagcactaatccctgttaatgtcattctcatagctctttgattttgtcaggtttcttagtccttatttcttttaaacacaatattcctactaattaaagttcccaacacggtgtatttcctttgctagggctctgcttagtaggcccttgggtttgaagtaaatttgtgcatatggtcttggaacaatggctagtacttgtgtgatgttggtgttggtgatagtaacaataccttttcttggtttagtcctttagatgattctgaggaaaggacatggaggggggaatttttctgattgctatcctcctgaaaatatatttaccttatattctctctctctctgctttttcttgttttggcttggtttggttctgtttggtttggtttggtttggtttggttgggcttctctgtgtagccctcactactcactgtcctggaacttgcaccgtagactaggctgcccttgaattcagagatccatctgagtgctgggactaatggcctgtgccgccgccatgcgtggcccagctttgtctttgaaggactgtccagggcacagtgaatagagctctgcaactgtccttgctgaggcagactgtctcctgtgttgtcctctggtacattcaccctgacatctttgattttgttgcaggtggctcatggcacccttagtgacagtgcccttgatgctgtggagacccagaaggacctgttgggaaccagtgggctcatgctgctgcttcccccgaaagtgaagagtgaggaggtggcagaggaggaactgtcctggctgtcggctttactgcagctcaagcagcttctgcaggccaagcccttccagcctgccctgccgctggtggtcctcgtgcccagctccagaggggactccgcggggagggcagtagaggacggtgtgtgaaggaagccccgttcctgatcccatacctttaagaagtgggtggggcatgagtgtgatggatggccagcagagcagtgtggggagctttggggttagtgccctatttgttctgtccacagcgcagggccacaactagcttgggatgtgtcgcatgtgcaaaatgagtattattacatgggtccttcctgtttctcttaaaggtctgatgttacaggatttggtttcagccaagctgatttccgattacattgttgttgagattcctgactctgttaatgatttacaaggcacagtgaaggtatggtttcaccttttaaaggtctgtcagggtacttgttggtttctctcctgagctacctatcttctcatctgtctggaatgtaatatatgtggttgtttggattttgagacactgtcatgtagggcaggctgatctcaagtttgctaggcagtcagggtaacctagaagtgatgcttcctcttcctcttctgtgagtataggcatgtaccgtcctgtccagcttatattagtgatctccattttaatcttatgttttacacacacacacacacacacacacactatttctaaagatacagcaggcaggaataaaaataaaatttaaaaaacacccatagtatggtttcagtaatatgttaaataagttttttggctttgctttgttttttttttctttctttttttttttgtttttttgttttttgttttttgttttttgttttttgttttgttttttcgagacagggtttctctgtgtagccctggctgtcctggaactcactcggtagaccaggctggcctcgaactcagaaatccacctgcctctgcctcctgagtgctgggattaaaggcgtgcaccaccacgcccagccttggttttgcttttatgaaattaaaatgaccatttatatattacatctgaatgtcagatttatctaattaattttttagaatgaatgcttttacaaaatataaagaagtgatattacctgagacttcctggaaaggttctgctaaaaatggtttaggaaaagaagtgtagggattgcatatggcctgaggatgtagctcaggggtacagtcccacttgacatataagaatgtcctaggttcaaaagatggcctagtcagctatcactggaaaaagaggcccattagacatgcaaactgtatatgccccagtacaggggaacagcagggccaaaaaaaatgggaatgagtgggtagggaagtgtggggggagggtatgggggatcctctgcgctggccaatcgatgctggcgtaatcctgcacatagagttcctaaagggcagggcagacctgagtgcctagcattagcagcagacacagaagctagactaaccctagccaggagtgctctcaagttgcctaggtcccacgccagtgcaaaccctgttcccaaagcccgtttcagggctatgtcccaagaacagtcactgcaggcacaggctagggctgcagcttctgaacgctccaggtcccactgcacaacggcagatgcccttcccacgannnnnnnnnnnnnnnnnnnnccattagacatgcaaactgtatatgccccagtacaggggaacagcagggccaaaaaaaatgggaatgagtgggtagggaagtgtggggggagggtatgggggacttttgggatagcattggaaatgtaattgagggaaatatataataaaaaaataatataataataaaagatataataaaattctcaataaaaggctttcttagttaaaaaaaaaaaaaaaaaaaaaaaaaaaaaaaaaaaagaatgtcctaggttttatctccagcactctatgaaaaccaaaccaaagctggacaggaagaggtaatggcagagcgtgaggaagctgcctggcgttcagtgacgaccctagttctaggaataagatggagtggctctgctcctgtgggtggtgaggaagccctcatgaggtccttggtccttccaggagggctctgcaggccccacttactaattagataagactcatggggccctctgtggtgcctctgggaggcacatccacaaggctctagaagcccagactcaggcacgcagaggccttgtgccctttcctgcagcggctgagattttgttgttggggcattttcctaaaacagccatgggcagagtgctaagcccctttcgaaaactactttttaaaacgagtgtgacttgtttgagcagatctctcccaattgtcttgaccctcaggtttctggagcagtccagtggctgatctcccgatgtcctcaagccctagacctttgctgccagacccttgttcagtatgttgaggatgggatcagccgcgagttcagccgtcggtttttccacgacaggagagagaggcgcctggctagcctgccctcccaggagcctagcaccattattgagttgttcaacagtgtgctgcagttcctggcctctgtggtatcctctgagcagctgtgtgacatctcctggcctgtcatggaatttgccgaagtgggaggcagccagctgcttcctcacctgcactggaactcaccagagcatctagcgtggctgaaacaagctgtgcttgggttccagcttccacagatggaccttccacccccagggggtatgtacccaccctgagggaggagtggagggctagcctcctcttcttgctacagagacactataccagcgggtggattccagggtgaagtctgcagtccacttcctctgtgtacctatctgcatcagcctttgggtttctgggttaggatgaaacaggattttatggagtgggagctgttgtccttttccccaggacagtcctgagactgccccacaggcgctgcttaccagaagagctaggccagctgaaaagcatgagacttctgtgcctgcctctgagctgctggccctgctgctatgacagcatttaagtgctagtgtaggtcactgttcatttaaagcctgactgtgcctgtgcctgggggatgaggcctctgggctgtttgatacagactccacagatagccaaggctgactcaaacctggtgctgcaggggctgctctttcctatgttaatggcactgggaaggagggagcctgcttaatattcagctaacaaagcttgtggacttacccactgtagccctctaccaagaaaacagcattaataatatttcgtgttcactgattcttggtcacacctgtaactctctctgcagccccctggctccctgtgtgttccatggtcattcagtacacctcccagattcccagctcaagccagacacagcctgtcctccagtcccaggtggagaacctgctgtgcagaacataccagaagtggaagaacaagagcctctctccaggccaggagttggggccttctgttgccgagatcccgtgggatgacatcatcaccttatgcatcaatcataagctgagggactggacaccccccaggctccctgtcacattaggtagtagtcattcagggtttggggactgaaagtcatgagactttcctaggctaattttacccaaaaaggggggggggagtgagattttagttagttagctagttagttagtttgtttattttaaatagggtcttattgtgtagctctggcaagccaaacaaacaaaaccatctccactcttgttttaaattagaccagaaaagtcttagaaacttttgaagcactaaggtttgactgggcatggtggtctatatctttaattccaacacgcaggaggatctcttgtgaatttgaggccagcctgatttacctagcaagttacaggatagccaggactatatagagagaccctgtttcaaaaacacaaacaaggccagatatgctgtgcatgcctttattccctgcactaaggatgcagaggcaaacagatctccaagtttgaggccagcatggtcagtctatagagcatgttccaggacagtcagggctacacagagaaaccctgtctccaaacaaacaaacaaaccaacaagaaaaggccctaggagagcacagacttccttccctggaacaggcctcctaggttagctcttagaggcacagctctgcgagctattcctgtcccttcacaatcttcaccaatgcatgtcccatccaagcacggaagttacattagcgaatatcaagtggtcatctgttgctccttatatatctgatttctaaaaatctgttcttgtactgttttctcagaggcgctgagtgaagatggtcaaatatgtgtgtattttttcaaaaaccttttaagaaaataccacgttcccttgtcatgggaacaggccagaatgcagacgcagcgggaactgcagctgagtcatggacggtgaggcctatgttgagtgtgttttctgtctctgttctggaccacagccccttccctgtcctagagcaactctggcaaccctgcagagtgcggggtgtccccaccgcgtagacacttgagagcagatgcaggcatctctctccatttatccgatgagctcaggccaaccctaattgcaggaggcagataaaaaagctggtatctcatctcataaacccagttcataaatacccaatgcagcacctgtgcacattccccagtagtcttccttccagaagaaacaggatcagcaagagaactctattaatataatttgctgttgcaatagaaaagccaggtggtcatttcaatacgtgttgaaataatttaaaatgtttatttatttcatatatatagttgttttgcctacatatatgtcagtgccccacttgtgggccaccgttgtattccctagacctggagttactgacagttgtgagccaacgtgcaggcaccggggagagggttctctggaaggccagcagccagtgccatcaacagctgactcagctctacagccccaaaatgaactttttaaagcttaagtcagggtcagatggatggatcaacatgttgggataaaggatggctcagcgggtgggagtacttactgttctggcctggcaacctgagtttgatccctgggatccactgagttggaaggaactgactccacagaactgctctctgacctctacatgtgcacttcccacggccctgagctactgtcttagtttcgtttctaagttttgctgtattggtaaaatactctgacaaaaagaaacccagtggaaagggtttgagtttctcactgggaaaatcagagcaggaacctgaagcagttagttgcagtccagagcgaataaagaatgtgcgcaggcttgctcacctcagtagagaatggcggccacatagggtggtttgagtcttcccacgactactgatgtcattaagacagtcctccacaggcatgtctgcagaccaagttcatctgacagtccctcaatgtgccttccttcccagagaattctgcatgctttcagactgaccactaaaactagccaccacagctacctatcataaatctattaaaacaaaaatgcaaaacacaccccagtaaaataaaagcaacaacaacaacaaagcatcatgctcttccataaagcattaggcttgaaggccagcaccagtctgtgctgcccgggttgtcactgatgttgcctgatggccactgatacggggcagataggcataaatatcaaaaatgagaatttccacacggtatagtgccagctcagaagaatcagcattgtagccctggttacggtccagggttcagcaagctaactatcagaagttcccacagccttgaaatatagaatcagtggataagaacactcgctcttttagaggacccaggtttgattcccagcacccatgtggtggctcacaaccactcatgactccagttccaaggatctggcaatcacttctgaactctttgggcacaaggcacacatgtaatacacatacacatatacaggccaaacactaacatgtaaaataaatctttaaaacaacaacaataaagatgtacttagtatatagagcttaagagatggctcaggagttaagaacatttgttgttcttccatttttagggatttgatgccctcttctggcttccatgtgctcgtgtattcttgtgctacacataagttcatcacaggcaaacattgtatgcataaaataaatcttaacatacacacatgagagacagagacagactgggataagaaacaaaggcctgatttaaagcagctctagtggaacgtttggaagcaatagctgtctttgtgtctgtctgtctgtctccctttttccctccctccccccaaccccctcttcctttctccctccctctcttttatgttatgtatccctggctggcctggaactcactatgtaggtcaggttgtctttgaactcacagaagtctgtctgtctctgcctctgcttccagaatgttgggattaaaggcacatgccagcaagcctgaccaacagtgtctcttgttttgtttgtttgttttttttttgttttgtttttggtttttcgagacagagtttctctgtatagacctggctgtcctggaactcactttgtagaccaggctggcctcgaactcagaaatccacctgcctctgcctctggagtgctgggattaaaggcgtgcgccatcacgcccggctatttttctgtttgttttgttttgttttgccaacagtgtctcttgatgtgtgtgtgtgagtcactatatagcacatagtatgagagctgccctctcttgttgccatagtctctgacttgagggaaatcgaggcaggcccagggcctgacatgggtataatccacccactagagcacttggatcttgaggcttttgttcatagagtgaagacgtgtccagctgtgtctatgtgctgtgcacaatgttgtcatcttctctcccatctttcttgactgtaagaactttcacccttgtgcttccagttcggggatgaggtccatccatcctcctacaagcacttttcctactccattgcttcatgtacaccagaaagggaagaaaaaggaagagagtggccgagaggggagcctcagtacagaggacctgctgcggggggcttctgcagaagagctcctggcacagagtctgtccagcagtctgctggaagagaaggaagagaacaagaggttggtctgtctgtccccttcctgggtactcatgcattctttctacttcctgcaagaggaaagtcaggacagccaaggctaggaaggggcggctgggctggcaagggttatagtgatgagactttatttaaaaagaaaatgaggaagaagagagaaaagaaaagaaaggaagtgagacatttataaagtgtaagtgtgggctggagtgcttgctcattttccagaggacctcactttggtacccacatccatagcaggtggctcctaaacacctctaactctagctccacggatctgacccctctggcctctgtgagcacttgtgcacctacacagatgttcacacacacacacacctacacataactaaaaataactttttaaaagtagaagcccttaagagacagattgtgctctagaaagaatattctaagttttttcatttgaaattggcttcattgcttattttaagtcttctagaggagggaatatgtgtagctaagtctacatagcttggtctgccatggctgaccactgcttcttggcccttgggaagcccaaggcttcagtgggtcatttcttactaggtgggtaggagctagtgcagaccttcctctgcttagctgactccctttcctttgtacctccctcttctggccattcacactgagaaatagaacggggaagacagaacttggtcaaggttgtcttcccaccatgctggtgtgtctctcctgatgctagagaggagcattgcattgtgtgcttgaggtcagctctccccctggggtgcagtgtcacctccagcctacacacagtgctccacccttagggctcacctgagaccttgcttcttcctccattaggacatggaggtcagcacacaaaccgcagccatactgacacatgctcctgacgcagctcctttgtctccagttgccactctggccctctgcatcctgcatgcttgagtctgctcacgagttcttgtccctgtcagtgaccaacaacttcttaaccttgttctgagtccctgaaaggatttaataaatccaagagcaccacagagcgttctctgacgtcatgtgggcatccacatctgttcacggatactcaggacgaggagttaacagcacgggagcgagtgccgcttaagctctgtcttcctcactttccgatctcatactgtctcaggtttgaagatcaacttcagcagtggttatcgcaagactcacaggcattcacagagtcaactcggcttcctctctacctccctcagacgctagtgtcctttcctgattctatcaaaactcagaccatggtgaaaacatctacaagtcctcaggtgagaacgagtacccttgccatttccagaattaaagacggggaatacgcctgcctcagtggaccacacctttaatcccagcactccatgagtgtgaggcagcctagtctacaggctacacaggaaccctgtcctgaaaaatgaaggaggggaaaaaaaagaaagaaaaaagaaaaaacaaactaaaaaccaattttaaataccttaaaagttctgtctctttagaatatccaaaagttcactctttctctggccttatcttctttctgccctttccctccccccttctcttctcccttccccctctgnnnnnnnnnnnnnnnnnnnnnnnnnnnnnnnnnnnnnnnnnnnnnnnnnnnnnnnnnnnnnnnnnnnnnnnnnnnnnnnnnnnnnnnnnnnnnnnnnnnnnnnnnnnnnnnnnnnnnnnctctaaaatttcaatgtctttttgaagttaaaatctctgaactatggctacttgtaaaataaataagttacctaggttcttgttctaagaaggggaataagggcacagtcacggtcaacttgcgagcacccagagtccagcagtgtaaagccaggtgtcacactactactgtctgacactcactctccctcttctgggctccttcaaaatgcctggtggctgtctgcagcacatgcagcttgtcctctaggctcaggctggctacatgccacagctgctgcgacccctggtggtcaggtcaccatggtactgccatacccaatgcttgagtccccattgcagctgagctgctcctgggacaataacatctctcgggctttcttcagggactctccacccctgccacatgataccaagcattatattgccatgacgccttcaatcctgagccttctactgcagggggagcatccgtggcctggcctggcctctcatggtgccaaagcctcagctgttcttcacaacccctatatgccttcaaaaccagtatagggagagccttccactaccaagttcagatgccaacatgaggtgcagcctcagctccctctgggccatgagcttctgtgtgctcatcctgaataaacacttgagaataatttacctcagtgctgctggtctcctaatctgggctgattctgcagctcccagctgaccagtatcacttgtctcagccttagagtacttgagggactcaagacttctctctcaaacatcacaagccaggccaccaccatctgcactactctttttttttttttttttttttttttggtttttcgagatagggtttctctgtatagaccaggctgggctggccttgaactcagaaatccgcctgcctctgcctcccgagtgctgggattaaaggcgtgtgccaccatgcctggtttgcactactactttcaccatttgctgcattcccacaattcattaaactctgaacactcgagtgcttttctagtctgaagttccagaggccatgcacaatcctccaaaatacatgctcaggtctgtcacagtaatgccccaaggcctggtaactaatttcttaattagagcttctattcctgtcataaaacaccatgactataagcaacgtaaagggtttatagtccatccaaagaagttaggacaggaactcaaacaaggcaggaacctggaggcagggactgaggcagaagccatggagggtcctgcttactggcttgtttccatggcttgctcagcttgctttcttatagaacccaggacaactggtctaggggtggccccacccacaataaggccctcccacattaatcagaatgtgccacaggtttacccacaggccagtcttatgggggcattttctttattgagattttcttttccataataatacctagcttgaaactaaccagcactgctaggcagtgggggcacacacctttaattccagcacttggaaggcacaggcagttgaatttggggctagtcttgtcaacaaaccaagttcaaggacagccagggctacacaaagaaactttgtctcagaaaatagaatgaaacaaaaacaaaccagcacacacaggaacagtagctcttgtctgtggggccacataactatctgaaccttgaccagactcagttctgggattaactttccctaaggaaattaataagggaagaaggtgagctcacagaagtaaatttcacattaggatagtgttttcaaagccagatcgtccaggccccagagcctctctatgtttttcttggcggataaggaagcagaaagagtttatctgaaggatcatgccgtggggcaggggcgaaaggtgtttccagaatgccttaggaagcctcacagaaggaaggcagagtacgatagcatactgtttccattgatgagtttgcttaatcctttaaaatactcttctctctgacttactgtgaggcatggtggtgtacactcgtaagcccagcacttggagatggatggaagcaggaagatcaggagttcaaggccagcctctactatgtagcaagtttgaggctatcccaaactatattccaccctttttcaaccccactctacctgctccccaaatttatattctgactaattctctctaaagacattgccagatagttaacaaagtttaatgtacaaaagtcttcacaatggaattgattatatgtcttatcaataaatgacccaaggcgggaacttggttaagctccgtagaatactggctatttgtgtgtagcagattaggcaggcaagatggaggagcgctaccaggcgagggttctgttgagcccaagaggctctgtgatgcgggcgtgagcatggatgtgatgtgacgccgccacacatgactactttttgctgcttttttactcaattagaattcaggaacaggaaagcagttgaggttctcagaggcatccggttcatccctgacggaaaagctgaagctcctggaaaggctgatccagagctcaagggcggaagaagcagcctccgagctgcacctctctgcactgctggagatggtggacatgtagctgtctgacgggagacggatctctaattcataatgctttgtctgtattcaattgtgttatagatgctgttggaaatgtgactattaattatgcaaataaactttttgaatcattccagagccgccttagttttatgaatgaaggctatgtgatgtctttagtaggtttggtttttttttgttttttggtttttggtttttggggtttttttttggtgatcttagacttttttctctcacacacaccggaaaatactcagagggagtttttgtgactttctggttttcagtacacacttattttgagactttcatgcgtgagtgtactgtaattagatcatttctacccctccccctccacactctgggattcatgacctagtcttctataattgttacatatacatacgtctactgagtctatttaatgttgcttgaatgtatatgtgcttagggatgaccatatgggattggagaacctatcagagatctacctggaaaaaaccgattctccctcccttggtaatccattgactgcttattctgtttataatagataattctcttagtaaagtcattgcccctgatatcttagctatcagaaatgcagggacaagtaagacacagggtcctcactgcaaggtcaaccctgcttatcaggagagccaacagacagacagacagacagacagacagacagacagacagacaaaaatacatatataagtcgtagtagtatacatagaatgtagtacatacatagaatgtagtagtgtccatgagagggcatgatgaactccttgaggcaccagttggttgtgaggccaaatggatggaacaggccagcaggctctcactacactcagagggccatggggatcagttgtggaaaaacattagaaagaagtgacctgatcctattttctcttaaaaaataacatgtggaagaggttggcgagatggcttgtcacattacacttgttcttggtgaagaacccgtggttcccagaagacctgacaccctcttatgacctctgtggcaccacacctgtctgtgcactacaggaatgcagaacacccatacacataaatatatcaaatggcattttgcaaggaatggaagatgtactaataaaattagcgatggtcatttctcttatattgtgcactaagcatttccagactatcatcctatagcccccagagtctattcaagaggagtatgcagtatctctggtccttccttgttcagttcactgtgtaaaaagccctggaagaaatctgctctggccatcctcaaaactaccagtaaggctccctccctaccccccgccccgtgaccctccaaatattacatcttttagactttacaatttttttgtcctatgtatattaatgataactttacattctgtatgtgtatgggcaagtgtgtgccagtgcacatgtgaaggtcaagctgtcctctgacttccatgcatatgaggcagcacatcacaggaactttcaggagtcagttctctccttccgccatatgcaactgggaatgaactcaggtcattgggcttggaggcaagcagccttaacccctgagccaccttgctggcacaaatctctgtgtgtgtgtgtgtattgtgcgttcttgcatccatgaagggcttagagaacaacttttagacttctccccttccgtcctcattgaggcagggtctctcatttatgtgctgtacagtatatctcaggctagctgacccttgcgcttccagccaattctttttttttttaaattcattttatatgtcttgagtgtttcacctgcatgcacacttgtgtaccatgtgcatacctagtacccatagaggcagaagagggtgtcagattccctgaaactggagttatatagagttgtaagccaaccacctgggtattgaggctcaaacccaggtcctccagaagagcagctagtgtttgtaaccaccaagccaggtctccagtccttccagccaattcttgtctctatctccattttcatattaggagtgccaggctcacaggatacacaccactgcttcctgtgtgtttgcaggatcacacacaggttattagttgtgtagcatgtacttttatctgagccatctccccaagcttttcccctcttcagtggctcactgtttatcaagaaagacttgatgttattttaagcatttctttattgcgtgtgttacttttctgttgctgtaataaggcaccatagtacatacatttattggggttgtttagagggtatttaggatgtttaggggtatagcaggcagtaggaaggcaggcatggtgctggagcagtagctaagggttttcatcttgatccacaagcagggaacagagctaactggaagtagcctaggcttttgaaaactcacccccctcaccccagtgacacacctcctccagcaaggccacacctcctaatccttcctaaacagttctaccaacaggggctccagtactcatgtgcagaagtcaagggaaactacaattttgtcctaccatgtaggttctgaattagcctacagcttttatggttgggggcaagcagttctgtctgctttgtcatcctgtaggctccttcatgttactccttaaccttgctttaattgtgacattcttttcctgcctccagcctcccagcccagagagggtagtggtggagtcacggagtaggactctggtgatggctttaaagtctgaggtctttctagctctctatctgtactgaaatgctgacaataacttctaaaaggtcctagaaactttcttgctttctgagggtaaagacttaggcgattaacacctgtagcctaacagtggaggattaagcaatgcggcctttgttctgtctcagcaggaactgctgggctctaattttcagcctgctagtcagaagtcaggaagaaggctgttagtcagaaggcaggaagaaaaggggacacttagaaaagtgattatagtacttattactaagttgtaaaaagtttcctatgaaagctatctaaggggaaaagcagaaagatcctagtctgggaaagggaaaaattcttctaagtgaggaaaggcaaaaaattctctcttgattctcttcatctctttgtcctcggtacttatacacctttcagaatacatgatcacatgtcacaaagttcatcacaaggtcacatacaaaatcaaatcataaattgaaatagaagttgacaacagtgaatgtgtacatgcatatccattaggagtaattatctggctaagcatccatcacctgtctcagctccacaggttcactggaggtttaaaaccataactaaattattagtgaagttttgtctagataagcccagtcaatattttatcttctgtcctagcacctataataaatcattagttccatttttttaattaggtattttcctcgtttacattttcaatgctatcccaaaggtcccccatacccacccccccaatcccctacccacccactcnnnnnnnnnnnnnnnnnnnngaaggtgcacagttatctggtgtttggacctcctcctggctgaagatgaaggcccaaaacaggatctttcccagaagctgtgttgctttggccaggaaggtggccagttgtctggagccgaagatggcgccacctcagaagctctgtggctctcgcctgtcccagaaactgctggcctctgtattccacaccctcacccgtgcagcctgccctcctcggagtcccggaaccaaggtggctcccgccggggcctgaggcagaaacctctcgggccgggcggacccctgtgttctcaccaggaaggtggccggttgtctattagttccatttttatggcctttggtgaattgttttataacctcttggaatgtgctctgagtaggagaaagtctggtaaccatctgagagcaattaactggtgacacttgagagactgagttctcactgcagttttgactatcagaaaaggacctgatagcagtcccgctatgaaagagcttaataatcacatataattttaggaattctttctttttttttttccgagacagggtttctctgtatagccccggatgtcctggtactcactttgtagaccaggctggcctcgaactcagaaattctcctgcctctgcctcccaagtgctgggattaagggtgtgtgccaccactcccggccaattttaggcattcttataagatcatcattaggacttaagtcatctatttgtttatatagcatcactacaagacagtggggtctgcagagtatctgctccaaaggggtgtgctactacttagtgattgttatatatgtttaataataacaggaaaagcatattaatagcaggaatctttcctaaaatgaatcccttatagccttgtttaataagggtgtacctgtcacagattatataataatccgaagcaggccatttcaggatgatcacctgctagttattagcttgtcccattatggctcctaacattttcctacaataaaagtactatctgccctacaatgtatatcacacatacatatatgcctatattttctctactacgtgtctttttcatcagttcaatgttggctgaattcgaagttcaggctgactttgtttcctcatagcagctgaatctgttactgagtcatgactttatttcactctggtgcaattttggctctccctgccttgttttattctatgttcttgccactacttcactcaaaactctcagtacatccaacacagccttgtttgtaaggtagagttctagttccgttttctcatgacaaccctttgggaaccatatctctctgtaacggcttttgcatccagaatgtctttatttctccttatatttgattcaatatttcagtgagagtaacattttagattggcaattattaccttttagtcttctttctttctttctttctttttttttttttttttggtnnnnnnnnnnnnnnnnnnnnnnnnnnnnnnnnnnnnnnnnnnnnnnnnnnnnnnnnnnnnnnnnnnnnnnnnnnnnnnnnnnnnnnnnnnnnnnnnnnnnnnnnnnnnnnnnnnnnnnnnnnnnnnnnnnnnnnnnnnnnnnnnnnnnnnnnnnnnnnnnnnnnnnnnnnnnnnnnnnnnnnnnnnnnnnnnnnnnnnnnnnnnnnnnnnnnnnnnnnnnnnnnnnnnnnnnnnnnnnnnnnnnnnnnnnnnnnnnnnnnnnnnnnnnnnnnnnnnnnnnnnnnnnnnnnnnnnnnnnnnnnnnnnnnnnnnnnnnnnnnnnnnnnnnnnnnnnnnnnnnnnnnnnnnnnnnnnnnnnnnnnnnnnnnnnnnnnnnnnnnnnnnnnnnnnnnnnnnnnnataaaatttgaaatgtaaataaagaaaatatctaataaaaatatttaaagttattttttttttattcctgtgtgtgtgtgatgtgtgatgtgtgtgtgatgtgtggggcatgcatgccactgagtgtatatggagatcagaggacaactttgtgtagtcaattcttctacccaggcttgtacaacaagtgcctttacccatacccactaagccgtcttgcaggccctttcttcaaatttttaagattgtttctgggggtggtgtgtggacttctagaaattggggcacaaagtgaggatgagtatgatcaaaacacatcatatacatttgtgaagttaaaatttaaaatactgtattacatcacttctgtccatggtattctcaaatgtctcaactctctgccctcgattaggttttttccctaacttatattactattaaacaaacttattctaaacataatagctttaaaatgaggagtcccctgggcagctttttcttggcacttgtcttgtagtttagtgaggtaatgccgagacacagacgtctgatggttctgttgggcttcatgtccatgggtgggcagagggaggggttcttgctgggtttccctctactgcttgctcatgcatgctgacaatggagctctgaatcagggagcaaagtctacccactgaggatttctctagtttttctactagtccccaatgcctggaggtcttttcttctttttgtgtgtgcatgtgttcatgtgagtatgtgcatatgtgtacgcgtgcatccttacatgtatgagggtcagatgtggaccaggaagtcttccttgtttgcttgtttgtttttggagaccgggtttctcactgaccctgagctcaccatctcctttaggctggctggctaacgacttgttctgcttctgctcctccagcactgggtctgtagagatgtgctactcggtttggtttacatgtggatgacagggatccaaactctagcccttgagcttgtgagccaggcacagaactgagctatctcatcaaagcactccctgccctccctctctctcctccctcccacctctgtctttccctctggtgatcatgctatgtaactcgggctggccagaatcacaattctcctgcctctgaagtgttgaaattatacccacgtgccaccatgcccaatgcactacagaccagttgccttagagaaatcttgactcctgtctcaggctagctgttggaatgtgagagggaggactggattcccctacgagtgcaaattttcaatttctctggttttgatgatatccagctatgcctcatctgccttttactcagctgctcaaggcttccacccagtcagaacactaaaactatgataatggggggctggagagatggcttagcggttaagagcactgactgctcttccagaggtcctgagtttaattcccagcaaccacatggtggctcacaaccatctgcaatgtgatctgatgccctcttctggtgtgtctgaagacagttacagtgtactcatacataaaataaataaataaatttaaaaaaaccctatgataatgttccttcaaggttttcactgctccctccagactctgttaattcaagggttcgttccctggcgagaactgtcatttcttgctggctttatctacacatagaggttttcattttctctgctttgccgaatcagtcattcctccatctacttctagtctttataattttctttaaaatattttctaaaatccagagcttcaaacatgcatatagtgtgttttgattgagtccacccctcattccctcccttctggatcctcccctctcccccgttccttttcacttctgtcctgggtttttaatgtctttgtctttggactgggacatgggcaggaaacagaaatcaacatctatgtccagcctggtgtttttaaatagaaatatctttcttttcctgtcatctctgactcctaaggcagctcctaggtcagtaactaatcatttccccacgtccaatcagcaagtaccatcaaccccattttatagtctccccagagtcagtaactaatcacttcccccacatctaatcagcgattgccatcaactccatcttgtactcccttcagggcttcacttgctttctttgaccctagtcccttagttttcctcctcgatggaccaggaaagtcgagcttctctgttcagtttctagttgatcttatcgaatctcatgatttcaaatgccacccgatgactctcagatttctttatctagccttgttctcttttctgaataccagtctacttaaaactacttaaactcggatgcctaatatttgtcaaaatgaattctccgtgaaatttccaagctcctctgacctttcctaacttctacatacagataaggcttttccccttggcctgtcttgaaacccttaggctccagggtctttgtcagccaaggctttcccaatcttcatatagctaagaacattgccttccttgtcaatggaagctcactctacacccagttgtccaggtcccaaaccctagagtcttctgtatttagtttatagaataagctcaatatggtacaagccaagcagtgacaaacatttcttacaactgtctctagaaatccatctatgtgaattggcaggaggatttcacacttttcttccttagatattagaaagcatattactttattcataggatgtctagtccaggaaaatatcaacctaacttcttttgcagctgatatctctgccatctgtctagctttgccattcaagtctggggttccgtacggaccagaattctttttttccaatttttcatgttctgacacaaaaaggacttccctggaaaacactctagcttttttctccagggaaagagagtggcttgtttagtgaatttgggagaacagcatccagtgtgctaggcttccctgggcatcgttttttgggtcttcttattggcatactgtgcttacatggttcttggtgggtcagctcccaaaggcttcagttgttcgcttggcttagaagctgagacatgtgtaagggaaaagcagtcattatgaagcagttagccagccctgttcaaactgacttttttttttttttttttggcttttttgtttttgtttttgtttttcgagacagggtttctctgtatagccctggctgtcctggaactcacttttgtagaccaggctggccttgaactcagaaatctgcctgcctctgcctctggagtgctgggattaaaggcgtgtgccaccacgcccagctcaaactgacttttctattgtgaattttaaaaacttaatgtgtacgggtgttttaaccagcatgtatgtacttacatctcacacatgcctggtgactgaggaggtcagaaaatggcattagattccttaaaactgaagttatagatggctgtgagtcaccatgtgggtgctataaaccaattccaggtcctctgaatgagcagcaagtgctcttacgcactggacttaagtattggcctccagtccccaaatcaatagtctgaggcaaggctcagttaaaatgccttgtcttatatctttacaagtttctaaactgggcaaagaagaggttagtgttcttgactagccatctaaaattccgattttccatctagggaaggtgtgtgagtgttctttgcctcttacttcttccttctctgatttgtggttcatggccccttccttggcagcgttttgagggctaggtgcagggaggctatcgggtttgggtagttgtaagtaagtcggcactctgtaggacacactgtaccgctgggagttcttggaattatatttttctgatctctggtcgtcattcctgcatgccagcaatgcttctcaaatactatctgttcaaatgttcttcattgcacgtctctactagattctgccggcataccacaggctttcctgcttccctctctactgtcaaacataatcaaggcttttccccctttaacttgtaggactccaagctccaggtatcctgagagtagtgctgtggctagggaagtggaactctacctgctaatgggagtcaggacacagccctctgcacactctgcagctgctccctgtgaggagcctgtgcccgctttctgagaacactactctgaccctcttcccaactacgtgtcatcatagtttcctcctcccttcactcgggtcaaggcccctgccccatgatggtccatgtggtgcctcggatcaacgctagtttcacctcaggtcactcatgcctcttccgtacttctgaagcactcgtggtttccgcggcctctttcctgcatgtcggaggggccatttttcaccaaccctgtaggtatcccggctcagaacacccagaccagaagtccaaggctgtcatcaataaggatctagaggggccggccccgccccccatcccgccccgcccctccaacgggcctgcccctcccacaggccgtcctcgcccacaggccggcctctttcataggccccgcctccaaagcgcttcccgccccgcagccacgccccctggtgccctcgcggcgtcgggcggccctgcgcccagccactgtggtcgcggtgcgtctctcgtgcccacctggtgatgctctgattggccgagctcgcatcggcccacccag

SEQ ID NO: 1451 - DNA, 6429 bp, Mus musculus
gttgcggtgcggtgggcccggtagaggctgcacgcagactgtgggcgagcacaagcgctggcgacagtggccgtatctggcggacttgctcctccctccgcggcctccgctgtcccttgtgtctttgccgagttgctgaaggccttcactagtcttcgctcgaaggcgtctgttaacctagcggccggcttccggagtgttaagcatcggggataaaaagctattatttctagaccagggcatcgcaagttcgagttaccgggagaaaaatgagatggtcatcctgaggatgaaggagagcttcccctggcaacagataatttaaagaggagagctacttgtgtatagtccatatttattgccttcagataattggcttgaagatgcacccggtgaaccccttcggaggcagcagcccaagtgcttttgcggtatcttccagcaccacgggaacatatcagactaaatcaccatttcgatttggccagccttccctttttggacagaacagcacacccagcaagagcctggcgttttcacaagtaccaagctttgcaacaccctctggaggaagccattcttcctccttgccagcatttggactcacccaaacctcaagtgtgggactcttctctagtctcgaatccacaccttctttcgcagctacttcgagttcctctgtgcccggcaatacggcattcagctttaagtcaacctctagcgttggggttttcccaagtggcgctacttttgggccagaaaccggagaagtagcaggttctggctttcggaagacggaattcaagtttaaacctctggaaaatgcagtcttcaaaccgataccggggcctgagtcagagccagaaaaaacccagagccagatttcttctggattttttacattttcccatcccgttggtagcgggtctggaggcctgacccctttttctttcccacaggtgacaaatagttcggtgactagctcaagttttatcttttcgaaaccagttactagtaatactcctgcctttgcctctcctttgtctaaccaaaatgtagaagaagagaagagggtttctacgtcagcgtttggaagctcaaacagtagcttcagtactttccccacagcgtcaccaggatctttgggggagcccttcccagctaacaaaccaagcctccgccaaggatgtgaggaagccatctcccaggtggagccacttcccaccctcatgaagggattaaagaggaaagaggaccaggatcgctccccgaggagacattgccacgaggcagcagaagaccctgatcccctgtccaggggcgaccatcccccagataaacggccagtccgcctcaacagaccccggggaggtactttgtttggccggacaatacaggaggtcttcaaaagcaataaagaggcaggccgcctgggcagcaaggaatccaaggagagtggctttgcggaacctggggaaagtgaccacgcggccgtcccaggagggagtcagtccaccatggtaccttcccgccttccagctgtgactaaagaggaagaagaaagtagagatgagaaagaagattctctcaggggaaagtctgtgcgccagagtaagcgaagggaagagtggatctacagcctcgggggcgtgtcttctttagagctcacagccatccagtgcaagaacatccccgactacctcaacgacagagccatcctggagaaacacttcagcaaaatcgctaaagtccagcgggtcttcaccagacgcagcaagaagctcgccgtgattcattttttcgaccacgcatcggcagccctggctaggaagaaggggaaaggtctgcataaggacgtggttatcttttggcacaagaagaaaataagtcccagcaagaaactctttcccctgaaggagaagcttggtgagagtgaagccagccagggcatcgaggactccccctttcagcactcgcctctcagcaagcccatcgtgaggcctgcagccggcagcctcctcagcaaaagctctccagtgaagaagccgagtcttctgaagatgcaccagtttgaggcggatccttttgactctggatctgagggctccgagggccttggttcttgcgtgtcatctcttagcaccctgatagggactgtggcagacacatctgaggagaagtaccgccttctggaccagagagaccgcatcatgcggcaagctcgagtgaagaggacggacctggacaaagccagggcatttgttgggacttgccctgacatgtgtcccgagaaggagcggtacttgagggagacccggagccagctgagcgtgtttgaagttgtcccagggactgaccaggtggaccatgcagcagccgtgaaggagtacagccggtcctctgcagatcaggaggagcccctgccacatgagctgagaccctcagcagttctcagcaggaccatggactacctggtgacccagatcatggaccaaaaggaaggcagccttcgggattggtatgacttcgtgtggaaccgcacccggggtatacggaaggacataacacagcagcacctctgtgatcccctgacggtgtctctgatcgagaagtgtacccgatttcacattcactgtgcccactttatgtgtgaggagcctatgtcttcctttgatgccaagatcaacaatgagaacatgaccaagtgtctacagagtctgaaggagatgtaccaggacctgaggaacaagggtgttttttgtgccagtgaagcagagtttcagggctacaatgtcctgcttaatctcaacaaaggagacattttgagagaagtgcagcagttccaccctgacgttaggaactccccagaggtgaacttcgctgtccaggcttttgctgcattgaacagcaataattttgtgagatttttcaaactggttcagtcagcttcttacctgaatgcgtgcctgttacactgttactttaatcagatccgcaaggatgccctccgggcactcaatgttgcttatactgtaagcacacagcgctctaccgtcttccccctggatggtgtcgtccgcatgctgctgttcagagatagtgaagaggcgacaaacttcctcaattaccatggcctcactgtagctgatggctgtgttgagctgaatcggtcggcattcttggaaccggagggattatgcaaggccaggaagtcagtgtttattggccggaagctgacggtgtcagttggggaagttgtgaatggagggccgttgccccctgttcctcgccatacacctgtgtgcagcttcaactcccagaataagtacgttggagagagcctggctacggagctgcccatcagcactcagagagctggtggagacccagcaggtggtggcagaggagaggactgtgaggcagaggtggacttgccaacattggcggtcctcccacagccgcctcctgcatcctcagccacgccggcgcttcatgtccagccactggccccagccgcagcacccagccttctccaggcctccacgcagcctgaggtgctgcttccaaagcctgcgcctgtgtactctgactcggacctggtacaggtggtggacgagctcatccaggaggctctgcaagtggactgtgaggaagtcagctccgctggggcagcctacgtagccgcagctctgggcgtttccaatgctgctgtggaggatctgattactgctgcgaccacgggcattctgaggcacgttgccgctgaggaagtttccatggaaaggcagagactagaggaagagaagcaacgagctgaggaggaacggttgaagcaagagagagaactgatgttaactcagctgagcgagggtctggccgcagagctgacagaactcacggtgacagagtgtgtgtgggaaacctgctctcaggagctacagagtgcagtaaaaatagaccagaaggtccgtgtggcccgctgttgtgaagccgtctgtgcacacctggtggatttgtttcttgctgaggaaattttccagactgcaaaagagacactccaggaactccagtgtttctgcaagtatctacaacggtggagggaggctgttgcagctcggaagaaattccggcgtcagatgcgggccttccctgcagcgccatgctgtgtggatgtgaatgaccggctgcaggcactagtgcccagcgcagagtgccccattactgaggagaacctggccaagggtcttttggacctgggccacgcaggcaaagtaggcgtctcctgtaccaggttgaggcggcttagaaacaagacagctcaccagataaaggtccagcacttccaccagcagctgctgaggaatgctgcatgggcacctctggacctgccatccattgtgtctgagcacctccccatgaagcagaagcgaaggttttggaaactggtgctggtgttgcctgatgtggaagagcagactccagagagtcctggcagaatactagaaaactggctaaaggtcaaattcacaggagatgacagcatggtgggtgacataggagataatgctggtgatatccagaccctctcagtctttaatacacttagtagtaaaggggatcaaacagtttctgtcaacgtgtgtataaaggtggctcatggcacccttagtgacagtgcccttgatgctgtggagacccagaaggacctgttgggaaccagtgggctcatgctgctgcttcccccgaaagtgaagagtgaggaggtggcagaggaggaactgtcctggctgtcggctttactgcagctcaagcagcttctgcaggccaagcccttccagcctgccctgccgctggtggtcctcgtgcccagctccagaggggactccgcggggagggcagtagaggacggtctgatgttacaggatttggtttcagccaagctgatttccgattacattgttgttgagattcctgactctgttaatgatttacaaggcacagtgaaggtttctggagcagtccagtggctgatctccggatgtcctcaagccctagacctttgctgccagacccttgttcagtatgttgaggatgggatcagccgcgagttcagccgtcggtttttccacgacaggagagagaggcgcctggctagcctgccctcccaggagcctagcaccattattgagttgttcaacagtgtgctgcagttcctggcctctgtggtatcctctgagcagctgtgtgacatctcctggcctgtcatggaatttgccgaagtgggaggcagccagctgcttcctcacctgcactggaactcaccagagcatctagcgtggctgaaacaagctgtgcttgggttccagcttccacagatggaccttccacccccaggggccccctggctccctgtgtgttccatggtcattcagtacacctcccagattcccagctcaagccagacacagcctgtcctccagtcccaggcggagaacctgctgtgcagaacataccagaagtggaagaacaagagcctctctccaggccaggagttggggccttctgttgccgagatcccgtgggatgacatcatcaccttatgcatcaatcataagctgagggactggacaccccccaggctccctgtcacattagaggcgctgagtgaagatggtcaaatatgtgtgtattttttcaaaaaccttttaagaaaataccacgttccctcgtcatgggaacaggccagaatgcagacgcagcgggaactgcagctgagtcatggacgttcggggatgaggtccatccatcctcctacaagcacttttcctactccattgcttcatgtacaccagaaagggaagaaaaaggaagagagtggccgagaggggagcctcagtacagaggacctcctgcggggggcttctgcagaagagctcctggcacagagtctgtccagcagtcttctggaagagaaggaagagaacaagaggtttgaagatcaacttcagcagtggttatcgcaagactcacaggcattcacagagtcaactcggcttcctctctacctccctcagacgctagtgtcctttcctgattctatcaaaactcagaccatggtgaaaacatctacaagtcctcagaattcaggaacaggaaagcagttgaggttctcagaggcatccggttcatccctgacggaaaagctgaagctcctggaaaggctgatccagagctcaagggcggaagaagcagcctccgagctgcacctctctgcactgctggagatggtggacatgtagctgtctgacgggagacggatctctaattcataatgctttgtctgtattcaattgtgttatagatgctgttggaaatgtgactattaattatgcaaataaactttttgaatcattccaaaaaaaaaaccat

SEQ ID NO: 1452 - DNA, 5916 bp, Mus musculus
atgcacccggtgaaccccttcggaggcagcagcccaagtgcttttgcggtatcttccagcaccacgggaacatatcagactaaatcaccatttcgatttggccagccttccctttttggacagaacagcacacccagcaagagcctggcgttttcacaagtaccaagctttgcaacaccctctggaggaagccattcttcctccttgccagcatttggactcacccaaacctcaagtgtgggactcttctctagtctcgaatccacaccttctttcgcagctacttcgagttcctctgtgcccggcaatacggcattcagctttaagtcaacctctagcgttggggttttcccaagtggcgctacttttgggccagaaaccggagaagtagcaggttctggctttcggaagacggaattcaagtttaaacctctggaaaatgcagtcttcaaaccgataccggggcctgagtcagagccagaaaaaacccagagccagatttcttctggattttttacattttcccatcccgttggtagcgggtctggaggcctgacccctttttctttcccacaggtgacaaatagttcggtgactagctcaagttttatcttttcgaaaccagttactagtaatactcctgcctttgcctctcctttgtctaaccaaaatgtagaagaagagaagagggtttctacgtcagcgtttggaagctcaaacagtagcttcagtactttccccacagcgtcaccaggatctttgggggagcccttcccagctaacaaaccaagcctccgccaaggatgtgaggaagccatctcccaggtggagccacttcccaccctcatgaagggattaaagaggaaagaggaccaggatcgctccccgaggagacattgccacgaggcagcagaagaccctgatcccctgtccaggggcgaccatcccccagataaacggccagtccgcctcaacagaccccggggaggtactttgtttggccggacaatacaggaggtcttcaaaagcaataaagaggcaggccgcctgggcagcaaggaatccaaggagagtggctttgcggaacctggggaaagtgaccacgcggccgtcccaggagggagtcagtccaccatggtaccttcccgccttccagctgtgactaaagaggaagaagaaagtagagatgagaaagaagattctctcaggggaaagtctgtgcgccagagtaagcgaagggaagagtggatctacagcctcgggggcgtgtcttctttagagctcacagccatccagtgcaagaacatccccgactacctcaacgacagagccatcctggagaaacacttcagcaaaatcgctaaagtccagcgggtcttcaccagacgcagcaagaagctcgccgtgattcattttttcgaccacgcatcggcagccctggctaggaagaaggggaaaggtctgcataaggacgtggttatcttttggcacaagaagaaaataagtcccagcaagaaactctttcccctgaaggagaagcttggtgagagtgaagccagccagggcatcgaggactccccctttcagcactcgcctctcagcaagcccatcgtgaggcctgcagccggcagcctcctcagcaaaagctctccagtgaagaagccgagtcttctgaagatgcaccagtttgaggcggatccttttgactctggatctgagggctccgagggccttggttcttgcgtgtcatctcttagcaccctgatagggactgtggcagacacatctgaggagaagtaccgccttctggaccagagagaccgcatcatgcggcaagctcgagtgaagaggacggacctggacaaagccagggcatttgttgggacttgccctgacatgtgtcccgagaaggagcggtacttgagggagacccggagccagctgagcgtgtttgaagttgtcccagggactgaccaggtggaccatgcagcagccgtgaaggagtacagccggtcctctgcagatcaggaggagcccctgccacatgagctgagaccctcagcagttctcagcaggaccatggactacctggtgacccagatcatggaccaaaaggaaggcagccttcgggattggtatgacttcgtgtggaaccgcacccggggtatacggaaggacataacacagcagcacctctgtgatcccctgacggtgtctctgatcgagaagtgtacccgatttcacattcactgtgcccactttatgtgtgaggagcctatgtcttcctttgatgccaagatcaacaatgagaacatgaccaagtgtctacagagtctgaaggagatgtaccaggacctgaggaacaagggtgttttttgtgccagtgaagcagagtttcagggctacaatgtcctgcttaatctcaacaaaggagacattttgagagaagtgcagcagttccaccctgacgttaggaactccccagaggtgaacttcgctgtccaggcttttgctgcattgaacagcaataattttgtgagatttttcaaactggttcagtcagcttcttacctgaatgcgtgcctgttacactgttactttaatcagatccgcaaggatgccctccgggcactcaatgttgcttatactgtaagcacacagcgctctaccgtcttccccctggatggtgtcgtccgcatgctgctgttcagagatagtgaagaggcgacaaacttcctcaattaccatggcctcactgtagctgatggctgtgttgagctgaatcggtcggcattcttggaaccggagggattatgcaaggccaggaagtcagtgtttattggccggaagctgacggtgtcagttggggaagttgtgaatggagggccgttgccccctgttcctcgccatacacctgtgtgcagcttcaactcccagaataagtacgttggagagagcctggctacggagctgcccatcagcactcagagagctggtggagacccagcaggtggtggcagaggagaggactgtgaggcagaggtggacttgccaacattggcggtcctcccacagccgcctcctgcatcctcagccacgccggcgcttcatgtccagccactggccccagccgcagcacccagccttctccaggcctccacgcagcctgaggtgctgcttccaaagcctgcgcctgtgtactctgactcggacctggtacaggtggtggacgagctcatccaggaggctctgcaagtggactgtgaggaagtcagctccgctggggcagcctacgtagccgcagctctgggcgtttccaatgctgctgtggaggatctgattactgctgcgaccacgggcattctgaggcacgttgccgctgaggaagtttccatggaaaggcagagactagaggaagagaagcaacgagctgaggaggaacggttgaagcaagagagagaactgatgttaactcagctgagcgagggtctggccgcagagctgacagaactcacggtgacagagtgtgtgtgggaaacctgctctcaggagctacagagtgcagtaaaaatagaccagaaggtccgtgtggcccgctgttgtgaagccgtctgtgcacacctggtggatttgtttcttgctgaggaaattttccagactgcaaaagagacactccaggaactccagtgtttctgcaagtatctacaacggtggagggaggctgttgcagctcggaagaaattccggcgtcagatgcgggccttccctgcagcgccatgctgtgtggatgtgaatgaccggctgcaggcactagtgcccagcgcagagtgccccattactgaggagaacctggccaagggtcttttggacctgggccacgcaggcaaagtaggcgtctcctgtaccaggttgaggcggcttagaaacaagacagctcaccagataaaggtccagcacttccaccagcagctgctgaggaatgctgcatgggcacctctggacctgccatccattgtgtctgagcacctccccatgaagcagaagcgaaggttttggaaactggtgctggtgttgcctgatgtggaagagcagactccagagagtcctggcagaatactagaaaactggctaaaggtcaaattcacaggagatgacagcatggtgggtgacataggagataatgctggtgatatccagaccctctcagtctttaatacacttagtagtaaaggggatcaaacagtttctgtcaacgtgtgtataaaggtggctcatggcacccttagtgacagtgcccttgatgctgtggagacccagaaggacctgttgggaaccagtgggctcatgctgctgcttcccccgaaagtgaagagtgaggaggtggcagaggaggaactgtcctggctgtcggctttactgcagctcaagcagcttctgcaggccaagcccttccagcctgccctgccgctggtggtcctcgtgcccagctccagaggggactccgcggggagggcagtagaggacggtctgatgttacaggatttggtttcagccaagctgatttccgattacattgttgttgagattcctgactctgttaatgatttacaaggcacagtgaaggtttctggagcagtccagtggctgatctccggatgtcctcaagccctagacctttgctgccagacccttgttcagtatgttgaggatgggatcagccgcgagttcagccgtcggtttttccacgacaggagagagaggcgcctggctagcctgccctcccaggagcctagcaccattattgagttgttcaacagtgtgctgcagttcctggcctctgtggtatcctctgagcagctgtgtgacatctcctggcctgtcatggaatttgccgaagtgggaggcagccagctgcttcctcacctgcactggaactcaccagagcatctagcgtggctgaaacaagctgtgcttgggttccagcttccacagatggaccttccacccccaggggccccctggctccctgtgtgttccatggtcattcagtacacctcccagattcccagctcaagccagacacagcctgtcctccagtcccaggcggagaacctgctgtgcagaacataccagaagtggaagaacaagagcctctctccaggccaggagttggggccttctgttgccgagatcccgtgggatgacatcatcaccttatgcatcaatcataagctgagggactggacaccccccaggctccctgtcacattagaggcgctgagtgaagatggtcaaatatgtgtgtattttttcaaaaaccttttaagaaaataccacgttccctcgtcatgggaacaggccagaatgcagacgcagcgggaactgcagctgagtcatggacgttcggggatgaggtccatccatcctcctacaagcacttttcctactccattgcttcatgtacaccagaaagggaagaaaaaggaagagagtggccgagaggggagcctcagtacagaggacctcctgcggggggcttctgcagaagagctcctggcacagagtctgtccagcagtcttctggaagagaaggaagagaacaagaggtttgaagatcaacttcagcagtggttatcgcaagactcacaggcattcacagagtcaactcggcttcctctctacctccctcagacgctagtgtcctttcctgattctatcaaaactcagaccatggtgaaaacatctacaagtcctcagaattcaggaacaggaaagcagttgaggttctcagaggcatccggttcatccctgacggaaaagctgaagctcctggaaaggctgatccagagctcaagggcggaagaagcagcctccgagctgcacctctctgcactgctggagatggtggacatgtag

SEQ ID NO: 1453 - DNA, 44030 bp, Homo sapiens
ggatgctcctgtagtcccagctactcaggaggctgaggtgggaggatcgcttgagcccaggaagttgaggctgcagtgagccaagatctgcactctccagcctgggcaacagaggccctctcaaaaaaaataaacaaaaataaaacatagttaatgttgtatacacgatgattgagcgttagtagaatgttgaccatttttaataactttatttatttatttatttagagatggagtctcgctctgttgcccaggctggagtgcagtggcatgatctctgctcaccgcaacttctgcctcctgggttcaagtgattctcctgcctgagcctccctccccagtagctgggactacaggagcccgccaccacgcccagctaacttagtagagatgggatttcgccatgctggccaggctgatctcgaactcctagcctcaggtgatccacccacctcggcctcccaaagtgctgggattacaggcatgaaccaccttgcctggccgtttttaataactttaaacaaaagagatattcgggtatttttctttagaaaagctcttcaccggcagtggcgcacagaggcagcctcctgtccccgcagccctgtgcactcctgctcagaggctttgtgcttgctgtttccactgctgttccacactcgcagagccgcacggcgctgtctccacctccctgaggccaggcgaggcttggctgccgccctcagcagggcccccaccagcgctccctgctctccctgcccatctgccgcactaaatcaccattctgtgtgtttgatgtgtttgttttctgtggcattggtctctcccctggcatgtcagctatgtggggacagggattgtgtttttgttcactgttgtactctcagcattaaaaacggtgccaggcacagagcaaatgcttgatcagtgttggttgaattaaagaacatcggaagaggactaacagcttaggtaccaaagtcccagcactcaagcagaatttttgttcggattttcatgtttttcctttgtctatttttacttttatttttatttatttatttttttgagatggagtctcactttgtcacccaggctggagtgcagtggcatgatctcggctcactgaaacctccacctcccgggttgaagtgattctcctgcctcagcctccctagtagctggtattacaggtgcgtgccaccacacccagctaatttttgtatttttagtagagatggggtttcaccatgttggccaggctggtctcaaactcctggcttcaagtgacccgcctgccttggcctcccaaagtgctgggattacaggcgtgagccaccacacccagccccattgtcttttttttaagacactggttctcactctgtcacctaggctggagtgcagtggtgtgatcaaggcttactgcagcctcaacctcttgggctcaagcagtcctcccactttagcctcccatgttgctgggaccacaggtgcatgccaccaagccccactaattaaaacaaatttttttttatagagaataggatgtagctatgttgcccaggctggtcttgaattcctgggctcaagtgatcctcccaccttggcctcccaaagtgctgggattacaggtatgagctactgcacctggtctctgtcttctttttttttttttaaggctcttgttagaatgccgtgaacagttgtctccaactattatatgtcattccacgggattggtttcctgctggcattccatggtctccggggtcctctgcagcaccttcctggccttttgtcatgtggatgctgcacagctgacttcacctggtcttgttgatggacagtttgtttcatgatttctcttatgaataaaaccttcacaagccatccttctctatgagagtgtttgcttggcacgcattcctgagcactgcccctgagcagaccgcctatgatctctaagcttgggttccgtgttgccaaagcgccttctggtggactcagcccaggaggagcccatgtgccccacgctggccatggctgtggtcatgggctgactgcatgtgtctgactgggccttcgtctgagactgcagtgatttcgctcctcctctcagatccgcaaggatgctctccgggcgctcaactttgcgtacacggtgagcacacagcgatctaccatctttcccctggatggtgtggtgcgcatgctgctgttcagagactgtgaagaggccaccgacttcctcacctgccacggcctcaccgtttccgacgggtaagagctgagaatggaactgtggggcccctgtctccttttttcttgttaattctgatgaagggctgtgaagggctggctgcttgcctgacttgaagaaggtgcattccctctgccatgcaggtgaacacacgagactcagaatggctgggggtgttcccaaggtcacatcctggctgtcagcacattgagggctcagaccaagttctttgtgactccaaaatcagtccttttcatgacttgctgacaaacctaaagataaaagttagggccttctttattctttcccttgactgcctttgccagccaatgacggacaacctctgacggctgggatggaggcacccgcaggccagccggagtcttctccggtacttaccagtcagagtggtgagactcacagacgctctctcagaaactggcagcttacactcaacacccggtgcctagttccccaccctgtctcctctaactcctcacctgcctcctgcctgtctcctccttccagttctgtctccttctagttctgtctcctccttccagttctgtcctcagaaaattagacggttttgggtgagccagcaaggaggcaggagtgagtcagcgtgcgtctgttaacacgctgggcttagtggttctagggacctacagaggctccagggtgggcggcagtgggacctggcgcctgtgctttctgttatttacacatggctgtggtgacacccaaggggcttgcagtactcggcagggcactgagggcgaagctgtcttctcccctggtgacacccctcgggggtcttttgtggtctgggtagctgtgtggagctgaaccggtctgcattcctggaaccagagggattatccaagaccaggaagtcggtgtttattactaggaagctgacggtgtcagtcggggaaattgtgaacggagggccattgccccccgtccctcgtcatacccctgtgtgcagcttcaactcccagaacaagtacatcggggagagcctggccgcggagctgcccgtcagcacccagagacccggctccgacacagtgggtgagtgaagctgcagtcgtagtgaggggactagctgcattttcccaccagaacgcctcccaggagcctgggcatctgcattttctcgccaggacgcctcccaggagcctgagcacctgtcttgtcttggggcccaggggtgtggctcttcctcatgctcagatggttctcactgggagtggactgagggctttgaagccctcctcctggctccctgacatcctggggcttgtttttcatgcaaagcgtatgttgtcccacgtagctggtctcctggagggcaggccagtcctcagggtcactgtgggtggcctggggctgtccctgcacagacctcggtccccgtggtgccaggcaccctgtgtctgcagctatgttttgtcctgtatgtttccttccaggcggagggagaggagaggagtgtggtgtagagccggatgcacccctgtccagtctcccacagtctctaccagcccctgcgccctcaccagtgcctctgcctcctgtcctggcactgaccccgtctgtggcgcccagcctcttccagctgtctgtgcagcctgaaccaccgcctccagagcccgtgcccatgtactctgacgaggtagggactctttttttctaggtctggactctgggaagcccattgtgcgcaaacgtccttagtcatcaccccatgaggtggggctgtggcgcctggtctctcaggagagtccagagaggggtcctgcctagagtcactcagcctcaggtagggcccacctattcaggctcattctggagtccgtcttcatctcaggagcttcctgtcacagcaccggcctgagcccgtgtgtctgaactcaacacccgtctattcctgacgggatcattggcagcattgtgcgccccctgatgggtgtgacctggggtggcgtgtccgcctggtgggtgtggcctgggtgggtgtgtccccttgggtgtggcctggagtgggcatgtccccctgatgggaccccaatatgcatggactgagtgtgggtgtgtcccctgaagggcatgtcctggggttgggtgtccccactgatgggtgtgacctgggatgggcgtgtcccctggcgggtgtgccccctgatgggcatggcttggggtggctgtgccccctgataggcgtggcctcggggtggtcgtgtcccctctggtgtgtgtggtctctggctgtgcaccctgatgggcatggcctgggggtgggtgagccccttgaccagcctggcctgggggtggatgtgccccttgatggttgtggcctcagggtgggcatggtcccgacaggtgccttgatattgagtagagcctgtcgactccatggttgtgagactggattgtgccactctggctgcttcggggcaggcactgggcaccagcccatctggggatcagggagtgcttagggggagcatagagtggtcacagaaacagaggctgcttgacgtagactggagatggctaggccagggcgctgtgtggccatccgcagggcgccttcctctccagatggcacctttccattcgctaggggacacctttcctgcaacagcctagccgaccccgtgtcaggggttgtgcttctgtcacgagacgcctgcagactgtccggtgacaacatgttacccagcatttctgccctgggtgggacgttccattacaccccatgctggtctctccacaggacctggcgcaggtggtggacgagctcatccaggaggccctgcagagggactgtgaggaagttggctctgcgggtgctgcctacgcagctgccgccctggggtgagtggcatctcgtgctcccctcctgctacgtgctgcggggagctgcacccagtcctccagaagtttcctctcataaagttgcctgcgtttttggagtcataatccaataagttattgccagatacagtgtcaggaagattttcccctacattcttctttttcaagatggttttgctatttggggtctcctgagataccatgcgaattttaggatgagtttttctgtttctgcagaaagtgctgttgggattttgatagggattgcgttgaatctgtagattgttctgggtggtactgtcatctttttttttttttttttttttttttttttttgagatggagtcttgctctgttgctcaggctggagtgcagtggctccatctcagcctcactgtaacctccacctcctgggttcaagcaattcttctgcctcagcttcccgagtagctgagattacaggtgggcaccagcctggctaatttttttattttttgtggagatgcttttcgccatgttgtccagggatggtctcgaactcctggcctcaagtgatccacctgcctcagcctcctaaagtactgggattacaggcatgagccactgcacctggccagtattgtcatcttaacaatattaaatcttctaatctgagaatgtgggatgtctttccatttatttaggtcattcttaatttctttcgacaatgctttgtagttttcaacgtataaagtttttgcctcctaggttaaattgtttttttgtttgtttgttttgttttgtttttgagacggagtctcgctctgtcgcccaggctggagtgcagtggcacaatcttggctcactgcaacccccacctcccggattcaagcgattcccctgcctcagcctcccgagtagctgggattacaggcacctgtcaccaagcctggctaattttttgtatttttagtagagacagggtttcaccattattagccaggatggtctcgatctcctgacctcgtgatccgcccgccttggcctcctaaactgctgggattacaggtgtgagccaccgcacctggccttgttgaggatttttatatccatattcatgagggatattggtctgtagttttccatttctttttttttttttttttttttttgagacggagtctccctgtcgcccaggctggagtgcagtggcgtgatctcggctcactgcaggctccgccccccggggttcacgccattctcctgcctcagcctcccgagtagctgggactacaggtgcccgctacctcgcccggctaattttttgtatttttagtagagacagggtttcactgtgttagccaggatggtctcaatctcctgacctcctgatccacccgcctcggcctcccaaagtgctgggattacaggcgtgagccaccgcgcccggcctcctttttatttctttattccttttttttttcttttttgagacagggtcttactttgtcacctagacccgagtgcagaagcacaatcacagctaaccacagccttgatcttctaggctcaagccatcctctcacctcagcctcccaagtagctaggaccacaggcgcatgctaccatacccggctaattttttaattttttgtagagatggggtctctctatgttgcccaggttagtcttgaactcctgggctcaagcagtgctcccacctcagcctcctgaaatgctgggatgacaggcatgagccactgtgcctgctcagtctgtagttttcctatagtgtctttggtctgtctttggtattagagcaatgctagcctcataaaatgagttagtaaatattccctcctcttcagttttttgaaaggatttgaaaaagattggtggttagtttttcgttagtgtttaatagaatttaccagtgaaaccttctggtctcatacctttctttgtttggaagtctccttactagttataggtctactcacatttttctgtttcttcatgagtcagttttggtagatggtgtgtttctaacagtgggcttaatttttctgctggcagccaaacaagtacaggttgcatatcccttcttcaaaacgcttggaaccacaagggttttagatgacagatatttttggattttggaatatttgtattatatgtaccagttgagtatctcttacctaaaaatctgaaaatctgaattctaaaatgctccaatgagcatttcctttgaaaagcatgacatgttgtgctcaaaaagtttgagattttggagcattttggatttcagatttttggattagggacactcaacctgtgtgttttttttcccttgtcaatgacttggcttttttctgatatttttctttctttttttttttttttttgagacagagtctcgctgtgtcgcccaggctggagtacagtgacgcaatcttggctcactgcagtctcccgctcccaggtccgagcaattcttctgcctcagcctcctgagtagctggggctacaggcgtgtgctgccgcgcctggctaatttttgtatttttagtagagatggggtttcactgtgttggccagaatggtcttgatcttctgaccttgtgatccgcccacctcagcctcccaaagtgctgggattacaggcgtgagccaccgcacccggccttgactctgattttgaatgctatcccctttgctccgtttagtgtttctaatgctgctatggaggatttgttaacagctgcaaccacgggcattttgaggcacattgcagctgaagaagtgtctaaggaaagagagcgaagggagcaggagaggcagcgggctgaagaggaaaggtaagtgtgtcttgtccatgcagccgaataaggagctcagtgtggacacaggcaagaactgaccctagccacgatgctcctgctattgtccactgtgctaccattccacccctgctgacccactcatgccctcctatgcttcagcccagggggtggatggagctcctcaggccacacctacccgtgagcagtggcccttcccagccaggaaaggcaggggaagggaggtggtgtcaggggagctggagtaggggtggcctaccgactcaggcagcacacctcaatccctgtctgcgtggccagggagtaaaacaaacagcacttatttttattcttaaacattacccttgtgtattttttctcttccctgtaggttgaaacaagagagagagctggtgttaagtgagctgagccagggcctggccgtggagctgatggaacgcgtgatgatggagtttgtgagggaaacctgctcccaggagttgaagtaagtgaaacgctggtgtcttgctgtgccaggagagtgagctttggctctgccctaggctgtgtcttgcaccactgaggatgggctattggaaatggatcttgcctgtctaagctactttgattttgtgaccaaatgtatttgatgcagtcctctgtgctcccttggctaatagaattttattataaaaaattctcttttatatgagggctgccaccacatgatcatagtcagccatccttattagccactggcatttatcatatatttgagacacttccaattgattgcacaagtcagatgttgctgatgagaagattttgtggttgtctgcatggtaatttacaaattctacgccaggcacctgtagtcccagcaactcaagagactgaggtgcaaagatcacttaagctcagaagttccaggtagtgtgctatgactgcacctgtggtggccactgtactccagcctgggcaacatagtgagaccctgtctctaaaataattaaaaattctgactattttattaagataaaggtttatttcttaactgttacgagggcccctatggacctataatttggcaccctgttccacttaattctttttaccctgtctttctaggtgtctgtagtttaagtattaaagcttcttttacaatgaagatagaattacattttaatactgaggatgcagactcttgcactttttttttttaaagacggagtcttgctctgtcgcccacactggagtgcagtggcgtgatctgggttcactgcaacctctgcctcctgggttcaagcgattctcctagctcagcctcccaagtagctggaattacaggcatgcaccgccatgcccagctaattttttttttttttttttttttgaaatggagttttactctgttacccaagctggagtgcagtggtgccatctcggctcactgcaagctccgcctcccgggttcacgccattctcagcctcctgagtagctgggactacaggagcctgccaatatgcctggctaatttttcatatttttagtagagacggggtttcaccgtgttagccaggatagtctcgatctcctgacctcgtgatccgcctgccctggcctcccaaagtgctgggattacaggcatgagccaccgtgcctggccgccagctaattttttgtatttttagtagagacggggttctaccatgatggccaagctggtttcgaactcctgacctgaagtgatttgcctgctttggcctcgcaaagagctaggattacaggtgtaagccactgtgcctggccgactcttgcacttttcttttttttttttttttgagacggagtctcgctctgtcgtccaggctggagtgcagtggcgcgatctctgctcactgcaagctctgcctcccggcttcacgtcattctcctgcttcagcctcccgagtagctgggactacaggcgcccgccaccacaccaggctaatttttttgtatttttagtagagacagggtttcaccatgttagccaggatggtctggatctcttgacctcatgatccacccgcttcggccttccaaagtgctgggattacaggcgtgagccaccgcgcctgactgactcttgcacttttcaagcaagccctcagtgtctgtgggccccaagtgcagtgtcttccatgctgattgccctgtttctaggaatgcagtagagacagaccagagggtccgtgtggcccgttgctgtgaggatgtctgtgcccacttagtggacttgtttctcgtggaggaaatcttccagactgcaaaggagaccctccaggagcttcagtgcttctgcaagtatctacagcggtgagtcctgtgttcctacaggcaaaatccacacacacggggaagagtcttttaacaaattcaaaatatatgagctattagtttctgtattcagtggtaaaaggatgagggaaaatgttatagcaatgaatacctaaaatagactaattggattatactgcatttcagaaatacttgattacacacacacacacacacacatacaatataaggggaaaagtcaggagttagattgggacgtggtggctactctgtatgtcaactgatatttatagggtgcctgccatttgcccactgcactaggtgctgggagacagctatgaacaagccagattatggctgcatgcaccaataagggtgaattctcaaaatataagtagtggagaaaaagcaattaatagggaatatacaaatagtgtatattcaaactaaataggttgtttcagatttatatatagtggtataaccctaaagaaaagaaggaaaataatgatcataatctcagcatagtggttacttttgggaatgggaggtggtgcctctcatggccacaacttctcaactgggtgtaagtgcacaggtgcttgatgatttattaatcttataactgggcatatatgtgttacgtatgttgtatgattcatttcataataaaatttaaaatcagtaatagtgtccttggtagttggaacagtataaaagggagtatggggagaagtgagtcttccttctacaacagacccctgtccattgtgcgagcagcagctgcttgcgaaaccatccagagactttctgtcctttcttgtggctcttggcacagatgggctcatgatccctgctttgctctgagccttcctttgctccatctgatatgaggtggaggcttggctgtagcagcatgctgagctgtccccgttgccagtggtcttgaggtcagtgcgataatgtaccataaatgaccttcctggtcttctgttgatggactttcatgtggctctttttttttttttttttgagatggagtctcactctgtcgcccaggctggagtgcagtggcgcaatcacagctcactgcaacctccacctcccaggttcaagtgattcttctgcctcagcctcctgagtagctgggactacaggcgtgcgccaccatgctcggctaattttgttttttttatttttagtagagatggggtttcaccatattggccaggctgctctcgaactcctgacctcgtgatccgcccgcctcggcctcccaaagtgctgggattacaggcgtgagccaccgagcctggacgtagctctttttagctctggtaaagactgttgcagtgactgttgttgtacagacagacatctcacccgtttgcacacaggcacgtgtgtggagataaattcctatcagtggtggctgtgggtcaagggatatatgtatctttttttttttttttttttttttttgagacagagccttgctgtgtcacccaggctggagtgcagtggtgtgatctcggctcactgcaacctccacctcctgggttcaagggattctcctgcctcagcctcccaagtagctgggaccacagtcgcccaccaccatgcccggctaattttttgtattttagtagagattgggtttcactgtgttgcgcaggctggtcttgaactcttgagctcaggcagtccgcccgccttggcctcccaaagtgctgggattacaggcgtgagccactgcacccagctgggtatatgtatcttaaatctgtatccatattgccaagtcagcctccaaagctcattcagtattaactgttaacgttcggtagtttcattgctcaccacactcatttgatgtccttccttccccatgcctgagttctgactgcaatgtgtttctcagtttgaagaccctgaagacactctgtgatgatacattttcatgtccccaggtggagggaagctgtcacagcccgcaagaaactgaggcgccaaatgcgggctttccctgctgcgccctgctgcgtggacgtgagcgaccggctgagggcgctggcgcccagcgcagagtgccccattgctgaagagaacctggccaggggcctcctggacctgggccatgcagggagattgggcatctcctgcaccaggtcagcatcagctgtcgcctgcctcgtcagggctcccctgcccccacttggttttaccaggagcggaattaatgtgtgtgtttggagggtgaagataggtgaagcctggaggcgaagataggtgaagcctggaggcgaggacaggcacagggttgcattttgaaggttgtctcccacagttgtggacatgtgacttgttccactggcaaagcagagctctgagttcaccttgaaagactcagcgtcctggtgcctgagtctgactctgcatcacgtgttcttttcctgctcgtcccagtttaagtacctgccacttccatccttgttggaggagccggaggtccacgctggcctgtgtcttccgatcccatccccgccccatccctctgttcctcccgccgtctccttcacacactgccccctttctgtggcagcatcttccagactccacctccaccctccattatttccctcttgaggccccttggtgtggccctggtcctccctgccactcctcctggttaccccgagcagaaccggctcctcagggccatgccaggacccccctcagcctgcattcctggccatgctgggcttggcctttatttagaacccatgtaggtgccacctcttgcctggcctcagggctccctggcctcccagtgggtggggactggggaggcagcctggagggcctagcaggcacaccgctggggcctcatgtcatgtcttgtcctcctcctggtcatcactggatgttccctctgaaaactgtcttgtgggtttcatttagccccatcaggttctgcgccggcagtggggtggcagtcccagcctgttggaggcatgctgtgaggccagggctgggcctggctcctctgacccatggctgccttcacatagtgacctggccttctcctggagtcatggcttcttgtgtcccccctccgtagctgcccttgtcagcctcagtctccttgtctgagccctccaccctgccccctcagcccagacctctgccctctgcccttctgcgcaccccctggtgatagccctgtcacccctgtctgtcactgacagcccccatcatgcatctccaactgaggcctcttccctgagttccagacttggtttccagttggcagttcaacctctaaacctgatttttccccaccctgccccttcctgctcataggatgccgtcctgtcctcctgcgcttagggcacaaacctgggcttgcatctctctcagacccagcaccgagggcatggcagttctctccacctcactggaatgttgctgcagcacctgtctgccagcttccaccctgggccccaatcgtgtcctcagcaccacaacagagggatcctccaacagctcagccaggtggcgttgcctctcggcggcgtccctagcgctccccgagtctctgcattgtggacccaacccctccctcgctgccctcactgctctccccaaacacaccaggtccagctatggcctggcatagccatgccctctgctgtttccagaagttgtcacgctggctccccctgtttccttcaggtctttgctcacatatcacctgaccaccctgagtgagactgcaacacgcaccctgcctggctccagccccacctggcagcatttgcccacagtgccgacacctcacacatgccaggccagccacttagagatgctgttctctccccattagagcctatgttctcaaagggcaggattttgtctgtttattgctgaatctcccatagccagcacacagtggatacttaacatgatatttgtggaatgaaggaatcctctaacccgtttcattggcagaaaatgtgtttttcagtctcctgagtattccccaggggacactagccagtacttctcactaagctcctgcggggacactgtcattctgctttcctttgcaggttaaggcggctcagaaacaagacagctcaccagatgaaggttcagcacttctaccagcagctgctgaggtctgtcatgctgcacccttctgcgcaccccctggtgatccccgttccccaatctgtcacactggcagcccccttcatgcatctccaactgaggtctcttcgatgagctccagacttggtttctagtttgcagttcaatctctgaacctgattttcctccaacctgccccttcctgctcataggatgtgtgtgctgctcctgcaagggtctcacacactggctaatccacggtggtctgttcctcccagtgatgtggcatgggcgtctctggacctgccatccctcgtggctgagcacctccctgggaggcaggagcatgtgttttggaagctggtgctggtgttgccggatgtagaggagcagtccccagagagttgtggcaggtcaggaagggttttcccctgtggggtttccaagaggtggagtgggcagggcagggttgtgggccagggccgggtattcctcttatgtgtgatgggaactcggaagtgtaggtttatgttttaatgcttggatttacagtctgttttgctcatgattttaagttgaaactttagatttgattatttcaatttttattccataaacttggtgtattagtccgttctcacactgctttaaagaaatatctgagactgggtactttataaagaggtttaattggctcggctgtacaggaagcatggctggggaggcctcaggaaacccacaatcatggtggaaggctaaggggagggaggcatgtcttacatggccaaagcaggaggaagagagagagaagggggagatgccacatgcttaaccagatctcgtgagagctcactatcatgagaacagcaaagtgggaggtgccacacacttctaaacaaccagatctcgtgacagctcactgtaatgagaacagcaagggggaggtgctgcacacttaaccaggtctcgcgaggctcactttcatgagaacagcaagggggagtttccacacacttaaccagatctcctgagagctcactatcatgagaacagcgagggtgagttgccacacacttaaccagatcttgttgagagctcactatcatgagaacagtgagggggagttgtcacacaaccacatctcgtgagagctcactatcatgacaacagcgaaggggagttgtcacacacttaaccagatctcgtgagagctcactatcatgagaacagtgagggggagttgtcacacacttaaccagatctcgtgagagctcactatcatgagaacagccagggggattccacccccatgatacaatcacttcccaccaggcccctcctccaacattggggattacagttcaacatgagatttgggtagggacacaaatccaaaccatattacttggcaacagtcttagaccaaaagcatttaagagttgattgttatttcaagctgtgttaaggtacattgatagacctgcttcattttagactcttcagtaagatagtttatagtctgtttactatagttccatttttttccccttaaagaaacttttggcattttaaaaaagaaaaaattgacatgatcttattttctgtaaccacatagcatacagaagtcatatttttaaagcaactacagtctctttgtgtttttttgagacagggtcttgctttgttgtcacccaggctagagggcagtggtgtgataacagctcaccgcagccttgacctcctgggctcaactgatcttctcacctcagcctcctgagtagctggaactacaggcgtgtgccaccatgcctggttaatgttttttttttaaagatggggtttcactatgttgcccaagctggtcttgaactcctgggctcaagcaatctgcatgcttcagtctaccaaagttttgggattacaggcgtgagccaccacacccggcttacagtttatttttaaaatagctttattgaaatgttattcacataccataaacttcacccatttaaagtgtacatttcagtgatttttagatatattcacagggttttgcaaccatcactgttaataattccagaacaccttttcacttagaaagcctgtattcttttttttttttttagatggagtctcactctgtcgcccaggctggcgtgtggtacactttgttcactgcaacctccacctctcaggttcaagcaattttcctgcctcagcctcccaagtagctgggattacaggcgcacaccaccacgcccagcttagttttgtatatattttgtagagacagggttttgtgatgttgcccaggctggtctcaaactgggctcaagcgatccacctgccttggcctcccaaggtgctgggattacaggcgtgagccactacgcccagctggtgagtcatttcttaaaatagctgtcttctcatttgctaagttcgtatgtcacttaagaattcttaaggtctcaggtatgagaaatttgatctgtaaaaaacatgtatttcaaactctagggatgttttctattgctgaaaatcttaatgcttcagaattttaagtcacattagaatgagccagttccattctaatggaatggagtgccccctcctcctgcccaattaagaacaagtagaagccgggagcagtggctcatgcctgtaatcccagcaactggggaggctgtggagggaggattgcttgagcccaggagtttgaggccagcatgagcaacatagtgagaccctttgagtgacactctacaaaaaaaatggaaagattagctgggcatggtggcccgtgcctgtagtctcagctactgaggcaggtttgcttgctgcggtgagccaagtttgtgccattgcactctagcttgggcgacagagcgagaccctggctcaaaaaaaaaaaaaaaaaaaaaagaacgagtacagatcgttgctccattttaaaacaacagcctgttttgtgcagatcagcttcatagtaagatgtggtatttgtggacctaggtctgtgtgatatttttctttcttcttttcctgaaagtctttataattcaaatatagaattagattcttcaagtgttttttttgttttttgttttttttaaatctgtagaattctagcaaattggttaaaagtcaagttcatgggagatgaaggctcagtggatgacacatccagcgatgctggtgggattcagacgctttcgcttttcaactcacttagcagcaaaggggatcagatgatttctgttaacgtgtgtataaaggtgaactataattactttgtgtttacttctgtgttttcattactttcacttactcccagatatcactggaaccatgcaaatactgcttattccctaatgtggttttgaaagactgggaggctcagaagcaagtattatgtctgtccgtacatgtcgtttaaaaaatttttttaagccagtcaaattgagtagtgggcaccaagcccagcctgcttctttactttttctgttttaatactatatattggatttcctaaatgtaatatgtacacaaaacttttaaaaaatgaggaaatgtaaaagaagtataaagatgatgataagagccatccatgctcttgccattctgaggtaacagtaacttcttggtgcaaattcttcccttttcctgggattacaaagtcacatttcatctactggaaattagtttactgctgctgttaccttcattttcatttaagaaagtaacacttccgtgtacttaaaaagaagtcaaataatgccacccacgtgatttaaaatgagacatagtagctcctccttcctctcttaactcctttcttcagggctgcatttttctcctgtttccagatcacacacttacacagccatttctcagtttatccatttaaatgttctctgctgacttcccattaatataaatgtattagttaccttattcctaaataactaattactcctaacatagcagcttaaaataatgtctgttatcatggtatctgtgggtcaggaatccaggtgtagcttagcttgggtcttctggctcaaggtttctcatgggtggaaatcaaaatgttggctaggattgtggcctcatctgaaagcttgactgaagggtatctacttcccagctcactctagtgagcttgtgtcaggattcacttccttgcaggctgtggccaaagacttcctcagttcctgccacatgggcctctccccagctgacagcatggcagctggctttcatcagagtgagcaagaggtgagcctagatggaagtctgagtgtgtttataacctaaacttagaagtgacatcctgttgcttttgttggcttctgtctgtcagaagtgagtggctaggcccagctcacggggcaggagatcacacgtgggcatgaacactaggtggaatcaggggggtcctcttggccactgcataccatactaggtacagcgtggcctcttgtgccatggtccttgctcggccttccacgtcttcccgggatagctacactagcactttgtattacttcagtgagtggggtcatattttgatggctctgtgactgctattcacctcagaaccagtagtgttctataaccacaattatttttttcctgcaagaaatagagttgccttattgtctcacttaatgtagttctctttatctctttaattttactggggggccgtatatatctcggtagagttttccaaatgttctgtcacttcacttgatccatccatgttccctctgtcctggaactctcatctgtgggctggtctccatccaggcaacatgtgccttagtgccatcattgtgagcatatgtgtccctgctcctccacttggaagctctgtgaccttgggcaagttccctagcgtctctgccacctgtgtatgggtactgttacttattatccctattttactcagagacggtaaaataaactgcccaagcctctgcaggtgctgtctggtggagatgctcatctggctcttgaggataaaatgagtgcaaacacagactgcacaggacagtgcctggcacaggccaggtgcttgctcagtgttgccattagcagcagctgcagtattttttcttggttcagccccttgttggatgttatatgtcatgcgaggggaattttctgagtcttttccattatgaaaatgattttattaacaaaataccttaagctgggggaaagaaaaagaaaatgcatttatttcattctgacatttgcttcatagtttagctacgtttgtaaaattataggtagaaaattattttcctggccgcgcatagtggcttatgcctgtaatcccagcactttgggaggccgaagtgagcggattgttttgagtgcaggagttcgagaccagcctgggcaacgcggtgaaaccctgtctctataaaaaatacaaaaattagctgggcatggtggtgtgtgcctgtagttctagtagcttgggaagctgaggtgggaagattgcttgaacctgggagttcgaggctgcagtgagccgtgatcgcaccactgcactccggtgttgacagaggaagaccccgtctcaaaagaaagaaaattatttgccttccagttttgctccactgtcacctagcatccattgttgctgtaccattcctgttcctttctgtgtggcctggttttctctgtggaagccttttctctctgttcatggcgtcctaaaaattcactttgttacactggcactggactagcttcactcactgtgcagggcttagcaggtcctttcaggctagagactcctatttcacttctgggacattttcatgtctttatgacactctgtcttttttctgttctctcttgaacttctattagatagatgttaggcctcatcaattgatcctctgagtttcttatcctattttctatcctattttcaatctcatctcttcctactgtgttctgaaagagttccttgactttattttccaattgtcctactgaattttttattccatatatattacttatttcctctttctttttatcatgactttttcatagcatcttattttttggatgcatcatcttatctttccaaggaaattagggtttttggggtctaagttttctttggttcacgtattatctggttcctcttttttttttttttcctctctgttactccagtttatctcttttatgttggaggccctcctcagatgccttacccaaggctatctgtctatatctgagtgaggccctaaaaggctagccaagaagttctgtgtttggggtggggtggatggtagctaaatggcaagccaggctttttggagggactcccaaatgtctggatctggatggctgttccctagactgttcagtttttctggaaaggacttgtgccatctgctttctggggagctgctggtattctcagggtagggttgggagtggtttggcgctgagtcccttccactgtgcctgaccatggccctgcatctggatcctctcaggactcctgttcaggggcccagggggactggttttgcatagaggttgcctgcagtggtgggtgccgccaatagggtcaggctctgaacttcacctttggctcctggtgtctgcagcgcctgggtatacagggcttttgcaggctcagtcaacctgactccttacacacccacatctgcagcctttaggtatggcatcctctgcttccctaacccagggattggtcacacctatttgctgctttctagaaatgtatcagaatccctcatctgctgctggcttgccttccctctttctattattatgggcttatatttttgtttatttttgtagagatggggtcttgctatgttgcccaggctggtcttgaattcctggctcctggcctcaaacagttctcctgccttggcctccccaagtgctgggattacagtcatgagccactgtgcctagctttaacttttttatacctgtttaaggttaattaaagttatagtaatatggtcaaacacaattctagctggaggctaaattacctgttgacctggctgtttcttgcactaattctgttgcatttattctcatttttgtttctataaatttaaaatatgaacatgggtgggcgcggtggctcacacctgtaatcccagcactttgggaggccgaggcaggctgatcacttgaggtcaggagttcgagaccagcctggccaacatggtgaaaccctgtctccattaaaaatacaaaaattagctgggtgtggtggtgggcacctgtaatcccagctactagggagggtgaggcaggagaattgcttgaatccaggaggcagaaattgcagggagctgagatcgtgccactgcaatccagcctgggcgacagagtgagactccatctcaaaaaataaataaataaaaataaaataaaatatgaacatgccttatatctgaagggcagatatagaaattatttttctagggtgattgtcctctgaatatatgaagaaacaatgttatttgacgttttctttaaaaaggaagtctgaagctaggcatggtggctcctcgaacctgtaatctcagctactcaggaggctgaaccaggaggactgctcgagcccagcaattcaagaccagcctgggcaacataataagacccccttctcaaaaaaaaaaaaaggttgaggggagtctttgctaacaattggatttagggaaagaggggccaggaattaaaataactacaggaagtaagataactacagggtatgcccagctgtgcccttggaggcctgtctggagtacagtcagtatttagtgcacggagagctttggctgcacttgctctggggcagatcagtcactgctgatgcgtcccatggtgcatctctcctgatgatcttgatgctgttgcaggtggcccatggcgccctcagtgatggtgccattgatgctgtggagacacagaaggacctcctgggagccagtgggctcatgctgctgcttccccccaaaatgaagagtgaggacatggcagaggaggacgtgtactggctgtcggccttgctgcagctcaagcagctcctgcaggctaagcccttccagcctgcgcttcctctggtggttcttgtgcctagcccaggaggggacgccgttgagaaggaagtagaagatggtttgtgaaggaagtctcgtttatgaagcagcattgtttaataaatgggtggaggccctgggtctgaggatggtccagtagtgttggggtcaggaatcactgagacagcaacccctgtggtgactgtccactgcaggactgggtggggtcagcacagtgagatatgttagcaggtgtgctgacagcagaatgcaagtgaccttcatctatgtctgtcttaaaggtctgatgctacaggacttggtttcagctaagctgatttcagattacactgttaccgagatccctgataccattaatgatctacaaggttcaactaaggtaaggtttcatcatttttaatggtctgtcaagatattttgttttttccccttttgctgtatcttgaattgagtgtatattagcgtttgcattgtctttttcttaagagacagggttttattgtcacccagtatagtggcatgatgatagctccctgcaacctcaaactacagggctcatgcaatcttcccacttcagtctcccaagtatatgggactactgtggtgtgccactgcgcctggcagcagttgtatgttttatacagataactttctaaaaacataagcagaaatcaaaataaaagataaaatttgcccacagtcctgctatctgcaaattaaattgttcatgtaaaattttttagtgtttttgtttctatgaatttaaaatatgaacatgtcttatatctgaaggtcagatacagaagttatttttctagggtaattgtcctctgaatatatgaagaaataatgttatttgatgtttcctttaaaaaggaagtctgaagctgggcgtggtggctcctcgcacctgtagtctctgctactcggaggctgaagcaggaggactgcttgagctcaggagtttgagaccagcctggccaacatagcaagacccccttctcaaaaacaaaaaaaatagggcagggggagtctttgctaacaatttagagaaagaggtgccaggaattaaaataactataggaagtaagataaccatagggtgtgaaggcaccttggcacatagtgaagctgttagtccttccaaaaaggagaagactccatttctgtgcatggtgaaggggatgttcagggctggtttcctgagggcctgggcctttccatggggcaaccatgcaggtcacactcctcctcaggccaggtgggatctgggggctctctttagtgcccctactggacatgtctccagagccctagaaggctaaactcaactgcataggacacttctgttccccttcctaccacagttgagagcccagtactctggtattacctgctgtgggcaaccttgggggatcaagccctttcagaaagctgtttttgaaaaacagtgtgaattgttcaaccaagtctcttctttcttctcaggttttgcaagcagtgcagtggctggtttcccactgcccccattcccttgacctctgctgccagactctcattcagtacgtcgaagacgggattggccatgagtttagtggccgctttttccatgacagaagagagaggcgtctgggcggtcttgcttctcaggagcctggcgccatcattgagctgtttaacagtgtgctgcagttcctggcttctgtggtgtcctctgaacagctgtgtgacctgtcctggcctgtcactgagtttgctgaggcagggggcagccggctgcttcctcacctgcactggaatgccccagagcacctggcctggctgaagcaggctgtgctcgggttccagcttccgcagatggaccttccacccctggggggtacgtgcttgacctggggaggtctggtgggtggctgcagccaagtctcaggcttccttctcactgtagtaaccgtctggcaggtgttgggcaccagtgtgagggctgcacgtccacctccgtgtgtctccatgctgtgctcgcctgcaccttcctttggtcctttgggttcatgagccagaacaagctgggttttgtggagtgggggctgttagcctttcctgaccagcaaggcagtccatgggagttcactcagcttcaggagaaaagtgacaagtggtactgggaggaacaccaaccctgatcctgtcctgcctgcccacagggtccctgttttcagaacagacaaggggcaaagagcatggggaccatgtagccctgtccccaagccgcagccatggcactcagtgctgatttaacattctttctttgtcaaagaggccttcttctatggctctggctgtgcccctgttcctggctgaggtctttgggctgttttgacacagatccgacaggccatctggctggctcaagcccagtatggcatggggctgctccttcctatgcactcagaagggaatgagctgcttatctggcagaagttgtggcattagcacagacactcccctttgggcctcaggcgcccttctaaattgtggtgtgtggtctgtagtaggtctaactcatgctcattattgaaggaacccaaagggaagcaaaccactcagcacaagccctcggtgctctggttaggttggggttccccaaaataagctaagactgcttataccagactcatctgggtgcttgttaaaatacagatttcctaggcacaaccacaggcctgtacagtcagaacttctgggtagaacttggctagcaacactgttaagggggactgtctgcatccctcacctagaccctgggagcaagctgctcttccccctcaacaactgtggttctgctgtgtttagaaagcagacttctcaacttcacagttgccttctcctgagaaaatgttttcatgtacattttcacctgtattttggccaaacctgtaactaatgaggcactttctccccagccccctggctccccgtgtgctccatggttgtccagtacgcctcccagatccccagctcacgccagacacagcctgtcctccagtcccaggtggagaacctgctccacagaacctactgtaggtggaagagcaagagtccctccccagtccatggggcaggcccctcggtcatggagatcccatgggatgatcttatcgccttgtgtatcaaccacaagctgagagactggacgcccccccggcttcctgttacatcaggtaattagagcttgatgcaatgggatcagctcctcacgagactttcctggtccagtttctgcaaaggaagatgtttagttgatgttgctgcttttcttttgggtctctatccttcctttccttaggacttccctcttcaagtgagtgacttaaaaacattgagacaggctaggaagtttctggtagagcctgaactcacctccctgaaacaggccccctaggatggctcttagagaggattttgtggcttttgagtagtcattactggccctgccagtctcgatgtaagcttgtctggactttgagtgatgcatggaccctgggagcctatttaacccaagtgtggaagtcacataattgtgtgactttaatcaaaggtcttgcacttaaatcagtgaatttaagcacatgccacctgtcgctgtttaaatattatttgtacctgtttttgtttttttgtgtgtgttttttttttttttgagacagggttggccaggctggcctctttatctgtttttgtattgttttctcagaggcgctgagtgaagatggtcagatatgtgtgtatttttttaaaaacgatttgaaaaaatatgatgttcctttgtcgtgggaacaagccaggttgcagacgcagaaggagctacagctgagagagggacggtgaggttcatgttcagtatgtttctgttgcttgctaaactgtatttttcttgcaaagtaaatagaaattaacatcctacatgccaaatccagtccactgtgggcagactgtgacaaatcctcaaggaacagatcattcccatgcagtagaaactattctagaacaaagttaaagcatctcacttcatttatcaggcatacctgaccctgaaatcatacctaaccaggagagtacagctgacatttcatctcacttccaaatttggttccaaagcacagtacctaaaaaagttcacaagtatgctttctcccaggataaacaataacagtgaaaatctattaatgtaatttgttgccataatagaaaaataagtggtaattttagcaggcgttgaaatacgtttcttaaaatttatacctgttcctgataaaatttctttattttgggtactttctttagcttgggttaaaaaaaaaaaaagtcctaacttgataaggctacctaacataaaactaccaaaatagaaaaaaaacatgcttcttggtagaatgttaggaacagtggaatcagaaccagcctgttgtcccgactattattcactattgtcctggaaatcctgaccagtacagggatgtgggatagacaggcacaaatactgaaaggaaggagaaactgtcatttccagacagtacagttgtcagtccaagaaaagtcaagtccatagaaccattctcagttcaataaggtgatcagatagatagatccacaacatgttaaaaaaaaaaaaattctcattcacaacaataaacctgaacagaaagggcacaggatggtggaactttgctgttccttcttgttccccatagagatccttgaagtaccttctccaactccatgatactctaaaaactgttcatcttcataataggagtggagcctaatccttggtctcctcacctcctggtttcccggaatgtctttctcattaacatatgagttctcagggcctgtatgtgcaaaggaaacctgaaccattgaggttcagactaggttgttgacaggatacaatgctgtgaagatgtcagtactggtaagttctaaaattcatcaggataaacaaatatgcatcaattgctgagaaagttttaaataagactaacatggtttgcttggcctgataccaagacatacagtaaagctccagtacttaaaaccatgtggggatgccagagtagataaatggatcagaataaagagtcagaatatgtgacaaaagtgttaggccaaattattgaaattagtggggaaaagacaaacattggcatgtgtttagaaaaaaatgtcagatgccttctctctcaccatttgtaaacattacttccaaatgtatccaagagctatctataaaaaaccttgccaatactagggaagaacagaatctggaaccctagggtgggaagcaagacatgaagcagagaaactccaaaaacctagctgcctcttgagagcagaagcttccaagaggaacaggcagtctcaatgcctctgtgcataagggtccctacagtgcaggggctgccttccctctttgctccactccctgacttgatggaagcttggaagcaggcatggggccagcatgagctgttccaggagggcacatgtgtctgaggcacatgttcttacatgttaatgcacatgtgcaaatgtatctacatgctttacatgatgctgtagaaatattttctcttgaccataaacatttcaaatcatgtacttacagtttggcaataaagccttttcatccttctgcaaacaattttcccataccattgcttcacatgcaccgtaactggaagaggagcacagagtgtgctcaagaggggaggattcccagcacagaggatctgatgcgaggagcttctgctgaggagctcttggcgcagtgtttgtcgagcagtctgctgctggagaaagaagagaacaagaggtgaagcccacttccttctaattcatgtgtgtttagtctgctttatgctgtgaggggagactggttattgcttgattaatataagacagccaggatggagaagggcaggtggattattagcaacagttttagtgatgtaactatttaaaagctctttgaagacagaagcagtgccctagatagtatgtttctaactgtttatattgaagtgaatttcatttattatttattattgaaagtcagtgttaagtttttctgggaaattcatgtggttaagtctgctcagaagatggtgagtgctgaacactatggctggccacaggcaccctgcccttgggagcctgaggcattggtggatcatcccatgctgtgaatggacaggagctggggctgcccctcctctacattgcccacttccctccctcccatgcatacctttcctttgctttcatttgatggccatgtttaccattttactgagtagaatcaggaataagggaccttccacaggttgtcctctgccttccctgccctcccagccacatccagcatcctccctatatccccttcctgacgcctcttgttgctggaaacgaaccatgcagctcgtagtcagtcagcccttccctgggctgggatctcatctcccacctacccaaggacattcattcaatgagtatctctctcgtgctaccacccctccccatattaggtggtgcccatcagcagcacacagacatgaaacatgcctccctgtcttggtcccacttccctctttagccaccacttcatgtttctgccctcttaatggtaaaactcctcaaaaacgcttgtgatactcacttcttcagccttctttcccatggggatgaaggcccagggttgaacatgaccgtgaatcccagtccttggtagcatcccatacttgatcctcccctccttgctcctaggatgtccgtggtccccctcctgccctgctggttcctcctcatcccccagctgccccctggattcattctctcaacctctcctctgcatcgtctgtacctactcctcagaaatttcatccagtttcatggatttttaagtaacatcactattctgacagctccaaatttgtatctcaaacctctgaactccacacttgaacatgctactgcttccttgaaatcttcattagacacctattggatgtctggtagccactgcaaagttaacatatcccaaatccagttcccggctttcttccaaccaaccccttcctttggtggtcatctctgttgatggcggctccatccttccagctgcctagatcaggtgccttggaatcatcccctcacatcagcccattcacatatcctattggctctattgaaaatacattcagaattggaccacttgttatgacttccatggccaccacgtggctcaagccactatcatcttccttctggattattacagtaggctgcagtttagtcttggtagacctggtgggtgcctttcaagtgagttaagatggaggtcgtgtcacttgcttgcttacagcctctcagtggtttccctctttcacctgcaatcaaaggcaaactttgcaggggtggccagggccctgagtgatctgccccccatttcctctctgacctccgctccttccttgagcatggtaggcagttcacagttgggcctctgagtttgctgttccttttgcctaggactgtccagcccctccattctccccagcatccccatggctgatcttgtactcacttcagatctctactcaaatgtctgcttctgttaggccctgcttgcccatctccgaccttcttgtttccatggctctgctttgtctttctcatcttcaaaccatgtttctcttgttatgtgttccttgtctgtctctcctcactaaagtataaattgcttagggcagggcctctgttttgtttcagtgcaatattccttgtacctagaatgatgcctagcatctggaggaggcttaatgaatatgttttggaagggtgaatgaatgtgtccgattactaaaatcagtctctataatttaagtggtttgggatgagatttttttttcctttttattagatagagtctcgctctgttgcccaggctagagtgcagtggcacaatctcgactcactgcaacctccacctcccaggttcaagcagttctcctgccccagcctcccaagtagctgggactacaggtacccatcaccatgcctggctgatttttgtatttttagtagagacgcagtttcaccatgttggccaggctggtcttgaactcctgacctcaggtgatccacctgccttggcctcccaaagtgctgggattacaggcatgagccactgcacctggccaagattgtttttcttgaaaagaccggtatatggaagtagacagctctagagtatgttaggtggcagtgggatattattttgagttaattttaagctataagcagcaatccactcatttggaaaatgtcagaagaattaattatagatgcataaaaccaaagtaaattaaataagataagccaaacaagacaattacaagtaatgttaagtaacacatcgaagcagttgtttttggattaataccacctttttcattaaatataaattggaattggatttataaattaaagggaagtggtttctctaatttttttttttttttttttgagatggagttttgctcttgttgccctggctggagtgcaatggcgtgatctggctcactgcaacctccgcctcccgggttcaggcagttctcctgcctcagcctcccaagtagctgggattacaggcacgtgtcaccatgcctggctaatttttgtatttttagtagagacggggtttcaccatgttgatcaggctgatcttgaactcctgacctcaggtgatctgcccgcctcggcctcccaaagtgttgggattacaggcatgagccaccgagcccagcctagtttttttttttaaattaagctttatcataggaagttgttaaatttttaataagtacatttctgcttctcagttgatgtcataacttagttatattcttagtaaaaagcaaaggcttaaggctgggtgtggtgactcatgcctataatcccagcactttgggaggctgaggtgtgcacatcacttgagttcaggagttgtagactagcctgacaatacagcaaaatcccgtttctacaaaaaaatacaaaaattagctgggtggcatgcgcctctagtcccaggtatttgggaggctgaggtgagatcatttgagcttgggaggtcaaggttgcagtgagccaagattgtaacactgcactccggcctggccaacagagcgagaccttgtcaaaaaaaaataataataaaattggccaagcacagtggctcactcctgtaatcccagcactttgggaggccgaggtgggtggatcacctgaggtcaggagttcaagaccagcttgggcaatatggtgaaaccccatctctactaaaagtacaaaaaattagctgggcacagtggcacttgcctataatcccagctactcaggaggctgacgcaggagaatcacttgaacctgggaggcagaggttgcactgacccgagattatgccactgcactccagcctgggcaacagagtgagactctgtctcaaaaaaaaaaaaaaaaaaaattatataaaattttaaaaaagcaaaggcttaaaaagtttttaagtatatatagaagattaatgaacaatagttaacttcctaatgctcaaatatttttgaatttattacatattgtttcaggtttgaagatcagcttcagcaatggttgtctgaagactcaggagcatttacggatttaacttcccttcccctctatcttcctcagactctagtgtctctttctcacactattgaacctgtgatgaaaacatctgtaactactagcccacaggtgagaagaacgtatacatttggcatttacataagaattaaagattgagagaatggctggggaaaaaagtaatatcacgatttatcctatgatgttttgatgaccgacaaattattagctcaaattagaccttttcttaaactttatccatatcattgttaaagagacccaactgattttgagtttctgcctacgaaataaatgaagaatagaattgaaatattcttaagaactgaataagacctgtaactgtgtgctgatgtgtaattaagggcattaaggtgatgacagcagcttctgttggagcacatattgtctgagctttggcattacccagacctctcttctgggattaatttttcctgaggaaaactaatgaatgaggaaggtaagctcccagaagtcaagagcctcacccaagagtgttcaagtagtgagtggtcaggttgcttttcaaagccagatccaactggctccaaagcctaaggtctttttaccttaccattcttccttcagtggttaaagatgcaaaaacagagtttcaatcacagatatgtgccactgaacaggtaaaaactgtgctcctggactggctttaggaagtccttcaatagaggagaaaagcaaattaaaatgatgtactgtttccattcatcagtttggcaaatactttaaaaatattcataccctttgaattaccaattctaacctaaagaattctgacctaccagatattccccaaaaattaatgtataaaaatgtttactgtagcattattgtatgaaagtcgaaacagaataaatatccgaagatgggagtctgattaaacaattataacacattcatgtgatagaataattcacagcccttgacgatgatattttctaaaaatgactggctgggcgtggtggctcatgcctgtaatcccagcactttgggaggctgatgagggaggatcgcttaagtccaggagcttgagtccagcctgggcaacataaagagatctcatctctacagtacataattagccaggcatggtgctacatgcctgttgtcccagctactcaggaggctgagctggtaggatcacttgagcccaggagtttgaggctgcagtaagctccgatcataccactgcgttccagcctgggtgaaaaatgactgacactggaaattgttcatgatagaatacaaaggcaaacagtctatatacagataccagctgaatgtacgagctaaatgaggctggaaggatatacaaaggataatttttttccctctgtaaaaataaatgactactcagatgaggtttctaacatgatccagatctagtaccttcccagagataggtcgtggtttattgacatcccaaaactgttcagtttcttttttattcaaatagagtgacatgatgagggagcaactgcagctgtcagaggcgacaggaacgtgtctaggcgaacgactaaagcacctggaaaggctgatccggagttcaagggaagaggaagttgcctctgagctccatctctctgcgctgctagacatggtggacatttgagcagcctgacctgtggggagggggtctctcccgaagagtttctgtttttactcaaaataatgttattctcagatgcttgatgcactgttggaaatgtgattaatttaatcatgcagataaaccatttaaatgtcagtctcccagtttttcataatgaaaagttgtttcccctgtgtgacctcttcaatattctcctatattcatgacctcctcagattgtcacccaccagcatatgctctgaggcagtttagagcttacatttccatgtataaaaggcgattcattctctcagcaaacttgcagtccttgatgtgccagacatcagtgatgcagagataaagtaagacacagggcctctgcctgctaagcccacccagcttacatccaggagagtcaggtacttatgtacataattctcagagaatgtgcatgaggcgtgggcctgaattggtagcaaggaaaaaacagaggatggaacagggtctggttgggtagaggagaaacagaattcccggagaggagtgcaggggtgtagctggagacagtgtacttgagaggacatgatgaaagcgtggaggtaccagcttggttgtgtggccaggtgaggggaacaggccagcagggtgaggtcagagattcttgtcaccttcttctgagagctgtgagaacccgttgttgaagattaggcagagaagtgatctggtcacattttcttttaagaatggcatgtagggcaggaatcttgagaggtgggtgctgcagccatccaggtgaaattcaaagggaataagcctgagtttgttagcaattggtgtgaagagaggggataaaatttgagccatatacagaaagaggtattaatagacttggtgatgttgcgtatgaccaccaatcttaaactggcactcagcatctcctgactgtaatcctacatccccagactctatttcatgtcttctcattctcttcaaacctccaacattcttagatcatgtcctccttatttcactgagaaaacaacagcactaagaagagaacctcttcctccaccaaatcaatccctgcttctccaaacacacactactcaactcagggatctttagtgattagcttcatgtaaagacttaaataatgctatttcttaatcttgacttgacattgttgacttcctacaatggaagaggagttagcttctcttacactgtctttcccacaacatattatcacccccaccctcgacacccacatttcctctcctattagtctccctaagcagtttgatattggctgaaacctgcattcacagtttagtataactgtatgtttaccatttcctgttgagccctttattggtttatgattacatttcctttaggtacaacttttgatttttcctggagttaattacattgtttttctcatttgcttggttttctatgctcttgtcactactttacccaaaagtcgctgccctaaatgtaaagctcttcccaacaaagtcatgtgcatcaggtaatatgctccactttctcttcgagatgttcctgagaaccccctgtcttcttgccataacttggacatttcctggattctgaatcatattttcctcttgcttggttttctcttcttgatggagcctgtcctttagtagcctcctgagcttgaatatctaaaatgtctttatttctactgtaatattatcaaatatatatctggtctttgtctctgccttctgatatacaactcctaaaatccttgagatctctaaagtgatgtctttttgtatgctagtaagatgactgatggcggacagctcctatgtagcttcaggatagggactggacatctgaaagaccagggcatgattagaggggttgaaactttcagcccaccccccaaactcccagaggttgggggagagggactgaaagtgacgttgatcgccagtggccaatgatttaatcaatcatgcctatgtaatgagggctcctaaaaacccaaaaggacagggttcagagagcttgtggatagccaaatgtgtgggggcttccaggaaggtggacaagaacacgtccacatgctgagagaatggcacttcgcaactccttgcagacagaagctcctgctcttgggactcttctaggcttcatcctgtgtatcttttcatctggctatttgtagcctttaaaatagccttgtaataaacatgtgtttccctgagttctgtgaactgctcttgtaaattaaagccaaggaaggggtcttgggaacccagaaggacaggtaaaacaacctggggcttgtgattgacactggacatggggctcagtcttgcggcacagagtcctcaacttgtgtgatctgctgctatctccaggtagacggtgcaggattgaagcggatacccagctggtgtctgctgtacagctgaatgcttgcttgtcggtggggagaaattctctacatctggtgccaaaaggatgttgtgagagtaaagaaatggtttttttttgttttttggacttatctatccttacgtttgattcatcatttgaatgagaatagaattttagattggaaatcgttcctttgtgtttttgctttttttgttgctggaaatttttgagatcatctctattcctggtgttctcaaatttctcaatgacattacttcatatgttgcctccccattccctccccaacccctgcccaatttattgtgctgggcactttgtagtccttttttctagtttttttgttgctattgaacaaattaccccaaatatagtagcttaaatttgaggaggattcagctgggcagctttctgttgggatctctcatgcagctgcagtcaggtattggctgaggttatagtcatctgaaggcttgactgggtcagtggtccaagatggatcacttgcatggctggaggtaatgttgcactgttttccccaaatgtctggctcatgctgatgatggtgcttgttggaaactgtcaatgggtacagtctgccagctaataggtttgtttttctactaggtcatagttgccagtgtttgcaggactcttgtgggccagctgctccagagggatcctcccactatctcatgctatctggctaagtgggagaagtgagcctggacccacatgtgtagactttaactcaatctgtctgctttcagtggtcctcagctatgcctcatgcctgaggtaacacctactctgattcaactactggagacttcctccacccaagtaggagaggggatctatggtcatactgttcctcacaaaaattttccaccagttattccaatttctgcaccttcctggtatttgctggcaggaatggtctcttgttggcttcacccacaaacgtaagtctcaactttctctagctaactcagttatcacttctccatccattcccagtctctataattttgttgacttctcttgcttactagtgtctcctctcccattctttgtggggtttttttggtcttttattactttatgtgagtagggtttgggcaggaaatggaggttaatgtttatgctcagtctgccatgtttaactgaaaatttctttcaaaattctgccattaggcttttccccccatgtctctttagatagctcttgtcagtcaccaatacattgttttgttgcatccaataataaattctgtcttcattttgcaatcccttcaaagcctcagcaaagatcaccatgtcttcacttatattatgacttcatattcctctggttttcctcctctctctggccattcctctatactggaaaaggtcggtgccccagggctcattctagaacttctcttttttatgtgcatttcctaattcatcttgtccaatctcatgatttcaaatactacctgaaagcaaatgactcccaaattcctatctctagcattatgttctctcctgaatgccagcctactcaatatttcacttgaatgtctaataagcatctctagtataacttgtccccactttaatctgaattttccaatcaaactttccctattttaggccaggtgtggtggctcatgcctataatcccaacactttgggaggctgaagtgggaggattccttgtggccaggagtttgagaccatcctgggcaacatagcgagaccccgtgtctctaccaaactttaaaaaaatcagccaggtgtggtggcacacgcctgtagtcccagctattcaggaggctgagcccggaagatcacttagccctggaatttgaggctgcagtgagctaatgattgtgccactgcattcccacctgggtgacagactgagatcctgtcactaaataaataaaagacacctctattttagtaaatgaccaccaccatatacccagttgttgaggccaaaatcctcagagccttctgtatctggcttaatgaataagctggatgcagtagtatgtaagcagataggaacagtgttttttctcatgactgcccctagaagcttaactgtgtcaattctcagacgtagtttacagctttttcttttctttcagacattaaaaagagcggattattttactcataaaaagtccagtccattaagatatcaaaactcaaactcttatccagttgaaacctcttccctcacctagctttgccaggttcagtgtgagattccatccaggctgaagccccttatccctattcttcatgtttctacatggaggaacttacctggagaaaaacttccagcctctttctgcttccagagaagtagagtgactcatttgattgaatttcagagaacagatagggtggagtgtgctcaggctcctctgggtactctttctggggtctgtgggttgactggaggggtgtcttctggtgggcactcaattgcatagtgcttggtgaggcagtttcatggcctagaggctgggggatatgtttgtctgacttacgggtgatttagtagcttgccctcttgcttgcagatttaagccttgtccttcaagctaggtttttaatttgtggcaaagctgatattttgatacccacccatcttattgctgtgtctttttcatccgtttctgaactgggataggaagaggtgattatccttgattgtctaaaaccccgctattccactgtggggaaggtgcctgtgggtattcttttgtccactctctcttccaactttctcctccggcttgctgtggctcaccgccccttcgaagttaggctgggggtaggaattgaggagtgggtgccgaaatgctcactaggctggggcagttgtaactggatgtcagggcttctgtgggccaggtgaagacatgctggggtcttctgtgggtccttgacctgacttacggaccactggctgcagcctccagacgtcagccatgtttccaacagtcagacgccccctgccctgttgcgcccggctgtcccttccaagttcggtcactcgctctgcctccatcttcctcttccctctgctgctaaggcttttcacctttaatttctcctggggccacccccaactccagcgaccccgtgagcagctgaggctctaccgcgctcggtcctggccagcgacgcagcccttccctggcggggctccagggcttctggcccctgtggtccgccaggtgtgggggcccacggcctcaccgcgcctaccccactccccccggcgaagctacgcggcgctcagcttcccagggacgccggcggcgccctcggctcctccgctccgccccgccctccccctggtctcgcactggagccgacggcccgcgcccacctcacctcagggcggcctcccgcccccacccccggccccggcgtccgggcaaatcctgcagcgcgagagcaattccctgccacccgaccttcgcactcgctgtcgctcgctcgagcctcgctccccacgtccttccttccgacccgcggctggaccctcctcacaaatttctcagagaggctcacctcaaagcgcggcgcacgaggccgggctcccgggacgcaagcctctagagggcgcgcgagaggccccgcccccgcccttcggccccacccaccagccccgcccccacccgcacccaccaggccccgcccccacctccccacccaccagccccgcccccacctccccacccaccagccccgcccctcatgccccgccaataaggccccacccgcctcccccgtcccgtcgccttcacccaccatccccgctccctcaggccccgccccacgccgcatggggcaccaagcgctccaccactgtggtcgcctggcacaccccggggtcacgctcgcggcgctctgattggttgcgtgggcgtcggcccacctaagcctgagcgcctgccgaggcctgcgcctgcgtagtgcgcgcgggaggggcgggaggggcgggaggggcgggaggggcggggctgggcggcaggtcccgggtgcggacatctggcagctggcagtgggcggcgtagagcactgcagcagcaatgacggagggcacgtgagtcccctcgccccgggctcctgacgaatgcggggtggtcctaggtgctgaggagagcgcgactggggcagtgggccggcggccggcgttggggcggggcctgggtcgctgatggccggtggtcctcaggtgtctgcggcgccgagggggcccctacaagaccgagcccgccaccgacctcggccgctggcgactcaactgcgagaggggccggcagacgtggacctacctgcaggacgagcgcgccggccgcgagcagaccggcctggaagcctacgccctggggctggacaccgtaagttgcttccgcggagcgtcagcgagctcgggaccctgaggggtgagccgtgaggagcacgttttctctcagaaaggcgggtgggaggacccggccagcgacgcccatccccaaggcgagcgcccacgggaactgcgttcgcgggcccctccgcttcagccccttcatctctaaaccacgcataggagactcctaatgttttattttttagcaccttattttgagataatttttgacttataggagagttgcaaagatagttgtaactttgtttttattcacaaaaagtgtttggatccactgtcttagttgtgtgcattgtaagagattttggtcgtcagagtctgcagtgtaaacagggtctcctgccgagccccggccaccgagggaaaggctgtgccgccccttgggccctctttgagaggcccgagtcccaggcccaggtcggcacccgtgccccaccctacagtctgggtgcctggtttattccagacatcttggagaagttgtgaagaatacatgactggcaaataaagcaacgaaaatgtgcagctgttcttttactttgctgaggtgtgatgctctcatcaaagagtttcagacttttgatggaaacagctgaaacttttaaagtaatttacattcactgttttgacttgggctgtatgtgaagagggttcctctggccgggcaacagtcccgtcagctatctctttttttttttttcgatctctttgcagaagaattactttaaggacttgcccaaagcccacaccgcctttgagggggctctgaacgggatgacattttacgtggggctgcaggctgaggatgggcactggacgggtgattatggtggcccacttttcctcctgccaggtaggagtatgctgccccagcctgatggtatggccaccctggatcacccttgggatcctggcccagcctggtctagggttttgatgaagcaggtgaaaatccaggggctcacaagaaaagggctggcaaactctgccctatgtcagagtcgtcctgctattggtctaggggatcagctagccttgccagtgtagggtgacaggctctctgataagagaagcaagtggttctctagggctctgtgttgccttgagggaggaggaaggtgggctttgaagtctcagtacaggatgggatggacattccaggtggaaggcccagcctatgccaaggggctgtaggtgggcagagtggtgggtggggagctgatatctgctgtgaacttcctcggggctattgcaggagagcttcaggttcaggctggtgagtaggaggagcatagcagttggactgcctgggtattgaactgatttggctacacaagactattttgcatcctgggagtgtttctctacagaaatcctcagccttgtaaaatgggaaattccctcctatgaatttatgcaataggacttttttccctagtgacttgtaatcacattgtttcaatgacgtgaattcctacataaataggttttgtttctgtgataactcttactgatacatcattttcttttactacgctgactttgtaatagatagaaagtccttatatacctttgttgcctttctttttaaaacatctcttacctgtgtctattcatttactcatccaaattgcctttatcctgattttgtcccagacttgaaatgaagttgcaataggcttatatgttagtttgggaagagttggcctttaacgttaaaaacagttccatggtgtttactgtaggccaagccctgctcaaggcctgttcttcttttagtccttagaataagcctaatgagatacattagaaagctgaggcacatttattccaggtaaccagactagcaggaggagcactgggatccccatctctgctttgacttctagccctgctgccacctggactgtacagcattgagtttttctgtcctgggatttgagggcctgtccttaggggaagtcaaggtgctcttcttcccttggccccatcagggcctgtttagactgttctcagggctcgtggtaaggcaatgacatagagttggtcaggagatgggtcagccccactttgcctctgtagcctgacctgtgacaggattggaatcaggtttggtcatgtgcacagtgtcaggcatgcagtggtgcttggtcagtggggattactgtgttgtttgttcttgctgctttggctctgggcttagctggctgggacccttcctgtgggctggctgtgagttggagtttttttgtatttttttttttttttgagacagcgttcgctcttgttccccaggctggagtgcaatggcacaattttggctcgttgcagcctctgcctcctgggtgcaagtgattctcctgcctcagcctcctgtagggtccagccccacagggtcggtaggtttttctccctgtgtgcggagatgagagattgtagaaataaagacacaagacagagagatgaaagaaaagacagctgggcccgggggaccactaccaccaagacgtggaaaccggtagtggccctgaatgccaggctgcgctgatatttattggatacaagacaaaggggcagggtaaggagtgtgagccatctccaatgataggtaaggtcacatgggtcacgtgtccactggacagtgggctcttccctgcctggcagccgaggcagagagtgggagagagagagagagagacagcttatgccattatttctgcatatcagagacttttagtactttcactaattttgctactgttatctaaaaggcagagccaggtgtacagggtggaacatgaaagtggactaggagcgtgaccactgaagcacagcatcacagggagatggttaggcctccggataactgcgggtgggcctgactgatgtcaggccgtccacaagaggtggaggagtagagtcttctctaaactcccccggggaaagggagattccctttcccggtatgctaagtagcgggtgtttttccttgacactgacgctaccgctagaccacggttgggtccgcttggcaacgggcctcttcccagatgctggcgttaccgctagaccaaggagccctctagtggccttgtccgggcttaacagaaggctctcactcttgtcttctggtcactt

SEQ ID NO: 1454 - DNA, 6114 bp, Homo sapiens
gtaatacttaattaccttctaataattggagcagaagatgaacccaactaatcctttcagtgggcagcagcctagtgctttttcggcgtcttctagtaatgtaggaacacttccatctaagccgccatttcgatttggtcaaccttctctttttggacaaaacagtaccttatctgggaagagctcgggattttcacaggtatccagctttccagcgtcttctggagtaagtcattcctcttcagtgcaaacattagggttcacccaaacctcaagtgttggacccttttctggacttgagcacacttccacctttgtggctacctctgggccttcaagttcatctgtgctgggaaacacaggatttagttttaaatcacccaccagtgttggggctttcccaagcacttctgcttttggacaagaagctggagaaatagtgaactctggttttgggaaaacagaattcagctttaaacctctggaaaatgcagtgttcaaaccaatactgggggctgaatctgagccagagaaaacccagagccaaattgcttctgggttttttacattttcccacccaattagtagtgcacctggaggcctggcccctttctcttttcctcaagtaacaagtagttcagctaccacttcaaattttaccttttcaaaacctgttagtagtaataattcattatctgcctttacccctgctttgtcaaaccaaaatgtagaggaagagaagagaggacctaagtcaatatttggaagttctaataatagcttcagtagcttccctgtatcatctgcggttttgggcgaacctttccaggctagcaaagcaggtgtcaggcaggggtgtgaagaagctgtttcccaggtggaaccacttcccagcctaatgaaaggactgaaaaggaaggaggaccaggatcgctccccaaggagacatggccacgagccagcagaagattcggatcctctgtcccggggcgatcatcctccagacaaacgacctgtccgcctgaatcgaccccggggaggtactttatttggtcggacgatacaggatgttttcaaaagcaataaggaagtaggtcgtctgggcaacaaggaggccaaaaaggaaactggctttgttgagtctgcagaaagtgaccacatggctatcccaggagggaatcagtctgtcctggcaccttcccggattccaggtgtgaataaagaggaagaaactgaaagtagagagaagaaagaagattctctaagaggaactccggcgcgtcagagtaacagaagcgagagcacagacagtcttgggggcttgtctccctctgaagtcacagccatccagtgcaagaacatccctgactacctcaacgacaggaccattctggagaaccattttggcaaaattgctaaagtgcagcgcatctttaccaggcgcagcaaaaagcttgcagtggtacatttctttgatcatgcatctgcagccctggctagaaagaaggggaaaagtttgcataaagacatggctatcttttggcacaggaagaaaataagccccaataagaaacccttttccctgaaggagaagaaaccaggtgacggtgaagtcagcccgagcacagaggatgcaccctttcagcactctcctcttggcaaggccgcagggaggactggtgctagcagcctcctgaataaaagctctccagtgaagaagccaagtcttctaaaggcccaccaattcgagggagactcttttgactcagcctccgagggctccgagggcctcgggccatgtgtgctctccctcagtaccctgataggcactgtggctgagacatccaaggagaagtaccgcctgcttgaccagagagacaggatcatgcggcaagctcgggtgaagagaaccgatctggacaaagcgaggacttttgttggcacctgcctggatatgtgtcctgagaaggagaggtacatgcgggagacccgtagccagctgagcgtgttcgaagtggtcccagggactgaccaggtggaccacgcagcagctgtgaaagagtacagtcggtcctcggcggatcaggaggagcccctgccccacgagctgcggcccttgccagtgctcagcaggaccatggactacctggtgacccagatcatggaccagaaggagggcagcctgcgggattggtatgacttcgtgtggaaccgcacgcgtggcatacggaaggatatcacgcagcagcacctctgtgaccccctgacggtgtccctgattgagaagtgcacccggtttcacatccactgtgcccacttcatgtgtgaggagcccatgtcctcctttgatgccaagatcaataatgagaacatgaccaagtgcctgcagagcctgaaggagatgtaccaggacctgagaaacaagggtgtcttctgtgccagcgaagcggagttccagggctacaatgttctgctcagtctcaacaagggagacatcctaagagaagtacaacagttccatcctgctgttagaaactcatctgaggtgaaatttgctgttcaggcttttgctgcattgaacagtaataattttgtgagatttttcaaactggtccagtcagcttcttacctgaacgcttgtcttttacactgttacttcagtcagatccgcaaggatgctctccgggcgctcaactttgcgtacacggtgagcacacagcgatctaccatctttcccctggatggtgtggtgcgcatgctgctgttcagagactgtgaagaggccaccgacttcctcacctgccacggcctcaccgtttccgacggctgtgtggagctgaaccggtctgcattcctggaaccagagggattatccaagaccaggaagtcggtgtttattactaggaagctgacggtgtcagtcggggaaattgtgaacggagggccattgccccccgtccctcgtcacacccctgtgtgcagcttcaactcccagaacaagtacatcggggagagcctggccgcggagctgcccgtcagcacccagagacccggctccgacacagtgggcggagggagaggagaggagtgtggtgtagagccggatgcacccctgtccagtctcccacagtctctaccagcccctgcgccctcaccagtgcctctgcctcctgtcctggcactgaccccgtctgtggcgcccagcctcttccagctgtctgtgcagcctgaaccaccgcctccagagcccgtgcccatgtactctgacgaggacctggcgcaggtggtggacgagctcatccaggaggccctgcagagggactgtgaggaagttggctctgcgggtgctgcctacgcagctgccgccctgggtgtttctaatgctgctatggaggatttgttaacagctgcaaccacgggcattttgaggcacattgcagctgaagaagtgtctaaggaaagagagcgaagggagcaggagaggcagcgggctgaagaggaaaggttgaaacaagagagagagctggtgttaagtgagctgagccagggcctggccgtggagctgatggaacgcgtgatgatggagtttgtgagggaaacctgctcccaggagttgaagaatgcagtagagacagaccagagggtccgtgtggcccgttgctgtgaggatgtctgtgcccacttagtggacttgtttctcgtggaggaaatcttccagactgcaaaggagaccctccaggagcttcagtgcttctgcaagtatctacagcggtggagggaagctgtcacagcccgcaagaaactgaggcgccaaatgcgggctttccctgctgcgccctgctgcgtggacgtgagcgaccggctgagggcgctggcgcccagcgcagagtgccccattgctgaagagaacctggccaggggcctcctggacctgggccatgcagggagattgggcatctcttgcaccaggttaaggcggctcagaaacaagacagctcaccagatgaaggttcagcacttctaccagcagctgctgagtgatgtggcatgggcgtctctggacctgccatccctcgtggctgagcacctccctgggaggcaggagcatgtgttttggaagctggtgctggtgttgccggatgtagaggagcagtccccagagagttgtggcagaattctagcaaattggttaaaagtcaagttcatgggagatgaaggctcagtggatgacacatccagcgatgctggtgggattcagacgctttcgcttttcaactcacttagcagcaaaggggatcagatgatttctgttaacgtgtgtataaaggtggcccatggcgccctcagtgatggtgccattgatgctgtggagacacagaaggacctcctgggagccagtgggctcatgctgctgcttccccccaaaatgaagagtgaggacatggcagaggaggacgtgtactggctgtcggccttgctgcagctcaagcagctcctgcaggctaagcccttccagcctgcgcttcctctggtggttcttgtgcctagcccaggaggggacgccgttgagaaggaagtagaagatggtctgatgctacaggacttggtttcagctaagctgatttcagattacactgttaccgagatccctgataccattaatgatctacaaggttcaactaaggttttgcaagcagtgcagtggctggtttcccactgcccccattcccttgacctctgctgccagactctcattcagtacgtcgaagacgggattggccatgagtttagtggccgctttttccatgacagaagagagaggcgtctgggcggtcttgcttctcaggagcctggcgccatcattgagctgtttaacagtgtgctgcagttcctggcttctgtggtgtcctctgaacagctgtgtgacctgtcctggcctgtcactgagtttgctgaggcagggggcagccggctgcttcctcacctgcactggaatgccccagagcacctggcctggctgaagcaggctgtgctcgggttccagcttccgcagatggaccttccacccctgggggccccctggctccccgtgtgctccatggttgtccagtacgcctcccagatccccagctcacgccagacacagcctgtcctccagtcccaggtggagaacctgctccacagaacctactgtaggtggaagagcaagagtccctccccagtccatggggcaggcccctcggtcatggagatcccatgggatgatcttatcgccttgtgtatcaaccacaagctgagagactggacgcccccccggcttcctgttacatcagaggcgctgagtgaagatggtcagatatgtgtgtatttttttaaaaacgatttgaaaaaatatgatgttcctttgtcgtgggaacaagccaggttgcagacgcagaaggagctacagctgagagagggacgtttggcaataaagccttttcatccttctgcaaacaattttcccataccattgcttcacatgcaccgtaactggaagaggagcacagagtgtgctcaagaggggaggattcccagcacagaggatctgatgcgaggagcttctgctgaggagctcttggcgcagtgtttgtcgagcagtctgctgctggagaaagaagagaacaagaggtttgaagatcagcttcagcaatggttgtctgaagactcaggagcatttacggatttaacttcccttcccctctatcttcctcagactctagtgtctctttctcacactattgaacctgtgatgaaaacatctgtaactactagcccacagagtgacatgatgagggagcaactgcagctgtcagaggcgacaggaacgtgtctaggcgaacgactaaagcacctggaaaggctgatccggagttcaagggaagaggaagttgcctctgagctccatctctctgcgctgctagacatggtggacatttgagcagcctgacctgtggggagggggtctctcccgaagagtttctgtttttactcaaaataatgttattctcagatgcttgatgcactgttggaaatgtgattaatttaatcatgcagataaaccatttaaatgtc

SEQ ID NO: 1455 - DNA, 5943 bp, Homo sapiens
atgaacccaactaatcctttcagtgggcagcagcctagtgctttttcggcgtcttctagtaatgtaggaacacttccatctaagccgccatttcgatttggtcaaccttctctttttggacaaaacagtaccttatctgggaagagctcgggattttcacaggtatccagctttccagcgtcttctggagtaagtcattcctcttcagtgcaaacattagggttcacccaaacctcaagtgttggacccttttctggacttgagcacacttccacctttgtggctacctctgggccttcaagttcatctgtgctgggaaacacaggatttagttttaaatcacccaccagtgttggggctttcccaagcacttctgcttttggacaagaagctggagaaatagtgaactctggttttgggaaaacagaattcagctttaaacctctggaaaatgcagtgttcaaaccaatactgggggctgaatctgagccagagaaaacccagagccaaattgcttctgggttttttacattttcccacccaattagtagtgcacctggaggcctggcccctttctcttttcctcaagtaacaagtagttcagctaccacttcaaattttaccttttcaaaacctgttagtagtaataattcattatctgcctttacccctgctttgtcaaaccaaaatgtagaggaagagaagagaggacctaagtcaatatttggaagttctaataatagcttcagtagcttccctgtatcatctgcggttttgggcgaacctttccaggctagcaaagcaggtgtcaggcaggggtgtgaagaagctgtttcccaggtggaaccacttcccagcctaatgaaaggactgaaaaggaaggaggaccaggatcgctccccaaggagacatggccacgagccagcagaagattcggatcctctgtcccggggcgatcatcctccagacaaacgacctgtccgcctgaatcgaccccggggaggtactttatttggtcggacgatacaggatgttttcaaaagcaataaggaagtaggtcgtctgggcaacaaggaggccaaaaaggaaactggctttgttgagtctgcagaaagtgaccacatggctatcccaggagggaatcagtctgtcctggcaccttcccggattccaggtgtgaataaagaggaagaaactgaaagtagagagaagaaagaagattctctaagaggaactccggcgcgtcagagtaacagaagcgagagcacagacagtcttgggggcttgtctccctctgaagtcacagccatccagtgcaagaacatccctgactacctcaacgacaggaccattctggagaaccattttggcaaaattgctaaagtgcagcgcatctttaccaggcgcagcaaaaagcttgcagtggtacatttctttgatcatgcatctgcagccctggctagaaagaaggggaaaagtttgcataaagacatggctatcttttggcacaggaagaaaataagccccaataagaaacccttttccctgaaggagaagaaaccaggtgacggtgaagtcagcccgagcacagaggatgcaccctttcagcactctcctcttggcaaggccgcagggaggactggtgctagcagcctcctgaataaaagctctccagtgaagaagccaagtcttctaaaggcccaccaattcgagggagactcttttgactcagcctccgagggctccgagggcctcgggccatgtgtgctctccctcagtaccctgataggcactgtggctgagacatccaaggagaagtaccgcctgcttgaccagagagacaggatcatgcggcaagctcgggtgaagagaaccgatctggacaaagcgaggacttttgttggcacctgcctggatatgtgtcctgagaaggagaggtacatgcgggagacccgtagccagctgagcgtgttcgaagtggtcccagggactgaccaggtggaccacgcagcagctgtgaaagagtacagtcggtcctcggcggatcaggaggagcccctgccccacgagctgcggcccttgccagtgctcagcaggaccatggactacctggtgacccagatcatggaccagaaggagggcagcctgcgggattggtatgacttcgtgtggaaccgcacgcgtggcatacggaaggatatcacgcagcagcacctctgtgaccccctgacggtgtccctgattgagaagtgcacccggtttcacatccactgtgcccacttcatgtgtgaggagcccatgtcctcctttgatgccaagatcaataatgagaacatgaccaagtgcctgcagagcctgaaggagatgtaccaggacctgagaaacaagggtgtcttctgtgccagcgaagcggagttccagggctacaatgttctgctcagtctcaacaagggagacatcctaagagaagtacaacagttccatcctgctgttagaaactcatctgaggtgaaatttgctgttcaggcttttgctgcattgaacagtaataattttgtgagatttttcaaactggtccagtcagcttcttacctgaacgcttgtcttttacactgttacttcagtcagatccgcaaggatgctctccgggcgctcaactttgcgtacacggtgagcacacagcgatctaccatctttcccctggatggtgtggtgcgcatgctgctgttcagagactgtgaagaggccaccgacttcctcacctgccacggcctcaccgtttccgacggctgtgtggagctgaaccggtctgcattcctggaaccagagggattatccaagaccaggaagtcggtgtttattactaggaagctgacggtgtcagtcggggaaattgtgaacggagggccattgccccccgtccctcgtcacacccctgtgtgcagcttcaactcccagaacaagtacatcggggagagcctggccgcggagctgcccgtcagcacccagagacccggctccgacacagtgggcggagggagaggagaggagtgtggtgtagagccggatgcacccctgtccagtctcccacagtctctaccagcccctgcgccctcaccagtgcctctgcctcctgtcctggcactgaccccgtctgtggcgcccagcctcttccagctgtctgtgcagcctgaaccaccgcctccagagcccgtgcccatgtactctgacgaggacctggcgcaggtggtggacgagctcatccaggaggccctgcagagggactgtgaggaagttggctctgcgggtgctgcctacgcagctgccgccctgggtgtttctaatgctgctatggaggatttgttaacagctgcaaccacgggcattttgaggcacattgcagctgaagaagtgtctaaggaaagagagcgaagggagcaggagaggcagcgggctgaagaggaaaggttgaaacaagagagagagctggtgttaagtgagctgagccagggcctggccgtggagctgatggaacgcgtgatgatggagtttgtgagggaaacctgctcccaggagttgaagaatgcagtagagacagaccagagggtccgtgtggcccgttgctgtgaggatgtctgtgcccacttagtggacttgtttctcgtggaggaaatcttccagactgcaaaggagaccctccaggagcttcagtgcttctgcaagtatctacagcggtggagggaagctgtcacagcccgcaagaaactgaggcgccaaatgcgggctttccctgctgcgccctgctgcgtggacgtgagcgaccggctgagggcgctggcgcccagcgcagagtgccccattgctgaagagaacctggccaggggcctcctggacctgggccatgcagggagattgggcatctcttgcaccaggttaaggcggctcagaaacaagacagctcaccagatgaaggttcagcacttctaccagcagctgctgagtgatgtggcatgggcgtctctggacctgccatccctcgtggctgagcacctccctgggaggcaggagcatgtgttttggaagctggtgctggtgttgccggatgtagaggagcagtccccagagagttgtggcagaattctagcaaattggttaaaagtcaagttcatgggagatgaaggctcagtggatgacacatccagcgatgctggtgggattcagacgctttcgcttttcaactcacttagcagcaaaggggatcagatgatttctgttaacgtgtgtataaaggtggcccatggcgccctcagtgatggtgccattgatgctgtggagacacagaaggacctcctgggagccagtgggctcatgctgctgcttccccccaaaatgaagagtgaggacatggcagaggaggacgtgtactggctgtcggccttgctgcagctcaagcagctcctgcaggctaagcccttccagcctgcgcttcctctggtggttcttgtgcctagcccaggaggggacgccgttgagaaggaagtagaagatggtctgatgctacaggacttggtttcagctaagctgatttcagattacactgttaccgagatccctgataccattaatgatctacaaggttcaactaaggttttgcaagcagtgcagtggctggtttcccactgcccccattcccttgacctctgctgccagactctcattcagtacgtcgaagacgggattggccatgagtttagtggccgctttttccatgacagaagagagaggcgtctgggcggtcttgcttctcaggagcctggcgccatcattgagctgtttaacagtgtgctgcagttcctggcttctgtggtgtcctctgaacagctgtgtgacctgtcctggcctgtcactgagtttgctgaggcagggggcagccggctgcttcctcacctgcactggaatgccccagagcacctggcctggctgaagcaggctgtgctcgggttccagcttccgcagatggaccttccacccctgggggccccctggctccccgtgtgctccatggttgtccagtacgcctcccagatccccagctcacgccagacacagcctgtcctccagtcccaggtggagaacctgctccacagaacctactgtaggtggaagagcaagagtccctccccagtccatggggcaggcccctcggtcatggagatcccatgggatgatcttatcgccttgtgtatcaaccacaagctgagagactggacgcccccccggcttcctgttacatcagaggcgctgagtgaagatggtcagatatgtgtgtatttttttaaaaacgatttgaaaaaatatgatgttcctttgtcgtgggaacaagccaggttgcagacgcagaaggagctacagctgagagagggacgtttggcaataaagccttttcatccttctgcaaacaattttcccataccattgcttcacatgcaccgtaactggaagaggagcacagagtgtgctcaagaggggaggattcccagcacagaggatctgatgcgaggagcttctgctgaggagctcttggcgcagtgtttgtcgagcagtctgctgctggagaaagaagagaacaagaggtttgaagatcagcttcagcaatggttgtctgaagactcaggagcatttacggatttaacttcccttcccctctatcttcctcagactctagtgtctctttctcacactattgaacctgtgatgaaaacatctgtaactactagcccacagagtgacatgatgagggagcaactgcagctgtcagaggcgacaggaacgtgtctaggcgaacgactaaagcacctggaaaggctgatccggagttcaagggaagaggaagttgcctctgagctccatctctctgcgctgctagacatggtggacatttga

SEQ ID NO: 1456 - DNA, 79786 bp, Mus musculus
  misc_feature (5773)..(5875): n = a, g, c, or t.
  misc_feature (9349)..(9578): n = a, g, c, or t.
  misc_feature (17320)..(17795): n = a, g, c, or t.
  misc_feature (18799)..(18844): n = a, g, c, or t.
  misc_feature (26959)..(26978): n = a, g, c, or t.
  misc_feature (38486)..(38505): n = a, g, c, or t.
  misc_feature (66359)..(66506): n = a, g, c, or t.
cttctcccatttggaagagatcttctgctggaacactaaccgcccaagggaattcaatctggggagtctcaagagggagagagactgtccagactacattccataaaggcaagtatggccaggggaggccttggacaggcaaggaagggaaggtaccctagtgagcacaactctggcagacgtgggtacttgcccaggacccgtgcaggaacaacagtataaactataggaactacaagcccacagacgtggctgacccctcccatgcattttactggcagccttgagtttccaaggatcaagagaagctgagtcatccctatcttgtagtccctcctccctttcttttactaatactttcagcagtattttaaatttattttgctaatattttttggattagcttttagattatctttgtgcatttagtgatgtttacagatttttctcattactgggagatatttttcttttttttttttttcttttttcttttttttttccgagatagggtttgtctgtgtagccctggctgtcctggaactcactttgtagaccaggctggtctcgaattcagaaatccacctgcctctgcctcccaagtgctgggattaaaggcgtgcgccaccaccgcccagctgagatatttttctttttctcactctttataaagttctttctttcctcttcctcctctttttcctcctccccctcccccctcccctgccttctgctcttgtcttcttttcttttcgtttctttttttttctattatacatttagtggttattttgtctttgtcatatcgtttttaaaatccacgcttaatttttttgtcactttcttatgtttaccactttttggttttgagctttgtacggtctgtgattacaatggagctttctgggttttatcttatttttatttttcctgacgccttgctctaccctcttgccctctaaaacactctcctctcctcctccgcttattttctctcatatttatttaatcttatttcggtttttggtttgctctttgcctgcctttccccagcattcactgcttccacctttgctctaaatactttttaggttcacagtacagtacagtagttttgccattttctgttttgttttatggatattagtgatatgttattgagttttttttaaagcacgtgtcttacttctatggtttcatgttcctcgtagtgtagtagtttgttttattttctgtaagtggtattgaggcttcaaagacatgctgttcaacaataagaatccaaaataaaaccagaagaaccattcacaccatcagaaatgcaaatcacagtgaaacacaagacttcaaaggggatggatgacctcagagatggcacagacaagtaaggaattcaagtaggacctgaagaggaaaatccacagacaagaggaaacgatcagcagaaagggtgagaaagtcaacaggattgatggagaaccgaaagttagcaaggaaatggagagattgggataaagccaaacagaagcaatggaaatgacaactgcatgaaaacaaacagactgaaacgtaaagcgtaatcaatggacttaagcaagcagaggaagaacatcatggatgaatggatgccaaggcaaaggtcaggctgcatccaaatacagtaagaaaacaggatcgtggtacagtggccaagactctgggatatcatcaatggtctaaacccacgaatctgtggaatggaaaaaggaaatgagacgtaaaactaaagatataaagaatctacccaattaaattataacataactttccctccctcctaaaatctagagcaacaggcagacatccaaggaaaagccacttctcatctatcataatcaagattttggggatgcaaaggaaaggataataggaaaggtttcaggggaaatgccaaatcatcaacacgagtggttgttgttggacaagcatgtttccataccacggagacaccgcagcaacaatcctaaaacacggcgcagtatatatcatgctctgagagcacaaaacctttccgctaaggtcactccctccaccaaagctctctcttagctctgacagagaagtagacatacaagacaagcacatgacaagtttatgactagcaagtccaaaaatacaaagcaaaacagagcaaacctaaaaacacccaaggcatattacacacagaaaaggtggaaggtctcaatcatgagatcacagagaagaatacgtttactgagaggagcagaaccaaaagggctggccaggaatccggcaggaccaaggcactaaaccagcagacaactgactctaagagcagagaaggaatggagctagcaacaacacaacccaaagttacaaaaattaatacacatctgtcaatactacagattatctcggataaagagatgcaaactgaccggctgggctcaaaaagtagatccaagtatccaatgtccccaagaaacataactagcaaaacacacttacagattcagaatcagacagaggctctgagtcaatcaggcaagtgaacagaaacggaagacacgctggcatggcttttctgctgtctgatggagaagagttcaaacaaaacttactcagaagacataaaggaggccccatggcatattaataaaggaaatatttcatcaagaacaagcagcaaatataaatacacatatactgaaaatagatactctccgttttataaaacaaacactaatggacataaaagtttaggtaaatcctgacacaacaagaggaatgacttcagtgactcaatgacatatccatagaggtcatttgaaagcaaaaataaataaagagatctcatcgtcaaactgcactccaggccgggcatggtggcacacacctagcacttgggaaacagaggcaggcagagctctgagactgagaccagcctcatctataaagggagtttcaggacagccagggctacacagagaaacctgtcttgagaaaccaaaaccaaaccaaatcaaaccaaaccaaaccaaaccaaacaaacaaaacaaaataaaaccccacaaaaccacactgtagattaaatgacttctgacatatagagttcaatccaacagatactcaatatacatcaaaaggccctggaaccttctctaaaacagacctcattctacgtccactggtgttttacctcatgtctgtctgtgtgagggtgtcagaggccccccaaactggacttacagacatgtgtgagctgccatgtgggtgttgaaaattgaacccaggttctctggaagagcagccagtgctcttaaccactaagctgtctctccagcccccaagagaacaggtcttaacaaataaaagaaaatcaaagtaatttcttgtatcttattggatcttactgcagtgaaactagagatcaatagcagaagaaaccacagaaactacagaagtacctgaggctgatgactagatttaggaaggaccagtgggccattcaagaaatcgagaagaaaaattcttaaaattaagcaaaaatgaaagcacaacctattagtctctatgggatacagctaaggcagtccttaaaaggaaagtttatagctggagggcttacattaaaaacatcagtgtgatggtagatatgtgaccaagtggactgtctcaaaggctcaaaaacagaaaagagaagccaaaatccaaagcagtagacagcaagaaataataaagagctgagcagataaagaactgtaaaaacctatctatataaaaaaataataaattcctagacatgtatgatctactaaacttgaatcaggaatatataaccaccttctaaagatctataataatcaacaagattgatgcagaaatcaagtctctaacaaaggaaaactcacgactggaaggcttcactactgaattctttcaagaaaagccaaatctaaaagtcctcaaactgttccataattagaaagaaaaacaacacgaccaaactcactctgtgaaataagcatgacttttgtatctaaaatagaagatggcacaagaacaaaaaagaaaactgtaacttccatgatgaacatacatacaaaaattgtcaataaagttctttaaagcttaaagctagatcaatagctcaggcagctctgcctttagtcctattcccagaggatatagtgcttgcatcttgcctcaggcattggcacacatgtggcatgcacattcacatggatagaaataataaaaaaacacatttgtacactcttgaaaactaatttttacaaatgtacattgtgattatacactatggtcaagtttgtctcattccaggaaggcaaggttggttcaatatacacagatcagtcaagacaacgcagaatataattatcattttattagatgtagataagtcctttaacaaagttcaacatcccttcatgatgaatagcctcagagaaactcacaggagggacgtgtgtcaacatagtaaaggctacatacgaataacacacctatagccaaaagtatattaaatggaaaagactgtaattgtttcctctaaatcaggaaggagacaaatatgctacctccatgagtcctactcaatccaatgatcaaagtcttagctaagcataagacaagataaagaagtaaagtggacatgagtaggaaagaaggcacatggcctttttacagacaacatgagcctatacctaaaagacccaaagtctccaccagaaaacacctagacccgataaatactttcatacaaagttgagtagcttttctacatgccaatactgaattttccaagggtattaaatcaagggggaaagtcctaatcacaatggcttaaaaaacgaaataaatttacaaataaacctaaccacccaaccgaggagattaaagactaaataaagactttaatactttaaagaagttgaagaatacaccagaagatgaaaagatctctcacatgctcatggattggcagaagtcagtcgggagaaaatggttccattactacaagctatatagaaatgcagtgcaattcccatcagaattctgattggcattctttacagaactagaaaaaacaactctaaaattcccacagacgcacaaggtcctgcaataatcaaagcaatgctaagcaagggcaacgctggagctgctgcaatgcttgattttatactatattacagagccattgtaacaaaaccatctcatcctacagagccatcgtaacaaaaccagtacagcaccagtgcaaacccagacacatagaccagtggaatagaagacccagaagaagccacacagctatggctacatgttttgacagagatgtaaaatacatacttgggaaaataagacagccttttcagtaaatggtactgggaaaaactggatattgattgtagaggaatgaaactagatacatagctttctcttggcacatacatatgtgcacacacacacacacacacacatcaatgaaaactgcatcacaattgtagtctcagacctgaaactttgaaattgcttcaggagagtatggtaatatatttcaagatacaggcatgggcaagaacttcccaaaaaggtctccaaaaatacagaaaacaatcccaagaattgacaaaggggattacagaaaattaaagggtttccttcccaataaaagaaacatttgctaaactgaggaggtagcgtttacaatgggaaaaaaaaacttagctaatgtatactagacaannnnnnnnnnnnnnnnnnnnnnnnnnnnnnnnnnnnnnnnnnnnnnnnnnnnnnnnnnnnnnnnnnnnnnnnnnnnnnnnnnnnnnnnnnnnnnnnnnnnnnnaatgtatactagacaaggagcttacatctagcaatatatgaaggactgcagtaaattaaatatcaaaagtaaattgttcaagctgggcagtggtggtgcaaccctttaatcccagcacccaggaggcaaaagcagggaaatctctatgagtctgaggccagcctggtctacagagtgagtttcagaatgaccagagcagcacagaaaagccctgtttcaaaaaaccagaccaaaccaaactaaaccaaccaaccaaccaaaaacccaaaaaaacaaaacaaaacaaaacaaaaccagcagcaacaaaaatcattcactcaaacagttggctaataacctgagtagacaactttcaagagaacaattgcctagttaatatttgaaaaaaatgttgaacatccttaaccatgagggaaatgcaacttaaaattgcttttggatcccatctctccccagtcagaatgactgtcatcaggacaacaaacaggaacaaatactggtgagggtgcggggtaggatacactcctacacactgctaatgggaccgtaaactcaagaagccactacagaaataagtgtgaaggccgtgtaagtcagctacaccgttacacaacacaactcacacacatacacacacacacacacacacacacacatgcacaccagaaacacttgcacatccatatttactgctgcactgtcattcataatagctagggagtagaaacaactgggtgtccatcaacagggaggtggatattggaaaagtggtgtatacacacacatgaagctgtgacatttgcaggaaaatgggtggaactgaaagtcatcctgcgacagaaagtacactggactctagaagacaaatgcctttgagtcctcttatctaaggagcctcctctctctctctctctctctctctctctctctctctgtgtgtgtgtgtgtgtgtgaagtagaatgtgcacaaggggggaagaactgttcttgattgcgaggaaggggaaagaaagggtaatagaatatactgacatgagaacagaaggaggtgctatttaagagggggaaaaggaccaagtagaggagggtgagggggatgagagaggacagtgggagaagacaatgagtcagaagaaagtgatcacacacacacacacacacacacacacgttataatgaaatcaattactttggatgctatttaaaatgaatgagattacagtaaaaatgccagtccctacatctgtctcctttacaactcagcttttatcaagggtggctaagacagtttcttggggtgcaattgtgacaaatgactcaggattactgacgagatagagcgtgttttatacttcccagcttgatggcatctgcaaattgccccttccatggctgtaacagacatttaatagctgtgcttaagggctttaaaatacttcctatccaatcttcaaaatgtctctttaagtatgatgatgctattatactcaatcctcgtattctgatgagaaggatatatttttcattacatggataaacaggaagcttaggaaattgaagtgactgtcttggtaaaagccttgattgaaacctgggccacctagcttctactgcataacttcttttttaggactgtctactttatgtgtatagtgttttgcctggacatatgtgtaatacatgtatgctcagtatccaaggtcagaaggaggcctgggattcagttccaggagactgagatcctaaattacagatggttgtgagataccacgtgggtgctgggaacacttggccatgaattttccaacctaggcttgctttgtttatttgaaaccaagtcttgctatgtagcccaagctggcctggaactcagaaccttcttgccccagcctcctgagtgtggtatcacttatggctggctttatagcacaacagcctaagaactatacaaagatatagaacacaagggctgatctcacacagcgatacagtcttgttactgtttgcctatggaaggcagctctgctaccacagagaaaggacagaatcttgcctcctgtctctacacccagtgccacagcagacaactagctattgacttttatttttccagtctggccatgctaaacgtcctaaatctaaatgtcttatcttccaccccatacttgtttgtgcagagtttctgaaggtcataaaagattttgtccgattcctcagaactctcccttatctttattagagaatgcaggaactctgtgaaaagattaacaggtggaacaaatctctagcttatgcctctactaggaatcgcatctagtgctggaaagcattctactacagagtgaagagagatcaacattcaagactatcattggctcactcttacctcaccgagaatgattttcactgtaaatgagaatgaacaagttactcagttttcctgtgtgggttgacaaaggacttaaatcctataagcttactgttaatcatctatttttttcttgcccaccttatctttagctttggtgacatttacttaaaagaaaccatgcattgtgtagtggcccacacctttgatctcggcattccccaggcaggtaggaggatttctgtgagttccaggctcacagactcaaaaataaaggaaaaaacaaaaaaaacaatagatgtaagatctgaataacagcatccgtcacgtatataaggggacgtgggtgttgtgaatgcttcatttcggttgacaaacctggggctaagagaaaaaataagaagccctatacagaatgaccccagttatttctttgtcttcttatttagcccctttccttttactgtcttccattgagggttctttcttggtccttaaaacacattcccttttcagaatccttttcattgttagcttctttcttgaaaccagatagttccaggactggatcgttctcatccttcacatttctgctcaaatgccactctaagaggtcttttctggtcatctcaaaataacatctccactcacctttgtgtgtgtgtgtgtacccgttactggcaatcacacacaaagagcagtgcagatttaaagcctcttttctggcttctatgagaatagcacatgcagaatgggtgctgccttcgtctcctctcctgggagcccttgcctagcagggaacaaattcttgaatgaatgaacgtggctctttgggaccctatacgtcgtttcttcttccaagcggtcccttcgcagaagtggtggttaactgaagtcaggtacttgggtctcagcgcccggtccacggtgccacgtcccctgggccgagcgcttagggcagggagccgcctgtggaaacgaaagcaggaaggggaaagtctccgcggaggcagcggccgccaatcctatcagctcggacgcagcggggccttcccggccgggctgactcattcccagccgtctctccgcgagccgaggccgcaagnnnnnnnnnnnnnnnnnnnnnnnnnnnnnnnnnnnnnnnnnnnnnnnnnnnnnnnnnnnnnnnnnnnnnnnnnnnnnnnnnnnnnnnnnnnnnnnnnnnnnnnnnnnnnnnnnnnnnnnnnnnnnnnnnnnnnnnnnnnnnnnnnnnnnnnnnnnnnnnnnnnnnnnnnnnnnnnnnnnnnnnnnnnnnnnnnnnnnnnnnnnnnnnnnnnnnnnnnnnnnnnnnnnnnnctccctagacctcggcccgcccgacgcgtctcggaggagcggatcctgcgcgcctcggggcgctcctgtgtggcccgacccgtgtcgccggtgggtgcagtccctggctgctggatgggggcggggggcagcggttctccctgcgatcccgcctcctgctttccccttagccccctgctactggcagggaacttcaaagctagaaaacctgcgggtttccgacagcctaggaaggagtggctagctgttgataaatgcatgcatccccttgtgccttagaacccgaccccccctctttcttattcttctgtacatttttctagtcatctaaacagcgcagaaaaaaaaaaagagagcatctattggccctgggtttttgagttagtgacttgctgcttctgtttttaggttcctgaagcaggcgacgggaacaagatgtgaactgttttccctccccagaagaagaggccctttttttccctcccgcgaaggtgggtgttagcgctcggggctgcctgggtgctgcagttaaagacaagggtgtctgagatctgcgagccagtgcctgctaagaaggctggatgcttgtgtacaacggcaggactaattgttgcttactgcgaaaatggcagtgttgaacttttcctgttgctgtgggagagtaattgggtggtatttattgtgtctcttggatccttaaagaagcggtctttgttggttttacagtgtggtcttgcagaggaaaacaataagtcgtctctttctccccctttctccccagtcttaattttcaaggaattgaaataacctgttgagggaacaaattggttgtttttgctgggtttctgctgccacattgaatgcttcctgtattcacctgcttgctttgttggttgattgctttccggtggttactagtctatcaggggaaactccttttccctgaatgaaaggaccgagccgctgagtgtgtcacagagaggaggagaaatgcggagaagggaaacagaagtgggaataaagaagccggaggttgcttttggtttcataataggtttgtatgagtgagttgttggcttactgcaaatattctcatatagttcccagcggatttgaaaatgaatcatcaatttctggtcctctttctctatatcctttacctgtttactgtttacggttccagctattaagatcatttggttgtatgtgagctggcttgagtgtgggacgtctgcagactggatgtgcccaggacttatcctgagagtactgagcggtgctacaggcatgagcatttacctgtacaggagagctgcagtgtgtggaggctagataagcacttatgtttattttggcttttgtggagtattgtggaacttgctctgtagaccaggctagcctccaactcagagatttcccctgcctctgccttccaaatgctgggattaaaaccaccacccaccgggcttcatttgtttcttttagtgtcttttcctttgtaatttgaaggtgtcttgagtaaggtgtcttgagtgtgaaaagtaaacatatttttttttctctactttacccagataggctattcttgaaagatgggatccctttctggcaaaatagagaagaccattggctttggagttagatctgagcgtgcagtcttaagttaggataatggtgttcttcccatttaacagcagtgttaacttaaaatttactttctcagaaccttgtgtgggggtcgattggatgcatgcagagcagtaaatggtttggtcgcttctgaacgtcttagcttctcagagctgggcaggcaaaggaggttcctagctggcccgtgcgtagctggtcagtccctggtgcggcttccatagagcatagagaaactgcatgctagtgtatctacagcctctgtatggaagggtttgatgcctaagccccgtggtgctgccccctggtggttaagatgcgcaaagacttgtcctttgctcctcccccattacactgtttttcctttttaggctccctcgcttagttcttagtttcccaaactgtgtcaggtgttagagcaccagggaaggctggctctcaccacttaacctgaggtagtttcagaggtaggaagttccatccgttcctatgggggtgtgtgtctttgtaaagctgtatcttcagagtttactgtatgaaaagctgctatttagtgtatgacagtgtggaacaagaaatgacaatgtggcagtgcttaggatgataccaaggggctgaggaattgtcagaatcagagcagcaccagaccccccaagagtattaatgctaagttgtttgacccaacaaggagtatttccttggtttaaaaataataaataaattgctaactttcaggattcctcaagtggagatagtctgggaacattttcatttggttgcagctggcttttctgataacagttttcaatgcaaagccttagttcataatggcataatgtcctgcttctaataatgcctgtatgacgtctgctaggttcttctaagaatgcctgcatgctgtctgtgaggttcattcacattgtaattactcctcttgtgtacctgcctctctggacacttcatagtttttattttcttctgcacagggctcttaccactacattttttgataatctttttgtcccaaatgaaaactgatattttatactactgctgtaatttggatcttgaatgtccctgaaaggcttttgtgccagagcttttgttgtctgagatactaagatgccaacttctcttctgcttccctgctgccatggcaaccaggcctttcttattttaataatactttgctggctagaaagacagtgttgagccctctacatttccccaccatttcatagagcaggaatagtttatctgagttgtaaaggcccctagacaagacactgcttcaatgtccgtgctcaatcgctctgtttgtatttcctgggtcgccataggagagacttgacagcattacttaagagcctcctttcccactgttcaatcgcatttttcctcactccaggctaagtcctttctgacagttgccccaaagccttattaggcctttacttgacttcctcaaggaagactttgggtgggttcgcatctctttccagctactacagaacggtccctttatccagtgggtcttagaattacatacaggatttactgaaatatatattgttgcattctgtctccagagtttgtgtttcagtaagtccggagtggaacctgtacatttgcatttcttacttgttttccaaggaccaccacactgtgaaaatcactgatttaaattggttggcaaagatttttttttttctgttaaagaacatagtttttaagcggtgttggcaagattgtctcttttgctagtctatagtggaacctttgtagcacagaagtagtcataggcagtgcataagtaaatggcacgctgtgtttcaatgaaggcttatttatgagaacagccaactggctgagtttggcacatgaactagaatacgaaagttcccagttctcacatgattccaccatctctgtgagttactgatgcaccttttatttcgagcaaaccttattaaaagagccatgtttgtcctttaaaaaaaatctttcttaaaatttattttcttgagcaagccacacatttaatgttttattactcaaaagtatttttgtatatgtgttactttgtgaaacagagaagggcttgttggattagaagcggcatgtgttcctgattgcaacacacacactctgccaagttagtgtagaaacacgaagtgctttttatatctctactacaatgttttcaggtggcctgattctagctaactggggacatgggactactcatagtctgatcatttacaaacttttaattttccgctgggacttgtatgttccaggacatacactcttgttttccatatccctgtccctgccaatagtactgtgctttttgttgtctaaatcctcattccccattctttactctgtgtgtgtgtgtgtgtgtgtgtgtgtgtgtgtatgtgtgtatgtgtgtatgtggaagaattcgggtgcctgggaaggccacgagagggcatcagatcccttgatgcttacaggcagtcatggggtggcaccagacagggccagggcgggtggaatccggaagagtaggaagctcttccactctggaaccatgtctcctcaaactctttttcttgtcaaagtctagtccatgctgtaagtgtgcatgcagtgcctggaagcttcctcggctttaataaccacggccgttcttccctggacatctttcagccccaaccaactgaggagtttagtcttagagtatacaggaactgaatgagtatacagtatatgagtatacagtaactgaatgagtatacagtatataatgagtatacagtaacagaatgagtatacagtatataatgagtatacagtatataatgagtatacagtaacggaatgagtatacagtaactgaatgagtatacagtatataatgagtatacagtatataatgagtatacaggaactgaatgagtatacaggaactgaatgagtatacagtatataatgagtatacagcatataatgagtatacaggaactgaatgagtatacaggaactgaatgagtatacagtaactgaatgagtatatagtatataatgagtatacagtaactgaatgagtatacagtatataatgagtatacagtatataatgagtatacagtaactgaatgagtatacagtatataatgagtatacagtaactgagtgcagggtatgggctttaggcatcaagaggcacatttaatatttattaattaaagaaatgaaagcagtaaagcagacattagtttgcagtgaggctagattggaggtaatttttagtcttctcggcttgcctagttcagtagtttcctctgttacgttattttctcatggacaggtgtttgaaaagtcacgtgttttagaattctaaagtgtaggaatacatttagataatattagaatctcaaacaattgtatgtgatgtttctccatgtatgtgtatatgtacatacatgattaagaaatattatagcagctttttaaccttcacttacttgacatcatttcggtgtcagggaccgtggctgaaataattaacgagtcgtcatacttctcacctgcgggaaactttcagtctagtgatgaaagaataccagaaagcaagtatgtgaccttacctttgagaggtcagaactggtggctcttgggtggggcaggaacaggtggagatatcaagcctgaggactttgtggagatggtgatttctagaggctctgggtgacgtggaagagcgtgggccagactgtgactgcattgtgtgtttcattttacatggggggcggggaaaccctaccaatataggacagaaaaatttagatgcaggttcagaattaagcacttgaaactacctccatttcaagaactagtgatttctcagtatctcccattagaatattttgagtttaactttcttttaattgttttttttttcgcttaatacatatgcatttgccttaattgactaatcagttttgctcaacctatttatattaaactttaatttataccttatatttatattaaacttaatatttatatttaatattatgcttaatatattcgtattatatttaaaattatttatattataataatatttaatattattaatttatatttaaacttcatatttataccttaacgcttacagttttctacaacttgctattctattttcaatatttatctatgtaaaattaaagcgacaggtttaaactgccaaggaacttactttctttttttttttttttttttttttttttttacagtttttacagcaattttaatttattttttttccattttttattaggtatttagctcatttacatttccaatgctataccaaaaagtcccccatatccacccacccccactcccctgcccacccactccccctttttggccctggtgttcccctgtactggggcatataaagtttgcaagtccaatgggcctctctttccagtgatggccgactaggccatcttttgatatatatgcagctagagtcaagagctccggggtactggttagttcataatgttgttccacctggaacttactttctatagtgggaacacaccagagtcttcactcattttcttcataatttggttgtttggaagtctgtttgtttagctctgactttgggagtggaggtgcaacgtgtgttagtgtgagtctctgtagggtttgtaactaggaaaagaacccttcttcatggttgtagtctcagcgtgtgcctgagatccttgaaacccttcaagaagggttaacctaacagtactgagatgttttctgcatggcactgacatgtgtacacatgctatagaggcaccagcagataaaacatacctgttagagcatagatcagtgcattgacaccagctgcagtgtagtcaccatagtgtgcatgtgtgtgtgtgtgcacacccacacgtgtatgtcttccattcacagaaaaaggtcaatttgagttacttatgtttttaatttttatacttttctgtagaaaaccagtacatctctggagtgcttgtagagtctacattatatgtgcatggacgtctcacgtaacacctttttaaaattataaattcataattgtatacaaaaagtaaatataaacccgtatgtaacacacggatgaaaaccagtctgattgccaggcctggcagtagacatttgtgccattagctactggagaagctaatgaagtcccatttgggctaccaaacatcttcaaggctagtatggctaacttgggagatcctggctcagaattttaaaatatttcaagaaggattgggaatataaaattcagcagtagagcccttacctagcatgtgtgagggtctctgtttaatcctcaggattgaaaacaggaaaaaaagaaagaaagagaaaagaagaaagagagagccaagctgaaaatatcgtcagattgcagatacaagtagtgagggcaccttgctgggttcctggtatagagactaggaacttgacctcatggtatagttagtttattgctaactatttcttccctctaacttaacagttctcagcctataggtcttgagccctttgagggttgaacaaccttttgacaggggtcaactaagaccatcagaaagcacaggtatttacattaagatttctaagcaattttgaagtagcaacaaaaataattttatggttggggttcaccacaacatgaggtcccagcattaggaaggttaagaaccattggtctaaatgaacaccttgccaagtgctgcctgatgctattgtattaggtaagttgcaggcttaggaagaaaacgtggtacaggttttcaaatcctaaaatgaagctaaaaatcttctattttgttctgactgggtctgcatatatctcttcatgtagaaattttaacttggtattgtcagaactagttctatatatagataaccaggtaggctatgttgacactaaatatggtcttattgttacaattactattgttagggaaaagtgaaggcaaggtgtgtgtgtgtgtgtgtgtgtgtgtgtgtgttatttgggggtaggnnnnnnnnnnnnnnnnnnnnnnnnnnnnnnnnnnnnnnnnnnnnnnnnnnnnnnnnnnnnnnnnnnnnnnnnnnnnnnnnnnnnnnnnnnnnnnnnnnnnnnnnnnnnnnnnnnnnnnnnnnnnnnnnnnnnnnnnnnnnnnnnnnnnnnnnnnnnnnnnnnnnnnnnnnnnnnnnnnnnnnnnnnnnnnnnnnnnnnnnnnnnnnnnnnnnnnnnnnnnnnnnnnnnnnnnnnnnnnnnnnnnnnnnnnnnnnnnnnnnnnnnnnnnnnnnnnnnnnnnnnnnnnnnnnnnnnnnnnnnnnnnnnnnnnnnnnnnnnnnnnnnnnnnnnnnnnnnnnnnnnnnnnnnnnnnnnnnnnnnnnnnnnnnnnnnnnnnnnnnnnnnnnnnnnnnnnnnnnnnnnnnnnnnnnnnnnnnnnnnnnnnnnnnnnnnnnnnnnnnnnnnnnnnnnnnnnnnnnnnnnnnnnnnnnnnnnnnaattgtgcctacaaaccacatttcaaaaagatagccatcttaaaatttaaaacaattcattttatttcaggtgaaaaaaaaaaaataaaagataacatctttctctgtagtcttagttgacctgaattcaacaggttgcttaagttgacctcagattcctggtggtcttgctgccttttagggttaggatcacaagcatgagacactgcacctgcctttccaaggtttgaaaatacacttttagttgaagtgaatcagagcactaagtgtagagtctcccagatgctcagaaacaagcagcccatgttagtcactgctcctgtcaggtgcatgcacagcgtattgctaacatccctgtggccttttgtgcctcctacccctttcctggtcctgctgcgctaaccattgccctaatggtgtcaccacaagcaagagcagctgaaagttgtggaagtagatttgagaggctctgtagttaacacagagttaaaactcagaagcaatgacaaaatgataccttttgaattctggtttcttagatttgcctggaatagaaagtagagacacaaaacattcaattaaaagcatactggaaattttcttcatgataaataataagctaataaccctgttgccaagaaatggtcaaactttgctgcactaacaatatactttaattgacctgttgaaaaacagactcagctttgttacattttccattgttttaaaattttgtttcagtgatctttgtctattcttaattattcccttcctttcgtctaactttgggcttaaattgttcttttttttttttttctcatcccgaggtgcgatgttggaggtcttccttttatctttatgtaagcactgactattataaactccccttgcttcctctgtgtttgattgacttgtataactaacaaagactttataacaaattacaaaaatatttttaaatcatataaatttgaacaagtcaaaaatttttaaggttttataannnnnnnnnnnnnnnnnnnnnnnnnnnnnnnnnnnnnnnnnnnnnntggacgtagaatgaggtctgttttagagaaggttccagggccttttgatgtatattgagtatctgttggattgaactctatatgtcagaagtcatttaatgtacagtgtggttttgtggggttttattttgttttgtttgtttggtttggtttggtttggtttgatttggtttggttttggtttctcaagacaggtttctctgtgtagccctggctgtcctgaaactccctttatagatgaggctggtctcagtctcagagctatgcgtgcctctgcacacacacatatatatctgtagtacttagagcggtactttgtcagtagcaaatgctttaaggttttgcttgataatatttttatttatttaactaatttgctttttataatgtcctgtcactgtgtggccttctccctgcctctgtctatacaccaccactcctgtattatcagttgttgttattaccagtatttttctcattccaatgattacatatattgggagggttgtcaagcttttaatccccagtcatgaaatattccaaataggcaagctcgtattttaggtgccagctagattctggtagaattgtctaagtatgatgtaaatgaaaatgtgcaaaacggttcttactcatttcatcttccagcatcaaagggtggcatccttatttgtgttgatggttttacagatctcctacgcttgaactctgtgcacttgtctttcagttccttgcttcctccatagtcagttaccgtcacgggggggggggtagcattaagtctgtgtttcagttcatgacctcctaaccacagcaggggctttctagcgtcgttattttactgtcctgaatcgtgtatgctataaggtttaaattctttgctcattgttaaaggttaaattctttaactttgtacgctgtccacccagattgtattcatcttaagtaactagagtgtggaggcaggtggatggatccttagcctcttacgtgtggacagggtcatggctgtcagcaggacttctttgtgtctgagggtagctttcctaatgtcactttattgttttctctaataggccaatgttctgaaaaaagctctagatgggaatggcctgccttacaatgacagaaatggaggcaacctccacatctcctgtacatcagaatggtgatattcctggaagtgctaattctgtgaagcagatagagccagtccttcaagtgtatctgtaccattctcttgggcaagctgaaggagagtatctgaagtttccaagtggagagtatgttgcagaagaaatttgtgtggctgcttctaaagcttgtggtaggtattaaaactcactgctttccttatttatagttattattttactcacttataggttattatgctactctaatgtaatgtacatgtataacttattatggctattagccatgtttttacatgcataacaaatgacaacattaaggtagaatttaaagtgattgacatagagttgacattaaaacagattgaagcctgtaaatgtttgctgagaccgcagtaggtgacgaaagactcttgccatgggacatctcatgagtcagtcttttcttcaggtgatacagggtttgctatgtagcccaagctggtctggaactgactgtgtagcccaggttggccttgagcttgtgttagcctgttgtctcaggctctcagattctgagattcaggtctgagctatcatctctagtttcataaggagatcttagaactgcatctttagcacagtgtggaaggaatgtgtacttgggtaaaattcttatttatttacctttagtttgtgtatatgtgcattttgcctgcatgtatgtgtgtatgtgcgccactagtatccctggtgtctgtcaaggccagaataaggtgtgagatacagatggttgtgagctgccaccaaggtcttcaccaagaacgttcagtactgttaattgctgacctatctttccagctcctgggtaaaattcctgacttaaatattttacagttataagcaacagatctttttttttaactcctgaagttctttatcaacccagtatatacatttctctccattcattcattcatttgtttgtttatttttgtgtgtgtataccttgaaatcttgaaacttctgaggaaacagttgtagactgttcagtatcattgataatttattatttataaggttcacgatatgaatgaaagggcataagcatctaaaatgtaaccatcaccctattctatttcgtctatagcatttacatttagaaactagtgaatgaagatatgtagcagagcccattcatgcttcggtaatgttatagatatagctccattaagtgcaaggagactgggaacagtggaacactgaggaagaaagaagtttgtaggaagtatttaggtataaaactagattgcataggacaccccaaggactaacccttttgtcttggtctttgatgaaccctgtttctaacaacacacagttaaagggaagttaacaggctgttttgtactttctgcatggcttgttttagggggataggttgattccctttttcatgtttatccatccacccacccacaaaagctactaatatggctgatctttaaagataagcacatagagctggagaggtgggtggctcaggttagagagcttactgctcctgtgagggctctgggttcccaggaatccagtgccctcttctgtcccccgagagcaccaggcacatgtggagctgtgtaaacagataggaaggtaaaacactcacacacacgctttatttttatctaaaaagtattatttaataaaagactgcataataaaataattaaaatgtgtacgtattttatgaaaatatattttagctgggtataatggcacacacctttaatcctagcacttgggcagcagaagcagttggatctctgagtttttgttaatataaagtacttatacatatactttatttatataaaccatacacatattttcacttaatatatacatatgtgtatgtatatatgctttaagtccaagaaaaccttactttcttctgttgaaatgcggtgtagttacgtgttcattttccagtgccgttgccatactgcttggctcactgtggcttgctggtaagttactttttattatttgcagtgtgctcctaaggctgaactgcctctctagccctgaagcaagttctgtagacaggaagtagaagttgttaaactctactgttgttttataagattgtttgacaattttagtgcctttggtttcttcccatgaattttgtgattattctgtcacttctacataaagaagagcggagatttctgtagtgcttgcatcacattgatgtttttttatgttacaattctattttagaaaatcaaatgatctagttatctaatttagttttttttaaaaaattatacaatatattttaatcatatccttttccctcctcacaacccagcttcacatttttctctgtgctgggattttgtctagtttgagcctgtgtgggtctgtgtttctgtgtgcatcagccctgttgtgtctggaaaacactattatccttggaaatatctacgacatttggctcttaaagtatttctacctcttcttttcaaagatgcctgagcctgggaagagagatgagagagacataccatttagggtggttgctcgaaagtctctcgggtgttagtcattggtcagttgtagtctttggcatttaacagaaacaagcagggatgctgggtggttgggagcagtccaggctatgccctctacagtgttacggctgtgtgtgggattcttagctgcagtccaggctatgccctctacagtgttacggctgtgtgtgggattcttagctgcatatgtgctgcagtccttgtgtactcatagcaagtcagtctttcttagttctcagcaacaactagagtttgttcccaggcaggcctaggtattgggactcctcagcccttaacagtggtcagtgttacacctttgaggctcggggtatctgagaccctttcctaaaggcctggcaggtctctagaaggctcccataagccagaagtttctcttttctggctctttacagaccttgtatgttcatgagcttcagggtctagtctctctgtaccttggtctcctttaccgtgtttgagcacatgagtgcttctgctgctgcttctggcgtcacacatttggttccttcccgtgttgatttttacagctgaacccatcaactgctaagctgttgccattgctgctgctgctcttaccggatgctttttcctgttaccagctcaaccccagcattcaaagtaggcaataaagggccattgaagaggaatatttcatttgggcctaatgttaaaatataggggaaacagaacaggatgttgtctcttagctggctgggtaagagtgtttgaaccaagcacagcaaacctcacatgtgaaggaaggcttgtcctttcaccggtctcagcctgtcctgttagtgccagtcacagtagtcctttgtcaggcagccaagggaagtgttttgctctggcctgaggtaatgtttgcatgatcgtctccagtttgccgaggcttattatagtaaaagtctagtacagcctttgaaatagtgctgcctgagactcttccagagctggaccaagcagttgtatagttctcctcaggagtccgcagagtgctcagaatggccagtgttggcatgagggtagtccagggggctgtttgtcccgcttttttttttttttaaaggcagctggggcaggaagagaaagtctgaccggctgccagtagggagtccaattgccctattctccagtatctgcttatttacgggaaagtgagcatgagaaggaggaggaggaggaggagggtttatagtaagtacccaaaggccttatcattggcacagctagtgagtttaagattgcatacctgtccttagttcctcagaggtgggtgtgcctctctcacctctcttgatacgttccattctaatgtatttgtgaaattaaaatttttcttttaatgttctcttattatattgtagccagagaagataactttggatggttttaaccttaaagatttttttttttgacattggttttgagatgtatgaacctggagtatattttacattctgccctatgggggcaaagttttttttatatgttagtaatatctagttgatttgtcctgctcaggttttgtctttattgagaatagtatgttgaattctccaataagtattgttgaattgtctatttttcccctttacatctgagtttttggttcatagtgtgttgataattgttctgtctttggttgttaattttttttgttagtttttttgaaacggggtttttctgtgtagccctggctgtcctggaactcactctgtagaccaggctggcctcaaactcagaaatctgtctgcctctgcctcccaagtgctgggattaaaggcgtgcaccaccactgcccggcttggttgttaatttttaaccttgttaattttacatcgttaatttttcactttaaatcttattttcttatattagtataaccatgctggcttttgttttgttatttttgtagaattttttctatctttctcctcctttcaacaacctatttgcatcttcatattttaattgagtctcttaaggacatcatgtagttaagccatgtatttttgtccatataaggaatctctaattttaatggaatagctgtatgaatttgcatttgaaatagtgatagcgaatattaattcctagtatttaattctttactatatactgtatctttctttttaaattaattttttttcttattcactttacatccagctcactgcctgcctcctaatcacccctcccacaatccttcctccatccccccacttctcctctgagcaggtgggacccccccacccccaggtatcttccaccctttggggccagcaatcctttctcctattcttccataagaatccgccagctgcattcactgtttggctgtgggtgtctgcatctgtctgagtcagctactgggcagagcctctcagaggacagccgtgctaggctcctgtctgcaagcattacagagtatcattaatagtttcagggattggtgcttgctcatggggtgagtctctagttggaccagttattggttggccattccctcagtctctgtttccctcccctatccctgcaattctttagccttttttgtgtttaattttttggtggtatatgtcttagttagggtttcattgttgtgaagagacactgtgaccatggcaactctaaaaaaggaaaccatttaactgggctggcttaaagtttcagaggtctagtctattatcatcatggtaggaagcatggcattgtgcaggcagacctggtgctggaagggccaagggttccactgtatcactgggtgtggcttgagcatatatgagacctcaaagtccacctccacaggacacagttcttctaacaaggttacacctactccagtaaggccacacctcctaatagtgccactccctatgagccaagcatctgaacatgtgagtgtatgggactattcctactcacaccatcacagtatataatttgagtctcacttttgacgtatttttagttttattcgaagttctaaaggttagagttaaccctgtacatgtattattttctttagaagtactgacagagtctacctaagccagtggctttattcctgttgtttgctgaactcgataacactcccactgtcgcaggctttcttcttctgaagcttatgtgctgctttgtcactatgttatggctcctcacacaggaggaagtgccaggtggacgtgtttaaatattttatacacacaaggtcctcaaattagatactgctttttccaaagctaccctagtttgtctttctaacgaaattgtaacaactgtagttcacaggacagctcactagtaggaatcttgctgtttttgctgaaatgaatggcttaaagtgctgttgtgttcgattcgtttgcacttccttcaacactcggtattgcatgcctgttgtgtggatttgctttacaagaaataatatttcattctgtagcattagtaactcttaatcttcatttttttaattataaaatacttcagttaatattttatataagtataaagtacaaaccagggtacctaggatttaaattttatcattttgccattttgatttctatagtgttattttgatatattacattaatagaatttactaattttctaatttagctctctctgcaattctttgataaatgaacaatggactttgttgttttttttttttttttaagaaacatttatggattgggtttgttagtacttagtttaagattcttatattttgataaatagaaatttgtgttaaaacaaaatgtcttttgtgttttggttatgctttcatgtaacttctgaacctggttattttcattcgttccggattttccttttattctcttcaacctttattttccatttaaaaaaatgtaggtagattctatgtcttatgtaatgtagttttatttagttttttatttcaaaatattttttaaagttatatttttctgaaaattgtctatctttttaaatatattggtgcaatgctcttctagcactttgtcttttaatttgcttttaattcagcttgcatctatttttattccttgttagatatgacaatgactgttaattttgttaattattaaaaaaaatcaacatcatcgattagttttgtttactctgcactattaactttcacttttaaaactctttgtgtgggctggagagatggctcagtggttaagagcactgactattcttccagacatcttgagttcaattctcagcagccatacggttgctcacaaccatctgtaaagggatctgatgccctcttctggtgtgtctgaagacagctacagtgtgctcatatacatacaataataaaaagtcttaaaactctttgcgtnnnnnnnnnnnnnnnnnnnntacggatatgcacatgtatgcagatgcctgcaaaggccagaagaaggtatcacattctcttagagctggagttacaagctgttgtggacagcttgaaatggggactaacaattgtactctagtcctctgaaagaacaatgagtgtccctactgctgagcgctctccagactcttcctctaactttactgttttcttcttttggctttctgccattgttcttttgttttctgatgtactgatacccaggtgattctgttattgtctgatgtaaatgggttactacatataatttttcctatgagtacatttaaatttcattaataatttttcctttgacatgagatatttataaatacttgcagttgaatttgtcgcagatctttctttgacctatgaggcatattgaagtatttgtaaatacataaggaataaagggtacctttaaaaagctgctactgaataacatttataatttataaattactacaaacctacagagagttgaattgagtttcaaattataatttaaatcctatcagtttatcccatttatgtataaagtggaaataaatgaatatattgttataataaaaatattctcatgaaatataggcttcaatataggatttatttttatgtactcaattctgatttaattgaaatgctagaaaaggtggtgtgtgaagacttgttttgagtcccaggggattatttggtgcgttcatgtacatatatggatgtgtgtggatggtttaaaatatacttgaaaaataatatatactattatattgctatgttctatgtacttttttagaccattgcccttcaacctttacaaatatcttttatatttattttatgtgtgtgactgttttgcctgcatgtatgtatgtgtatcacatgcatgcctggtgctcaaggagatcagaagagggcattggattccttggaactagagtgaaagatagttgtaagctgctgtgtaggtgtgtacatgtgcatgcctgaggaggccagagtcatcagtcagttcctgcctgatagatagagttagaggtggctgtgagctgcacagggtggatgctgtcagctgtcttaggtcctttgcaagcgcactatgaatcttaactgacgagctagctctgcagccctcctttaacattttatgtgtttcttaacatatctgccccctagtgttttttctttctctcgtacttgaaattgaacctgacagctcacaccccccagacatgcactccacactgagctctgtccttacttctgcgaagtgcctgaaaaagatgctgatgcggtgctacactcttgtaatcctagcagttgagacacggaggctgccctgtcagagcttaatgtcagcttcatttgcataaggggtttgaggtcagcttggactacataagaccctattacaaaaaggggaaaggatggaaaaagtatttgggggcagagagatagctcagttgtcatttaacctgtaaggggctagtgagatggctcagtgggcctttacattttttttttaaatggtgcatcaaatataattattagtatagtgtgtaaaatttctcattttaatatgaaaagttttcattcttataaaagtatccagtggcttgttattatctcagtgatttgataattagtatcaattaaaatatacacatgtatacttgtgcatactcatacaagatagtttttccctcagggtttaagagttacttggaaactctctttagaagacagttaaaagctggataaactgtacttttatcttcatgtaagaatgccagtattattttttacaatatatagagaggagtatttgattaaaacttagttttagggagtgttttcccacggtatttcacctgcgactggagtttctgctgactgttagagctgtcaccagggctcccagattgtgttatgtaaatgttctgccctttgcatctgcagtcagttccttatgactcaccggctaggtatcacgtcacgcagattgtgcatgttatgtaaatgctctgctagctagctataatcagtcccttttatgcttcctttctaggtattacgcctgtgtatcataatatgtttgcgttaatgagtgaaaccgaaaggatctggtacccacccaatcatgtcttccacatagacgagtcaaccaggcatgacatactctacaggataaggtacttcctgacgccaagtgactcgcgtattagcaaaagataaagccagagaaactgttggctctgtaaggtgatagctacgatgttttgttctgttggaatgccacttcatgacttttgattataattaagaattttaaaaaaagaacaggtgaaaatagcctgcaatcagtccttagtgtctggaatattgccagtttcccaggagatgtgatgtgtgtgcaataaaaagcaatcttaacaattttttttttacaaataaaattttaaagttgaaagtttttgtttataagttaatgtatttagctatatatggcaatgtgaaaaatattaatattcagaaaataaaaatccagattttttttctgtataaaggaatagcaaataattttggttttacagatagctgtaaatttccaagcacttacatgttatttaattttcttatgacttaatgaaacattcagaattccctgtaatatataaagaatctgatgtgacgtattactcatagttgttcatgctcttaccgcttggaaaagtttgaactcagacctagctttcttcataaactgccttctcaccagcttgcttttacctcattgtagagataatatgtgtagtatttactgtcattatttgatggtctgtcttattgatttttatttgttgagacaggtacaacagacttcctctgacctcactgactagcggggactgaccttgaacctgcctcttaacccccagtcattctgagatcacaggcgtggccaccacacccagttggttttgctgaaatcaaacccagggtgttaaatgtgctaggcagagtggtgacattattagtacttaatgcgttcttagtaaattttcatatttcattacttattttcttctccttggtctgtataaaatatgtagatgcatgtgtttgggttttctgcttttaaggtaaaacaatgttagtaaaagagttcagggtctaagtggtgaacataggaaaggcaggggaatgagctggaggaatggcttggaggtttaaaagccctggctaccctttctagaggacccaggttccattcctagtacctacatggcagctcacaaatgttccagggggggtctaatgccctcttctggcctaaacacaaaatacatatgcatatttattttagaagaaaacaaaagtaatggcctttttacataaagtagccagttgtaacaaaataatgaagctttcataaaataattttatagctttaactatttggggataatctaaataagtaaaaaataagaaacaatgtgggtgtgggtgtcagagtttgccttttttttttttttttttttttttttttttttttttttttttgagacagggtttttctgtatagccctggctgtcctggaactcactttgtagaccaggctggcctcgaactcagaaattcgcctgcctctgcctcccgagtgctaggattaaaggcgtgtgccaccaccgcccagctcagagtttcctttttagcattataataaacatgaccaaaagcaacctggggtaggaaagggtttatttcatcctacagtttacaatccatcctgaagggaagatggagcagaaactcaaaggaggaactcctagagtcaggaactgatgtagagaccatgaagaaaccagcttacctctcctgtcttgctcagataactttttattttattttttattattttttctttctttactatatgtaagtacactgtagctgtcttcagtcactccagaagagggcatcagattttgttagggatggttgtgagccaccatgtggttgctgggatttgaactcaggaccttcggaagagcagttggcgctcttaaccactgagccatctcaccagccccagataaaattttaatacaacctagactcacctatccaaaggtggtagcatacacagtgggctagacccttccatattgatcactaatcagaaattacttgactacagaccagtcttacggaggcaatttataattgacatttccattcacaacataatggtagcttgtgtcaattggaaaaaaaaaacaaaatcttaaccagaacaatgaataaattagagacctacttggaaaatgaaaatataactaagtatccatggtacattgagcctttttggatatcagatttcatgtatgttcaaggcgaaggacttgagtaaaaacttctccaaagaaatgtttggcatgcaaatagctaataggcatttgaaaagatacccaacatcattagtcctgtgagaggcataaatcagatgtgctagaggttaacaaccaatccactaggatggcaaaagtagacaggcaacaatgttgaaaattatttgtactaattagaatgctcacacactgtcagtgagaataggaaatggtaatggcacttttggaaaagattggccatttctcccaaagataaatacagtgttgccaacatgaatctacaaaaacattcttcacagagtgttattcacgttagcataagaacagaaacaactcatcatttaaagtaatgaatgaatgaataagatatgcacatcatacagtcctgtgctaattcattaggaataaagtacatgccacagtgttgataaaacttgcagtgtactaactaaatgtgatcacataaaaagacaacataccacagccattcttttgagtataaagtgagtagaatagaacttgtgaaggttgtagcttgtagctagaggttaacagggtgacttgagtttgattgctaatacctatggagacagaataaaaatgtgaaatcaaattgtggtgatattggtaccacattgaatactacagaccacacagcactttaacgtgcagactgtatgtagataaattacatctcaaagcttttagtttcaaaagtgagtgtacttaatttttctttgaacggtacattttagtgttcattttcttaaaaggaggaattatttgtgtgcacagtagatttcacttttcgatgccttactagtgttgctggacttaagatttttgctgacttttatatctacctcacttcagtttcccttgattgcttctcttctccatcctattacttattactccaaggtgggctgtgtgctttgagtttagagttacttacgttccacctgctgctgctcttgcttgatgctgtgtttgtttgttgtttatggaaacaaagtattattctaggtagcccaggatagtctcaaactcagcttctcttgctccagctccctgggttttggggttacagatgtgctccaggatgctacactctgtttcttgtgttttctgctgacattataatcatgttatcatgcacaaagccttttgtttcacaacctgcattcagcactgctctctgtgttttatagcacagccctggtaacttttagtgtgctgagggtggctgaacttagtgctctgtgcttgaactctggaggctgatagactgtctcgttgtcttacaggttctacttccctcattggtactgtagtggcagcagcagaacctacagatacggagtgtcccgtggggctgaagctcctctgcttgatgactttgtcatgtcttacctttttgctcaggtataattataatatagttaacattaatcctctttatgtgtgtattaaaccagaaatttcttcctatttagtatgcatcttaagtagagtaactttcacgtgggaaaatgcagctctccctgaggcaccaggtatgaagagataagggggtagtctgtgtgataatcggtttccatctcatgatttacagatgtattttataacgattccatgaattgacccttccaaagtcactttttttttcttttaaaatctaagtcattttaaggattttttttttaaggtagcataaatttaacagcagaattcatgtggccattgggtggtaaaattctatagagtttttaataaataaattttggatactttcgtgtttacatggtaggcagtaaaatgtaacaagattcctctacaacaaacagagtgagctgtgatagttggtaggcccctcaagggaggctggccacgtttgatgcttagagtgggagctgtgttcagctatttgtccactagtactataatgatacacttctgtagtgttatttgaacacctcgtaatgcattcttttctattatctttaacttaacagtaattgaaatattttctttttaaactattttgttttcatgggctactacttttaactgtcctatcagggaaaaaaacatggtgagacaaatttattgaaaaatgaaacaaaaaaacccaaaaatgaaacaaagtgaaaaacaaaacaaaaacttctattgcatcattatgagtgtctagccatacaagaatactttctgcctggtcccaggcaagctacccctgccagtctttctgaggtgcctgtgctctctctttgcctcattccttctatgtctttgctctgctttgcacctgtcccaatgccttcatcattaaagaaaattaggtttcaaattttgcgtgaaaccttttaattatgccaattgtatacgatttcaacactctctaggttcctaaagtgtctgctgcgtggtacttcacgttctattagctgacatagtagtgatctgcttctgtgtttagcttccaagaaaacaagtctggtctttctgatggattaagaccaccttctatgtttctttatagaccacacaaactctagtacaatgccttcaatatgaagtccgtgtacatttgattaattaacatttattttggtttaggcatttttaaaatgattttaagataaagctttacggctgggcagtggtggtgcattcctttaatcccagcagttcggaggcagaggcaagtggatctctgtgagttctagcctgtgtagctagcctggtctacagagcaagtttgaggacagtcaggactacacagagaaaccctgtctggaaaaacaaacaaaacaaaaaaaagaaaaaagaaagaaaagagaaagaaagataggctatgaacccaatttaaatcagtttctatttgtatatgaaccttggttaattctttgtggtataattctttgtggtataatgataaaagcagaacttggtttattacttttaaatgcgtattttaggagctaacttatagcatataacataaatgtgatagtaaaacctgagccatggccttatcgtttctgtttttcagtggcggcatgattttgttcacggatggataaaagtacctgtgactcatgaaactcaggaagagtgtcttgggatggcggtgttagacatgatgagaatagctaaggagaaagaccagactccactggctgtctataactctgtcaggtaatttcctctcacaaagcattacatactttgtatcgtttgcttgtatttcctgtgtttgctcacacatttgattttataataaaaatggaggggttatggagatggcccagtgggtgaagtacttactgcactgtggttcatatccctgaaccacataaataccgggatgacactgtacacctgtaactgtaggtgggtaggtcaaggcagacagctctcagggtgtggctgaccaccgttcgacacagtcaacacagtgagacgggtccaggctccgtaagagactgcctcataaaataaggtcgagggggctagagaggtgcttgctacaccggcttgctggcctgagtttgatccgtgaagcccacaggaaggtagaaggagagcactgacctaagagatttatctctgacctccaggcaagtgctgtggcagtgtgcccccaaacatgtcatgggcatacccacaataatataaagtaaaactttaaaatagggtctgtactgggggagcactggctgacttcccaggcttggggattctccgcacccacatagtagctcggtcaattggaaccccagtccaattaggtgggaagtgataaagacaccaccttgactctgacccccttgaggttgcatagcacatacaccagcatgtacatgcgtgctccccacatagaccgctcagaaactaaaacagttaggggcaaactttcctactacagcgcatactctggaagagattgagttttcaggctctataacatcacaggtgttcattatttgctttatgtgttctgaaaagactcagtaagttcagaataatggaaaaatactttaaggcatagtatttcatgcctagttcttatattgtgcacatgatctgaagcgatagttttcaagtcatggttcataacttaggcatattagacttctatctggcaaatgacccagaagatttgaatatataattattttcttgattcttttaaccctctcatggaatgaggctataaacctgtatacaagctttttttaaaaaatcacctttctgccttttattagtgtttcttaactgtacaaagtaatggtttccttttattttcgtacatgaatatccacctcaccactgtccaaataatccccattctattagtggaaattttggaattttggtgtctttaaaaaacagaatatgataagaatatttttattttaatccccatcaaaggatatggggatgcttcagattgtccacagcagttaactaagattcgcctcatgctctggaagaggtgtgattttgccacctgcagatagtttctgcaattgcgtgatgtttggaattctggggactttttagaaggtgtataagaatgtgtattagagggccctaagaagcggggtgagttgttggttggtagttggtttattgttggctgtgattcgttaagtactcatgtgcagagaagaaaaagaaattagataaagatatctaattgatggtggagatcaaacttgaaccaaggaactggacatccttagtcagcaggaagtagggtaacgataacatcgccaccttcccaacccctgacttcattcaggttctttcctctctcccctctctctttcctttctctcttatctagtggtagggcactgaaagggtggaaaaaagaacgcccaagtagcacagaacaggtacaattctactttgtggtttttttcagaaactctggactccacctatgagaggaaatatttagtagttttttgtttcttttactttaaaaattgataattattaactagtcataagggtttttgtatacatgcaactgacatatcacaatgtatacataattaaaaccattaaactttttaagtacattcacaacattgtataaagagggttacacacaatcttcaaaacatttctttcttcctaaaagaaaccccatgtacatttgtgtttcagccctagtcttcctttccccagactctggcaaccattcatctatctctgtctttctggatttgcttattttggtctttttatataaatcgaaccatacatggagtggcattttcctgagtctgacttcttctgatgttttctctaagtttttaaagttttttcattatcaatgcaagtgtatgacagtgtgggtttgtgcatgtcatgtggaggtcagaggacagctctcagggatcatttctcttccttcattgtgagcgctggtgatgtaactcaggtgtggcttgcttttactgagacctcttgccaaccttagcacagtgttcttcaggttcaaaggtacaatagcctatatcagctatttcattctttttattgacaaccagttccattttatgttatgtttttgaggcaaggttttctgcatagctgtgactaacatagaatgctgtgtaagccagggtggtcgagtgcacagcggtgggcctgcctttgacacacttgaggtaggattaaaggcatgtgccactgtgccctgcatgttatttctctctttgagtcctcgtaggggtagcggtgtctaagtgtgggttgggtttcattttcccagtgactgctgctgattagtagcttttaaaaagcttattgaccaaatgcatatcttctttgaagattgttcatttaaattcttggtcatttttaaagtgagtaatttatattcactttaaatttatttaaataaataaatgcatttatattgtgtttaattttttttatattctagatacaagataagtaaatctctagatataagttaccacatttaaagaacttaaaatgctttttcataatttgtgaattattatcttttaaatttcttgattgaattatttgtggaactcaagtgaggagatgtaaaattagaggtgaaatgaataaagtgttagctgatcacaaactaggccatggtagtgcctcctccaggacatgtggtggttgggttactatgagaaaaatgagcgagcgagcgagagagagagagagagagagagagagagagattgattgattgatttagagagaaagtcaaaggctgtaaggaaagataaaacaaaaggtcaacgaggtttccagggcttgcagaaatgggtgaattgtgctatgtctcatttattcctacttagcatgggtaaactgacttgcctgtgacgggtgtgggtttagagcatagtgatcggggatggagaaaagcaagcgagagagagagaacctagagaaaaagacagtggataagatggtccacatcgagtcttgaggaattacacagtatttactcacaaagcacaaatcccactaatccaaaatggagatggaaaaggaatgcacaaggagatgcagagactttcaaggagagagagatactggtgttgaatgctgctgaaagtgtctaaggaaaacagaaggcacgtttagtaaggagagaggctttcctgacagtagcaggaacccttcccttccctctgtactctgtagctgctgggaacatgaatcaaggcaagcttaaatttaatatgggaaggacgttagtatttaaacatgtgggtagaagagagataatacatagaataaggttgagaggctctctctctaggcgctctctctctctctctctctctctctctctgtgttataggaagggagaggtatgagtgggtgatacatgtgaaagaattagcttttatctgtcaggtttatacctcatttattgcattgttgggaaggagaagacaatgagcatggatgtgtatagatttgttagcagaaatcttaaagaattcccagttagaggacctctcaccccagcaggcatacacagtctgcatgaagccatnnnnnnnnnnnnnnnnnnnngcatacacagtctgcatgaagccataaaagcatttgttgagaaagaacacgaggaagactatggctgaggtttgaaacagaagaccatttggtttagaatagctgtggaacagagaagtggagtaaaacagtatgcttgatggagctattggaaactggtaattatcaacctagaacataacccagctgtcctctaatgtagctttcgttagcaattgtggctacttgacctcacagctttgagagccacaagaggccttgtgggaagtaggaaaggtataagctatgaagctttggtaataataccagacaattccaaaaaatagggaaaaattctgatttttaaaatctttgcttatatttatggtatatctataatattgttatgtcctgatgtcactgaatgtagattgaggagctctggccgtgcctcaccactcacatttgaaggcatagacattggtaaacccacatggaagtttaaaaataattaaattatgacttttgactgtctattgactacatatttaatgacatttgattataaaatacataactggaattttagtgactttttagcagtcagctaagagtcttttaaaatgatgagtacttcatctaggacaggccttgaatttcattggtggaaaataaataggcccagaatggtgtaggtgatgctgtgaagtggcgcccacaatattctcagaacagaggctggaacccctatttcacctctggaataaatactggaccactttcctctcataagagctagccagttgccgggcggtggtggcgcacgcctttaatcccagcacttgggaggcagagacaggcggatttctgagttcgaggccagcatggtctacagagtgagttccaggacagccagggctatacagagaaactctgtctcaaaaaaacaaaaaaacaaaaacaaacacacaaaacaaaacaaaaaaagaactagcccgttgagagatggatgttcggagtaaaagttagcatgcagatttaatgtagatgtgctttagaaacacagctaggttctagaggccattgtacatagaaataaatatacagaagaattgcaaaatttttaaaaggaattgttttgatcagaatgaaattattaggacttattgaagctaagctcacaaaataatacaaacaataaagtgtgtttatatagcaagcagtagtgtccagccatggatgtttgcagaattcagaaaaaatttggagtatagcattataggaaatatttgtagcacagagaaataaatgcccaaacttataaatcatttcaggcatataagataattagagaaaacaagattttagagactttattattatctagacagtactcatttcactttgggaagaaaattaataggtcataaactgtgttgtcaccaagagaatgcctatcaaatgagaatgcccatcaaatgagaattttttcttgcatatatatcagatggtagttatgttgaacccgcttattgtgggaaaaggcaggaactaatctcctgaatttgtttgctgtgtacttgttgtttctagctacaagacattcttaccaaagtgcgttcgagcgaagatccaagactatcacattttaacccggaagcgaatcaggtacagatttcgcagattcattcagcaattcagtcaatgtaaagccactgccaggaacctaaaacttaagtatcttataaacctggaaaccctgcagtctgccttctacacagaacagtttgaagtaaaagaatctgcaagaggtccttcaggtgaggagatttttgcaaccattataataactggaaacggtggaattcagtggtcaagagggaaacataaggaaagtgagacactgacagaacaggtaatcctaatgatacattcttgctctttcttctttatgtagaatgcccataaaagcaaagtaaatgtggttatttgagtaaagtcttgccattctctgctggtagaagttttatttatgtaaaaatgtaactatagtttgtatcacaatgttcttaaatgttttgttaatttttgtggcaaaataattagtaatgactttcttccagtttcagagaaagattgaattctttaagtaatttaaagttaacattgtttcctttactctttaacttctgaaatttaagtacaatcataagactaattgattttgataatataattaattctattatatttgcattggaacactgaaactgttcacatgtatcattcgtatatgatttcagcaatttagtattatattaatttttaaaatagttaataattctctacttttctgacaatcattctttttaatattaactgggttaagttctgtatcacactgtcatactttaatgctctcactttttttagtatgtttttttttaagatttatttattttatatatgtaagtacactgtcactctattcagacacaccagaagagggcatctgatcccattacagatggttgtgagccaccatgtggttgctgggaattgaactcaggacctctggaagaacaagcagccagtgctcttaatcgctgagccctctctccagcccctagtgctctcattttgaagtcaatacaagaaacataaacttcgtcttcaggttcaatatttaggagaagtaatctcatccgatgcctatacattgttgtcagtgtccctttagagaactttaagtggctatcagcaccttctcaagcttcgtttgatgtcactgtgccttcctaaatgttcttgattacaggacgtacagttatattgtgatttccctgatattattgatgtcagtattaagcaagcaaaccaggaatgctcaaatgaaagtagaattgtaactgtccataaacaagatggtaaagttttggtaagtttgtattatacattagtaatgtttccattttagaaattttcagaagtacaatagagtcttagtatcaaagttacttaagtattttgattatagccgtaagtatgctctaaagagtgccagcccagcaaaccctttattgtatgcaatctgggaactagaggaaaggcaggaggatgcatccttctctgatgcgtgagtcatcacttctctgatgtccactccgctggtgttcagagtcccatgtttgtctggttttcccatgtgtatcaactggagtatctgttggccttctcttggagactgtgcaatttagaaattaatttggaatttctgtgcttgttttgtttttgtttttcacgagacagggtctcactatgtggctttggttgtcctgtaaaccagactggccttgaattcacagagatctccctcccaagtgctgggcttaaaggcatatgccattgtgcccactttaggagatatttttatatttttataatcttgaatttccttatccaagaacataattcattttctgtgtatgcagataatgtgttacattgtacaagagtattttgaaacttttaacaatcattttcaattttttggttaagtttaattcaacatagggcatttttcttgctgctataaatagggcttttttaaaaagcattcaattacattgattattttgataaatggaaaataagtactttttaagtatgtgtgcttttctattagataaagtgacacatttttgattatatgttcatatgtatatattttaataaaaaaaaatctcagcatacttccatatcctaacacatgtagtttagtctgagcagtatataaaaataaatgtttgtatttataattaatctcaacttttatgtatgtattagattctgactaactctctcagggtcattgaagtgtatagttatgaatggttagtgactaactgggaaggtgagctaagcctgtgtttgggagggtcttacatatcagatagaaggatttgttaaatcatgctagggaactaactggaagttatacaaaatatttgaacaatttagaggaaattaaccagaatagagtatagagaatttccaacattagaatttaattggttttttaattccatggttttctttttcttttctgattaggagatagaacttagctcattaaaagaagccttgtcattcgtgtcattaattgacgggtattacagactaactgcggatgcgcaccattacctctgcaaagaggtggctcccccagctgtgctcgagaacatacacagcaactgccacggcccaatatcgtgagtaatgccacatttcacaggacagttctaggagctggctggtaggttagcataaggactgtggaagtccgaattccaggcactccagtacaagactgaacatagccgatctaacagatgagacagtcaggcacatcccgagagcttcaggccagacagacagctgagtgctgctggctcagtgagagacctttcctcaaagcaacaagacagttgtaaggaagacattgacacgctgtcctggtcaccagagtacatttttcagagggaaatgttctacaaagtgtgcttaatacccatgtttctaggtcagtactgtgcaggggaactttacacagtgccgaaaaggttcactgtttggacattctaattaaatatagtctggatttatacttaattgtattttcatttctttacctttcaatacccaaggctacgaattactgttctagtttgctttctgttgctgagcagaagcaacatgaagagaaacggccttttaattggctcacagtccaggtcacagtccatcatagagggtgccagagcaggagctcaaacaagaaccgaggcagaaaccacgcaaaccctgcttcctttctcactctccttgtttatgggcagcctgcctaaggaaagcatcgtaggcagcaccctcccacatcccttaacagtcaagataatcccccagacgcggccacaggccagtctaatctgagcagtctttcagttgagactccctgtttccaggtggctcttggctgttctcagcagggcagggaccttatgaccacccagcacctttgcaggcctcctattgttgtgtaaattacatcctgctctccagtgctgcgtctttgaaatttatgcacatactaattcttttggcacataggacatttttggactggtattttccagtcactgcagatcttcggttagatttgatactgttgtaaatatagaaagatgattttgtattagtatttctgggatagaagagacatgagagattttatgggagtatattttttaaattattcaatttgtaaaaagcagaacatcaaaatgaatgaattttcctcgtggctttattgtttcgtagtgtcttaaaataatataattattccttgaattggtttgaactcactacaaaataactcgatacacttatttctcttgaaaacaaattttgtagctatatatagtagggagtgttctgaggcgtgatttttatttggttgctgtggctgtcagtcacatgtgcaagctgccattcatatgatttctccttgacttgtagaatggattttgccattagcaaactaaagaaggcgggtaaccagactggactatatgtgctacgatgcagccctaaggacttcaacaaatactttctgacctttgctgttgaggttagtaggtcacatttattaatagcaacatgttgtgtaatctgtctttctccgtcaagaagtattttatttttaatattaagaattatagttcttgagatggtaattggcatagtcatacttggcatatcttaaaatgtcataaaataaataattcataaagttaatgtaaatacataaataactataatgcctttgtttttgacgtttattttattttttgatgtttgagtattagccatgtgtcaagtggttatttcgttaagtatactcaagtctacttacaacaaccaaaaatatttaccaaatcgtttagaggaaaataagtgacaagaacatttcctgattctagaataggttactaactgcgacattcagagcaccagggacatgattgcatataagagtgcactggacactcactgttaaatgcacgtgaatttggatctcatcgaagattgtttatccatatttatctttaaaatatatgcagctacatgctctaaatcttgagaggatttgtagcaacatctagatttattttataaaaatatagaaggtaaagatgttattcaattatttcctaaaagcacctacgtagcactcagcacatgtagtgaaggaactgagtataagggcagcaggtgtatgtacctcgtcccttcaccattacataacttactcaccatgctcaaatgtttgtcaatcactgggcctaataggtgtgatgagaaattagagaatgtatgatagaaacctatgtttcaaaaatctgttggaaaacaaaaattttaaagtatacttaacatactcagttaagctttgtgattagtataggcagaaatagacaatattggaaaatatagtatttattcagaaagatgttttaaaatatagaagccatgcaattgccttgaggcattaaaagtaattttataaattgctccaggctggaggaatacagtaataaagcaggtcaaattattaagataaatgaagtagttcattgtttattacattaagacaaatgtttttaagatagaactaaacaacgtcatagtagagataattacaaagatagaatagtatagaatgcaatgcatagtctttgcttgtggagcagagtcagtcctgttagggagggcctcaccagtaaagtatgttatcactgcagtgagctaagggatggatacagtcacatcaggggtgtgtgctgatgggcagaatagaggtgggggaagcggtgaactcgcgaaggtccatatgctgcaccagcgctagacaagggacgctgttacacttgaaatcagttactgagctcttttgtaggatgtggcactgatcgaacgccttccagaggcactgcctaaggatttatagcttcatcatcgaaatattctgttggctgttttttgatagcccctttggctgaagaatctgcataattatcattgtgatttctcttcttcttataattaaacttatgtagcgagaaaatgtcattgaatataaacactgtttgattacgaagaatgagaatggagaatacaacctcagcgggactaagaggaacttcagtaaccttaaggaccttttgaattgctaccagatggaaactgtgcgctcagacagtatcatcttccagtttaccaaatgctgccccccaaagccaaaaggtagcaacaactctccagttactctagtcctagtctgcacgtagtgggcagtgatttgaaaagaagtaggcaaaaggcagggctgtgtgagagcaagttgatctttctcttgtgctttttggtacatgtagcctgagcgtgcgtgactggaagcgcctttctaaggtgttctaaagataattgcttcgaacttgtcagccatttgcttatgaaacttcctaactctactgccaaattcctgcatgttatatctttcatatatgtttttaggatttttaatgtttcttgtttttaaaatgaaattgcaagattgtaaatctctttttaaaataatttctttaaaattcccagaaaataaattctgctaagaagtgattgtaagtttgaatgtgtgtgttagctagtaagaatatttccaccagagttgaatagtaaagttcctagtataactaagcagccattgagagattctaagacacagagcacactcatgtcacttatctggagaggtcatagttttgctgtgctttgcttatatgcagacctacccacatatgaaacagatacgttgtgttttttcccccagataaatcaaaccttctcgtcttcagaacaaatggtatttctgatgttcagatctcaccaacattacagaggcataataatgtgaatcaaatggtgtttcacaaaatcaggaatgaagatttaatatttgtaagccaatcttgataattgggtggtttctttttttttttgtccctttaaagcagtgtcttttaaaatttcttagttgataattagattcatgttatagttgaaattttattataatttgcatttcaaaatttatcatttataaaattcataaatgttaggaaatatgccagtcttacagcataaattagcagaattaataatagagttatggtctcttttcagaagtttaaaaatattcctttgggaaatttaaaagctaaaataacctgtcttagttcccatgtatgcaagcgagtaaggggaattctgtggattgtctttaaggacttgaaaacaaaatagtctgtaggtgacggcttgactagtgtgtggtgtgagagggcatgtctttgtatcatagaggttagagtgagaagcattacaaagaaagggctgatcctaggtttgtccgagggcgcgacttagaagtgagatttatctcggaatagagctggaacctacaagagtgtgcatctagtgtatagagagtgaagtgtctgcctactcgcaagaggaaaaacattaatcttgtctgtttcaattgatttagtgaaaagaagaagaggagtttataagctgttgcgtgtaggctttgttagatcccttacacgatctgagaaacactaagccagtacgttgaagacggtgccatagacgcttggagaagcacatgcagagcttttggaaagcccactcgggtctaggaacatagttccagcccttgggggagaagcagacatatgaacagctttaggacatccttggctccatatggagttgagggcgattctggactatatgaggcctttcctcaaaaacaaaacaaaataaaaaacaaacaacaaccaaaaaggaaagagagaaagagagatgtttccttaactcacattttccaggattcccatagataaaccactccaaaaataagcttttaattaaaaaaattaaaacatacagggaagccacccaaaattaagtagaggtcatcaaaccaaacattaaacttaaacttctagtaattttatataattttcaagtatagaccataaaatgtaggtatctttaaagagggcttgaaaaacagcaaaatgaaaacatttaaggtgtgtaacttaaagacagaattccaggaaagaaggaatagttgtgtaaaaacctactgttgtacttgccgcttagtagacagtgtagaaagcaggttcctttcccgcccctgacctgagactgagggaattggaaagcaaccgtggtgtagctcagcgatagataggggttgtctagtgtgtacaaagttccaactttagccacagcatctcaaatgtaacagcaaaccccagaatttttaaatgaagcatattggcttatgcctgccacgcgtgtgctcaggagactgaggtagggagatagtacactggaggctggcttggggttcaatagtgaattccccagcctcagcctgagaaacagtccacacaagggagatggagaaggacagagggagagggacagagacagagagagtgggtggaactagagaggggaggaactgcagaatgcgagggcattgcttttcaggtgtgacagaagcagagagcagccggggaagttgacagttgaagtgctgtgtggtggagcagcttcaggatgcaggccttcagcagttattctgggcagattcatgataaatgctagtactcagagtggtggtggtagatggtcatctagtttatttcaggctttggtacgtccatgtatttactcacttattaatcaaagcagttctacaggacattcacattattcctcattatgtgaagagttcaaggccagcctgggccacacaggaaaaagaaagagagatgtgggagagggaggaacggggcagtgaggacagcccaagtagcagaagcacacagggattcattctgtagccttctgaagggcagctggtgagtggtcagagacaaatcgggctcctgcctccacactgtcctgcctttgtaccatatgaggaggacagcctaggaaggaccatgtgtcatcaaatttaggtaaaggctgactcgttaaggagtgcaatagttgtagccattgaaggagtcatgaaagtacagtagtcaaaacatattttattaatccttggttttaattattacttaaggaagaagagtagagaatttcgaacctcaaatttaggttcagttttaaaatatttatccttttaaaaaacatttttgtcattgaatatgtttcctattctctaattccttacttcatccatctttgttcacttcccactttcctttttttttttcttttaaagaatgaaagtcttggccaaggtacttttacaaaaatttttaaaggtgtaagaagagaagttggagattatggtcaactgcacaaaacggaagttcttttgaaagtcctagataaagcacataggaactattcagaggtgtgtacgttggttggatccttcacgtggctttttacactctgcaagtgtatgtattcataagcacattagatgcatgtgagacttcaaaattatacaattgtatgctttcattgcatatatcaattatgcataagataggtttcattatgatccatttacacacacacacacaatatatttcgagcgtttagtctgttaccttctcatgtctccctcccagtgatcctctttctcattccagctaacgtctgttctgctgtttcatctttgagtgacctggtgagctttattcgggttgcttacgtgagtgtgggtgacggttgatttacagggatatgctcgccttaccattaaagcagtgtgtctccatcccctgacaaccagtacactccttagggcgtggtagtcacgtgagctcctcctccctccacggaaggaagagtgttgagaggcctcgtcttgtgtatacatggccaggtaaacacagctgctttaagttcacgagtgcaccacccatgtgaagcccagagtgcttgttcataccacccttcctccggcgggcacacgatttctcctacagtggtccttgtagggcatatatattacttactttcccattgccgtggtaaacactgcaaccaaaagcaaattataaaggtgtttattttcacctgcaattccaaaaggataagagttcatcataacagagcaggcgtgacctggtgacaggaggaacagcagtgagaactggaagtgtgaagcaatggtagccttccaagaccatcctccatgagctccctcctctagcatcatctccccaaagcaccagcaacaaaacctaagtgtttggatacgtaaccatataggggacattgcttactcagtcacagtgggtgatctacatgtcttatttatggctggaatttgagtcacttaatctcagtacttggacaagctatcagtctctgaggtcactgctgaccactgcagaaagaagctagttaggaccaaggctgacggcaacgctggtttgtgcgcagagaccgttgtgttcggggcagtgggatggagagcccgtgctcatgtgaccgacagcagcagtagctgcactgctcaggcctacgacctccccagtcacaaactgggccagctttacggttccagacctgaattactccagcaaagcaggtctcaaatctaactaaaacgcaacctgtcaaaagacctgtcaccatcgagctgttaggggcatcctgtctggctgattgctgtgtacaggagccatagctgcgtacaggaagactgtttgtgacagttttgacctagcaactagccccgcgagggctgcagaccagggaggaagcttccagcccagttctgcatgatttatttatgtcctgtgactcagatgtgtggcatcttcagcaacaggctcttacagtctagcctggtgcacaatcagtagccatggtaattgtgtgtatcgtcttgagggcctcaggcctcactggtcaaccatgtgtaaggaggtatcccacccctggtgctaggattaccacttcccaacccatggcttctgggaacagctttatctatagtacaagatccctctgtccagactcctgtggtttttagtttagttttggttagcttacagatacctgatttacttacggattttcacacattagtttttcttgactgtcccctccccttccggcccctcctcccctccatctttcagtcttttcatttctagccttcccttctacttttaaatctatacattctgttaccccctcttgcctctcatgagctctttgcttatatttagactctatacatacatgtacattcacatgcataacaattagaaggtagggttcatacaaaagagaacatgtggtatttatttctttgagccaaactgagttacctcacttaatactggtttttttttccagttctgtctgttttctttcaaatgaaatgattttcttttctttatgactaaatgatatgtcattgtgtatatgtattttcattatccagttgtcagttaatgggccttgaggctgattccatttccttgctgttgtgaatatagcaacaatatgtatggatgtgtagggatctctatagtagggtacacagtccttcgggtttaagctcagaagcagtatagccggtcacgtggaagttctgtctttaggcgttatgtgtggagtttatgtaggtgtgtgtgctagagatcaatactgggtgtctttattcctctccaccttacttgttttagaatgtatttattctatacataatttcatgcatatataatgcacttggttagagtgctgttgagggcacccgactcgattctataaaatatctataaaatagaatattgccctcagcagcagtcgctatccagaaatgaccctcagtgagaagagagcagtcctcagactgtaaaccgtctccccacaagcactaatcactttaagaagtaaaggagcactgacagtctgtatgtgtggagcattagttgtcatgggtatgtggaaggaaaaaggaaaacccaccctggactcctgggtggcgctgggggaggaggaacttaaaatgggaatggagagtgaagaggagcggagagcacttctggcaaagggcagactgcaggagagtgctaaagtgatgacgaaagggtctgtgtcccaggaggctgagtgtgcatctgcacagcaaagcagaccagcttctttgagagaaaaagagtaaaagaaaggagtgaggaaaaatattcctgcagagcagggacaagctggcctgctgatgatattgggtattaaacaaagatggttagcagagaaaggcctggatgggaatacacagagtggaaactgactggccaggcacttcatccccttttcagctcctgtcaaaattgtgccttcttttttttagaggagcatcgatgactacatgatgaggagactacagaacatttgagaattttattttttctataaattttatccttagggtttatttagttatttctttttaatttctttattttttactttatgtcatggttgttttgcatgtatgtatgtctgtgtaccatatacgtgcatagtgtctgtggaagtcagaagagggtataggatcctttgaaactagagttacaaagcagtggttaatggccctgtgggtgccaggagccatctttccagcctaaaattagtagaatttttaaaataacattaatgcattacttgctttcagtgttgtgttataggtatagttaaatctttacttatactgaggctactccctttaaatgtagctacttgagccttacagactctccacggtctcatctacggaagaataagcttggagagcaccaaactaaaaattccccattgtccagccgagagtaggacacacgctggttctcttaagtcaggggtatctttctgagttctgtacttacagactctttggacagacattccttcacgtttcttgtctccctttgccccctctagtctttcttcgaagcagcaagcatgatgagtcagctttctcacaagcatttggttttgaattatggtgtctgtgtctgtggagaggagagtaagtaaagccagctgcttgtctttgtcaatgtcatagcctgtctcagaatccttctcatttagggctacaataggtgtcagcaaaaccttggaattacagatgttgttgaacttgaaagcactgtgggactgttcagttatatcttgtaaaacaaaggaactggtgtttaaagctaaaatgtagaatagagttaatatgtcttactaaagcccaggtgatggatgaggattacagtaaacaaatacaagcttttgtgtgcacatagcaatacagattatgggtgactcgtgtaaccctggagcaactggtcctttcagtactaactgatttggagttatgaaaacaaagcatatatgaattattaatgaaactaaagtgactgaatattggcactaggtaggttccccagttatgctggagtatgtatatttacactatataataagtagcatgttatatataaaattatatgttaggtatacattgtttagcatcttacctcttactgttgtgaataagccaaaaacaaaagtacaataaagtgtttattgtttccctgatgttagtacagtttgtttaatttgatttatttgcctgttgtatccacaagtaacctaagtactttgacattttgagttatgcatttttaactggatgtatacgtgagctttatcattacttgtattttaatgcagacattctggttcaagaatttgtaaaatttggatcactggatacatacctgaagaagaacaaaaattccataaatatattatggaaacttggagtggctaagcagttggcatgggccatgcattttctagtaagtgattcctgaattctttaacaaactaaaactccccgttctgttttgtaaaagtactgtacatatcttaacctggcaaccagaaggaagtcttggaatgagtgtcaagtcattcagtgtgttaggcattgaaagggatgggtatacacatggaggtcttgcatcagctttgaaagggttggttatgcacatggaggtactacatcagctctgaaagggatggtatgcacatggaggtattgcatgagctctgaaagtcagcgctgcctccactaacctcctgcaactaccgtagacacccatagtttatatcacttgagtttatagatgcatattgtgctactgcaatagcagaaagcaggctgcggtatttgtaggcattgaacagtgtacagtgagaaagcagtattggcaggtacacactgccagagtgccttccagttattagtgtatgtttactgaactggaagttgtttttcctaatgtcagctaccacctagaagtgcttatcatttagagtctcctttgaaaagtaatgctcatttctttgtgggtatagattactgcatcagttaaagaaactgaagacttccttttactgtctaaagtacactccacatcagtattaactgtgctgtgttttgtcctctttaaatctgtactgtagttttgggcatattatatgcacacatatttgtatattgatatttgaatgcatgtgcatttaactttaataggaagaaaaatcccttattcatgggaatgtgtgtgctaaaaatatcctgcttatcagagaagaagacaggagaacggggaacccacctttcatcaaacttagtgatcctggcattagcattacagttctaccgaaggacagtaagttctgtaccggctgccctcagcattcttaaatgttgtttgggtggtaccacgaaaatcatgttaattttcctttcattctagtttattgctgttcttgcttactaatgacatttaactactacttttagtaatttaaactgttgtggttaaattgtgactatgttcatttctccttttgtaaaaaagtacattactgggctggagagatggctccgaggttaaaagcactgactgctcttccagaggtcctgagttcagttcccagaaaccacatggtggctcacaaccatctgtaatgggatcagataccctcttctggtgtgtctgaagatagctacagtgtactcttataaataaaataaataaatatttttttagaagtgttctaccatacactgaagttatgcttctgtgcatctatctgtatggaggaggcctgcgtgtggcacagcacatgtgtgcagtcagagggtaactagtgggaggtagccctctccttccaccatgaggccttagggttgcacttctattcttgagcttggctgcaaacacctttatccacttaagccatattgctggctgtatcttaactaattttttggctgaactttctaaattaagaatccatattaatcagactttgtgcattggtgtataatattctggtttagccaatgctacttaactttgatagctggctgaaaaggacacgcatcatcggacagtagtgcagaaaggaaagcctcacagggatttttagatctgcatttgaggaaattgacctttcagaatgagaagttaaattgaaaaaaaattatatagtaaaggagagaggaactaatgaactatttaacctcctccatatgtaggaaaataatctatattgctttaccagcaggtagaatagtatcctcattttcttatctttttctctttatcagagtcctaacagagagggttatactgcttcttccttcctttgcagtggtgttcaggactactgaaactttatttgggaaattccatgatttgaacattacccagtctgccaattccatactgagactgtttgatataatttaatcatttgtctattgtaatgatacctgttgggccttgcttatctgccagtcacagtgacctctgctgctaagttgttaaaacacccatcaacgatgtaacattacttatatgagatatgtgcacacacacacacacacacacacacacacacacacacacactctgaatattgagagtaaatcttgcatgtttgtttctgtggtagagagaggcaggactaatgggaaggtggtggaagtggtgcccagtgagacactttggtttaatggaaagaagtttagttgatctaaatcattacacgggatactgattctgacaacattcttaaaactatgtctctgtgggaaattccctcatttttgacgatctgaattgtcaaagctgagttactgaagtaggattttaaggttcagccagcccttagacttagtaaacttaagccagtcctgtacagctccgaaagacttgattattcaagtaagtttggaactcttcacatatagaataatggttgtggagcttaattaacgatagtttgttcctgttgtttccaagttcttcaggagagaataccatgggtacctcctgaatgcattgagaatcctaaaaatctcaatctggcaacagacaagtggagcttcgggaccactctgtgggagatctgcagtggaggagataagcccctgagtgctctggattctcaaagagtaagttcatgtgggctgacgggagaggcaccccgattccttggggctcttccatggtgtgttcctggcccttctaattgtgaaaagaactcgaagtaacagcactgtggagtgtgtcttaccatttggccctttcattatagaagctgcagttctatgaagataagcatcagcttcctgcacccaagtggacagagttagcaaaccttataaataattgcatggactatgagccagatttcaggcctgctttcagagctgtcatccgtgatcttaacagcctgtttactccaggtgaggactggtggggccgtctccccgaccactgactttctatctctcttgctttaactggatagtttctcattttttagctccatctgagacagtctttgatgtcttgccgtatatatgtcctacatgactgggcagtctttattttttaaaaagatattcttgccgattataacctaattttatttacttgtttattttgtgaacaagaaaacttaaccacagaatttattatctgtgtctaaaacaagagttttttttaattcattgcatttttagttaatgagaagcaagtttacctgaccacacatgttactcgggctacatggagtttataacaagcccccctttgttttttctagttcccatctattttgtaattgacttgttagtgtaaacgctagataggcttatttttgtatgtccctacatctggagtgctgaaatcaaggcacagctgccccacagctagccgttaggacttacctctcactgcagcaattgagtaggacctcactttgtgaatagcctgtttaggaaaacagtattttaccttttgaaaaaaaatctatgttgaaagtctgggtaataattaaaggcccctatgaatataatctaaataattttgcatttcccgtgttatttagtattctaaaatcgttttgtttcttaccttgaatatcagttttgcctagagaatgtatctgaccatttaatatgtgtcattccttattcctacagattatgaactactaacagaaaatgacatgctaccaaacatgagaataggtgccctagggttttctggtgcttttgaagacagggaccctacacagtttgaagagagacacttgaagtttctacagcagcttggcaaagtaagctgtcataagttttcaaatagaatataatcagacattgtgttttggaaacaaaaaggctttggactagagttactaaatatacttttcacaaaaaaaatgtaaggggttatttgtagagaaaaaaaagcttatttgttgaatattagagaattttccggttaaataacgctgtactgaagaatacttcaggtcctttaacatgcagtgcacattcaacatcttttaagaggatagatataaactaaggagtacatcccaaactgaaggtactctgcgtctctcgcttggaaggagaagttagtagttcagagtaagttagggtaagagagaagggagcatacagcattctgtttgctttccaacttcatcttgggagaaatagtctgagtgcttagagcataggaccttgaatgaccatgttcactaacagaggttccataaaaaggttgcacactcgtacatagcctgtattatacagtctatactgtgtaacaagatgagaaaagccacagtgcttagcccgcccgttgtggtgatatgctctcttccttgtctgtttaccgcgatctataccatatctcagtatgaattggattttggcatagatagaacatgaaggcttcactgagacctttacctaagtgagaagtttcagttgaatgttcctaaaactaagcactgagggttacggtaaagttagcctaactgtgctaatcattgactcttcctttttctgtggaatactcttgggaatatttgaggcatatagccattcagagagggaaagttctggagttattcttgttcttataatggtgccacccttgtgaccagttaacctttaccactctgtataagacactaccgtataagacattagggttaggcctccgttgtataactctgtgggccgcacaatactcaggccgtaacaacccttgttcactggcagtagagttaaagtgcagtgagatagacaaaaggttaccggaagtcagttatagagacttaccacagctcctagtgtaccctgatttgtccttaggaactagtgttcaccacttgtttatcttttccaagagtactccttcatctcaaggaggttgtttataggcatactacccagtttttaaaataatacttccatttattgctccaaaagttgtctaacagaagctgggaattctttctactgattctagcagccagcattttctgcatatttagaaattaatatcaagttgtcttggaaacgtttggcttccaccctaatggctgtgttgttagggtaacttcgggagtgtggagatgtgccgctatgacccgctgcaggacaacactggcgaggtggtcgctgtgaagaaactccagcacagcactgaagagcacctccgagactttgagagggagatcgagatcctgaaatccttgcagcatgacaacatcgtcaagtacaagggagtgtgctacagtgcgggtatgttgccaggcacacttgtctgaacttgacagcgtgtctttgtcatccagctagtatattagtcagtgcccgagagcgagcgagccttggagattgtgcagggagatctggggctgtaactacaacagtatttccgctggttggttaatcatccttctcaccactcccttaaggaagaagtgttaacttttttaacaaaattaatttccttttataatctattaaaatgtttttatattagatacttcttataattgaaaaaaattccttaaccgcttatttagatttgtaaaaataattaaaggaggtttaagaatatttataaagcttctttaaaaatttggattgaaaacctgtattcctaactattatatcacctttaatttaacttttatcatcatggacccagattttgtatatacttaaatcagttacatatagcttttttcctagtatttaatcagtaaaatacagcacaagaaaacattgtgttccttttgtatttaaaaggtcggcgcaacctaagattaattatggaatatttaccatatggaagtttacgagactatctccaaaaacataaagaacggatagatcacaaaaaacttcttcaatacacatctcagatatgcaaggtacccaccatcccacatgtctcttatagatgaaataaacatggtgaactaactcaaatcatacaaacttattcttaactaataaagagaacttgtaggaattcagccatataaattatatttatatgactactaaaagaaaaatgtgtcttttggttatagggcatggaatatcttggtacaaaaaggtatatccacagggacctggcaacaaggaacatattggtggaaaatgagaacagggttaaaataggagacttcggattaaccaaagtcttgccgcaggacaaagaatactacaaagtaaaggagccaggggaaagccccatattctggtgagtacggcggcttttggtgtaatggaatgagacgttagagggcttgcttcaaacttcaatcttactgttcctaaatgtataatatttaatcatgttcagtttagcacttttcccaataatagcaatatttatcctatgctttgtattgagctaatttgtattgagctaaatgcatctcatgtattatctcaaaatgagtagttgtgagccacctggcatgggctctgggaatggaaccgggtcctctggggattgaactgggtcctctgggaatggaaccaggtcctctggggattgaactgggtcctctgggaatggaactgggtcctctggaagagccgtatgtggtctcagctgctgagccagctctccagcctctcagggttccttattgcaacccacagagaatgtatatttctatgagtattagagatgcaacagtcctaacctgaaaacccagaaccaaaaggcactaagcatgaggcatctcaggtgctgacgtggttctcagcctggatttgcagtagggaagcttcactcacagacattttatgtaagacaatgtcccagaagctgaaaagctctgagaccagaagcacttctcatctcaagcatttctgacaaggcctgtggctccatttactcaggagggaacttactgtacatataagctaagcagcttgcccgaggtgtatgactaataaattgtagcactgggattcaaactcagtctgatcttagcgtttacactttcagtctttctagatcatgataatgtaataacctggcattaattaaatactgaatttatagtagttaggcattagaagtaatttttgacctttaactaaaatggccaggaacattcataacttattttacttatttaaatattttatgagcattaattatacataagagtaggtgtcatggcagttttcgtacattcatgggatgtattcggtcacatttaccctctgcctcaccctcacccccagctgcctctgttatggactgggctgcttgtttccatgacaacccaggggattggttaggctttgattataggaggataggtgagggtttggactttctcagcagttcctctgcttaagatattgatgtgagcccataagctcctctctgaatttaatgatggagtgccaggcccagctttatgtgagtaatcagagctgctatgagttcaaaagaggggctgctgctgaccaccgggaacaaacttcttacactcaggctgacagcagcacttgtgtcccggcataaacagagttctgtagaaggtgatgtaatggacccaggcccattcaccagaggaatggcagtagcacacacgcacacacgcacacacacacacacacacacacacaaagtttcagtgtgttcatgtaggatgcattttgtcttctaggaatgccacaatgaacttctttttgttttatataccattccaatagaatttctggtttatttctctgctgaagtaatgctattaagcagtattgtatgaatcaaaggatggtgtttaaaatttaggaagagtaatacaaagaatacaactgtcaatttataagtattgtctaaatttttccagttatttaaaaaatatcagtttgctagcgctaacttcacgggtcatccatatttctgggttatgtttatttaatgctctaaatttacagctcatctttaaactgttctgaaagaattttggttaaaatatttagaataagtgtttccacataagtttatcggcattataactgtgtgttaaaggaagaggttccttcccctctactttagagatgtgatgattcacatcactgtaaggtacaggtgtgtataggtgagggctttctcaggaggactctgcttactcaggaaacaaggccaataattgacaagtgggacttcatgaagttaaaattattttccttgtcttctgtgtggacaaggaaacaatcaagttaaaagcaccctccagagtaggagagaatcgtggctagctgtacatctgacagagaattagtatctagaatatacagacgactaacacactaaccgccaagaaagcaacccctcactaagcccttgcaagggagattgagtgaatggcagcaggctaggtgtggtgagtagtagacctagaaagagactgagccctgccctgacttgaatgtcccgtaccatcagaaaacacagatatctcattactattcattagtattcattactattcactagtaacgattgctactgttatagtagcaaaattacagttatgaagcagcagtgaacataatgttttggttggggtcaccacatcgtgaggaactgttcttaaggatcagattaggaaagatgagaagcactggtttaggtgaatacatcagtagtcatggcaacagacatacggtgttcattttacatctttataaatggaaacacagagaaaactgtatttcagtagatggaagattggctacaacaaaatacatttttataattcctggataagtaactaaaacgtatacaatgagccagtactaaaattatctattcttaggtgaaaatgtattttttttctcactagtattgaaaataaagaataaaaccaacttgactttcagaaatggatttagtagctaatctgtagttactcttttctcttcatttctgggaagaaaaaaacaaaacagttttgaattaattaaaatgtttctattgcactattgtagtgatactttatttgaactgatctattcagaacttggagaaacagattgtcactcatttcaaattaagtacaatgttttaataataccttttattatatataattaaatcaagttcaaaagattaagggttctttgcctttaaaaaaaaattgttgttgtttagaatagccatcctgtaacccatctgcaacaccatacctatttaccccctgacccccaaaagactcactttctaacagagaaagtcttggctcagttttcttcctggccaagaactgtcttttgttcaagtgtgtgtgtgtgtgtgtgtgtgtgtgtgtgtgtgtgtgtgtgtgtgtgtgtgtgttatgtgaaaactcaaagttagcatcaggttttcttttctttttttgttttttgtttttgttttttccgagacagggtttctctgtgtagccctggctgtcctggaactcactttgtagaccagactggccttgaactcagaaatccgcctgcctctgctgggataaaaggcgtgtgccaccaagcccggctaggttttattttctattcatctttccactttagtttttgagataagactaaacacagaacttgccatttttgccagcaagtacccagatctgcctattttcttgtccctcagtgcttgggttataggttgctctccctggctttttacatgagctggggatccgaactcagtcctcatgccttttacagtgatcaccttacccacagagtcatacctgcaagtgaaatattatttttgaaaaactagcagtagtaggtcagtgaagtggctcacctataaaggtgcttgctgtattgacttgagttaatccccagatccaggtagaaagtggaaggagagacccgaatcttcacggttgtcttctgacctccataggcacacatgctctgtacacgcatccccttcatgtgcaacgacacaacagcaaatgcagacatactggtaggagcacacagaaggtccagtgcgtggttcctagcatcagcaatccagaatcgcagagaatatgtgcttctgtaggcgtcatgaagccagtgagacgtgctgcagagcccgtcctgtgtgacgctctttcctgatgtttaaatgcatgccttagttttcttttggtcatggtaaaaaccaccagacaatataagctttggcacctggcttcctgagtatgtggagacataagtcccgagggcgggcagttaatatgaacatgagtaagacacattgttcatcgagtctttccacatcgtcgtgttcttccatggaggaaggtggaagggcagcgccatgcagcctgttctggagttcctgactctgattctccactttctctaaggagccccttcctatactacattgaccattgagtttcaacacctgagttttggagagaacacagtcaaattctagcaaacaaaattaagatatgaaagaaatcacacgcagtttttaaccatagaagttagtcatggtttgttttttttaaagcttgattttatttaaaaataaatctttgtcctccttaatactttaattattcaagatgctgttttgctttcatctcttggcatgttccagcatgttttaggggttggtactaagagcttgaggaaaagtgcttctacttcagtattgaaaaaaaatgttggggctggagagaggatggctcagtggttaagagcacttagtgctcttccagaggttctgagttcaattcccagcaaccatgtggtggctcacaaccatctgtaatgggatctgatgccctcttctggtgtgtctaaagacagagacattgtactcatgtacataaaataagtctttaaaaagaaaaagaaatgttgaagcagaatttcaccctacagggaaggcgtgtgctgttcttactacagatgtcatttgggcagtctgtgcatattggttactctgcagtagtcataggctgtggcctacgactgtaatgatagagagagtaagctaggagaccactctgaaaagacatggtggcttatttcacacagcagtgagagagttaaaaataattcctgggccaaccagaggctcagcagcaggcctgagttaggttccccaggatctacatggtggaagaaaacataaactcgtgggttgtctctgacctccacacatgtgcaaataaacaaacacatgtacacataaatacaaaaaatgtaaaatatctctaaaaattcctaagaatcctttcttgggtatagattgtgattccatttattgtataatcaaagccaaacactcagcaggatttgggaagatggagttctgtttacctgcaggtatttaatgtggaaacgagatatattagagccaagagaatggactgtgtttaggagactttggaagaagcatgggcaatatcatctataggaaacacggtagcatgagagggagggattaaatgatagaactgcaggaaactacatttagcagagagaaaagaaatgttggcagaaatacaattaaggccaacccattctctcaactcaaaacccgtctatgaaagcaggagacagaaaggacctattgttgaataaggattaagtatgtgtgtgctgttgcatttaaacaatccccgtgtaataagagatctccgagatggaaagaaatcttacatttttctgtactcaggcagaaacagcccactgcatacacgtttactgcatggcattattcctccagtgaaaggactgaaccgcactgcttgtcacacatagttcatcctaaatcccctgggtgaccgtgtgactccctgcgccgggtactggtctcaccatactgtgacatgggctagcacttggaacgaggctctggccgacttgggttcctcccctccccaagaaaccagaagaaaggggcattgccacctttgatgatgatttccaaaagacagttcctaggtggttgctaattatgtttctggatcataaaactgacagtggcttttaagcaagagcatttcaaagagacataaaatgtacaagttccctaaatactacacaaaaaaaggagggaaaaagtcttcctcttaagacccacagagaaaagtgagccttttcctgacttgatttatctttgtctaagtaaaagagcattaggtaatgaatgtacctgggggttggcaatatgtaaccaagaaattaattacaaagagcgctttgctaaaaacaaaacaaaataaaagccctaaaactagaaaacaaaaacataagaacaggatggctgtcatctcagtacttgagaggctaaggctggaatttgagccaagctgggtacatagaaaaacctgtccagctttttgaaaggagggagaaaagcactttaggatataggataatagcattgtcttaaggagattacattttgctaatagaataaaaagctattaaaggcgtggtggcacacacctttagtcccagcccttgggaggcagaggcaggtagatttctgagttcgaggccagcctgatctacagagtgagttccaggacaaccagggctacacagataaaccctgtctcaaaaaaaaacaaacaaacaaaaaaaaacaaaaaagctaagtacacagattccgtactggttgcatgtttgtgtagtacaactgtaagtctagatgtgcaataagcagcccgattagtgagcttgactacttagggaaggacttgtgcaagtaaaacttaaattaggttttgaaggaaaggtnnnnnnnnnnnnnnnnnnnnnnnnnnnnnnnnnnnnnnnnnnnnnnnnnnnnnnnnnnnnnnnnnnnnnnnnnnnnnnnnnnnnnnnnnnnnnnnnnnnnnnnnnnnnnnnnnnnnnnnnnnnnnnnnnnnnnnnnnnnnnnnnnnnngtttctgtgtagtcctggctatcctagaacttgactggtcttgaactcacagagagtgacctgcctctaaggcttgttcatgttttctgtctagccagtcaaacaggtctctgtagctatttctatactaaagacatgcttgtccatggaactacaaaactcatggtccactgcccacctctgactgggataccactttcctgtggctttgtattttctgtgttctcttccataatcactccctttctgatttttttttagatttatttatttataaaccttatgtatataggtgcttgtatgtacatttacacaccagaagagggcagcagactccataggactatggttatagatggttgtgaaccaccatgtaggtgccaggaattgaactcaggacttctggaagagcagccagtgctcttaagccctgagccatctcttcagcccctcccctcctgattctcaaggcttcaagttacatttctggctagaaactatatttcctccacctatttttaatctggatttctttaaaagaacaacttaagagcatctcgcatttcaggtcttagaaaaacttatcatttaacacctggtgtgccaacaaaagaaaaacaatgtgtttaggtttttgtgtgtcagacgtctcgggaccaggctttctgaattgttaggaggacccactgtcagcatgtgtcagattcatagctgtcgttcatcactggggagaacagcagagcaaaggccagatgggaaaggtctgtggagcagataacaggccttctgtcccctttgttcccctgggtgtttgtcatttgtttgtttccccctccaatataacgtgtcattccatgaagtaactcttctaaatgattgcaatattgcaggtacgcacctgaatccttgacggagagcaagttttctgtggcctcagatgtgtggagctttggagtggttctatacgaacttttcacatacatcgagaagagtaaaagtccacccgtggtcagtgcgcttcttagtggcgtagctccccgagccctctcctgctgcttaacttttgttttaagcacaagaaaggcattatccaaagatgagtaacatgtttacaacctagtttaggaccctgttgttatttatttggggacaatattcaataatacccaacaaaataactacaaacaactaaattcagtgtatcctcttgtccattgtctctgtgactgtaacaaaatacatggtactgagtaaattcataaagaaaagcttgcagttgtggagattgaaactccattatcaagccaaggaccctttgggatctttacaacatggcagagaagcagaaagagaactaactgcaaaaacccatcacaaggcaaggcttcggctgagagccaggagggccagcattctgcttcctgtagagcagctcgctctcccaggaagtggaacccgcagggagcctggtgttatcccttacagagcccatcattccagcgctgccagggcccaggcctccagaacacctcagtggcatcgaagttacattgagtgtgcccgtacactttaggaagcattgcacaacctaaagtaaacttttggaagtacatatatatttctttcaatatagggaagtatgaaaaaaatagaaattattttaatgaaattactcatagataaccattttaatatagtaacattttctttcagacttatatataaaaatgaaactttagaaagaaatacctattgttttatatgactgagctttgtagcttcctgtgaagtcctgttaattattacatcgtttcataatatctcactttatctgtacttatctgtacttactcactgcaagtatgattttagttatccagtaccattctgacacaaagtcgcatatttctggataatcatttaccatttttatacataaataaatacttttgtttgtggctatcatgttagaagaagagtgtacttgttagtgagaagttatgagttagtaaatcgctgttgattgtttcaaaagaagagctgcatcaggctatgtattcacggcactgagagggccgaataattctctattcacattatatatttaatgaaatattaccaacctaatataaaaattcttatatctattttatcctaatttgcatttgttttattagtgtagtaattatttagcaagtcatttaaaactggtttctgtttcaggaatttatgcgaatgattggcaatgataaacaagggcaaatgattgtgttccatttgatagagctactgaagagcaacggaagattgccaaggccagaaggatgcccagatgaggtaacaagctttaaagtcattcattcattcttttgtgtgtctatataatgtgtgtgagtgtgtgtgtctctgtatgcatgtgtaagaaaaaggtgtgcgtgtatgtgtgggtccatctatgtatatatgtatggtttgtgtgagtattttgagtgtgtgtgtcttggtgtgtgtgtccctggaggtgggtgtacttggtatgggggtggggggttgggaggggaggtgtgactacaggcatacataccacagtgcacattgggatcagaggaaaaccttccagggttggttcttgccttctgccttgctgaaacaaactttctgttgtttctactgctgcactaagcccaccaggctggttggtcctcatgactgcctctcatgtcttagtgctggaattagagactagtgctgttttgctggctccttgcatggtcccagggactgactctcattaccaggctctgtgtacagtcctgtttgtctactgagccatctccctgatccaacaatttttttaatccacagtaattatccattttctttgttttattgagaacatacacagatttccttttcaaggtataaccgtagcattattattggcctacgtaaattaagatttccaaattcatgtcatcctgtaacaaccatggtactttgggtcactctcactttggtttcactttttcactgtacagatttatgtgatcatgacagagtgctggaacaacaatgtgagccagcgtccctccttcagggacctttcccttcgggtggatcaaatccgggacagtatagctgcgtgaaagagatggccttcactcagagaccaagcagacttccagaaccagaacaaagctctgtagccttgtgtctacacatccttatcatgatgctagctaggcagaagaaactgtgacgccgtctgctcaaagctttggaaacgccgtgcgtttgtttctacaccatctgtaaaaaccactgctcaagtctggcagcatgcttgtgggctgatgcatggagctcaccacagagtctctgcatctcctctggcagaagaagaaaatagacagttttcaactcagcttttttgagaaatggaaaaaattataatgtaaattttgcagtgtaggaaatacacagaacatacatgtacagtttttaccacgtggagtgtataatactttggcctcttgtgtgatttacatgagggctgatgtttgttaatgttttctaatttttccataggtgatctataataacttcatgatacaaattaaaatgctcagaaaattaaataccttttctttcttgctcatctttgctgctctgttagggcctgtagttccatgccactgtaaatatttttcaaagcaaaaggaacaaaggtctagttttacttgtataggaaatcttcctgaccctaaagaattttgaaatgggacaatcttacaaagacacagcacaatctattttcttatttgttttccttgtgtttatggtaaatgtgtttttaaatagaactgtctccaactttttctatgactataatgaatataatgaatccttttataattttgagattaagaatgccagaaatacttccctcccttgaactgttaactgccaatgagatgtttcaatccctaagacttgtcattatacattaaattgaagcataagccatacataatttgtaaaatgtacaagctctttaagatgctttctgggttggaacatggccaaagactgtgtgagaggcctccaggtttgccattacagctgtgagagaaacgtcctttcctcagcgtctcccagacagatgggaagggaagggtgtggggcacatgctgttcatcccattcaagaataccagcaggcgtgtgacgcacatctcgagatgagaagagagagcgtacatcttttcaaagtataaataattgttatcatccttcgtgctgctccctcttagacaatgtcatgtcaaaaataaaacaagatttttgtgtgttatttatacaagattttaaatatttggtaatttgtttaaaaattctgttttcagtggtgtgttctgtttttgaacgtggacttaaagagttttggttgcgctgaagagacgagcctctcacatcctttgagaattttagtaggtaacatatacagaaaccatctatggtggtgagactagtggattttgttttgttttgttttgttttttaatctaatatgtattttaatggaagtcagatttatttttatgtaatttctcagatctcaaggaagtaagtgtgtgtgtgtgtgtgtgtgtgagagagagagagagagagagagagagtttttagttctatagcatctaggatagaagtagtgtatcatataatacaattgatctgagatttttgtactaaaatttaacattttcataaaagactaacatttacttatttttaaaaatcgtaatataaactacattgttaggctttttaaaatatttgaattttacttttaaagaatcttgcatgcatattcttaagattgtagaatgagatgacagtctaactgtaaaattcaaagttgtgaaaagacttctcattgagagttcataatctttttagttttggtttgaatggtacacataaagaaattattcccatagttagaacttagtgccacatgagaagcaggtatcagatgtttcttcaagctaatatttcttagaaattaagcttttttcagaattttataattatgtaaatgtcagatgatggtattctataatcattagataatcccatactattgtgggtacttggttttagaacagcagttctcagccttcctaatgctgtggccctttcatgcagttcatgttttggtgacctccagccataaagtgattttcatggctacttcataactaatttttctgctgctatgaataacactgtaaatatctgtactttccgatggtcgtaggagacccctgtgaggtggccattcctctcccagaggggctgcgacccacaggttgagaaccactcctttagaaataaaaatttgtgatatttttatatatatatatatatatatatacacacacacactgctggtagcactgcaaaatttactctagcaaagtgccgtcttacagtcctaattttcctcctgaaagtgaatttttttacagttgtaacttctggtaaatatttaagttctaactaaacaattttattacataatagagatgaggaaatacctacatttctacatctgaggagccccccccccccgaacctggggtggactgtgtgctccatgtattgtcatagtaactacattattggacctttagcatgctctcacaagattggaaggttgctgtaatcgtattataggttattttcctttgtgtaatcacctagaccatcacacttgtatatatagatgaaactgtctcataaactcaagtgaatggtggtgtttatagctttttgctggatagtggtgtatctcagtgttggggtacctatagttttggattgcattaccgttatgacttaaggtgttgaatctttttttccagtgtatatttgaccatttacattttatgttttgagaactttctgttgggttcttgcctggatcatagaatttgtacataggtctgaattgtttatcagaaataaggttctcctgatgcaatctttggatccttagggtattgggtcatggaatctgtacaccggtctttctatttctattccttttgctatcattttattctatctcttgcttgcttactctggttaagcatttaatcttggataagggtaggaattgatgcccttgtcatatttatgattttagaggacatgctatcagttttccactattcagtataaatagggatatattgcctttcatattaaggcatgatcactctgtttcaggtgtcttcagggcttttatcaaaagaagttggattttgtcactttttatccacttattgtgcttaaagtattatatgtatatttacctatataggtataggtgtgtgtgtgcgctcgtgcatacaatgcaccatatgtccctggtgatcccagggtctagaagaaagtgtcatatcctctagaactggagttatagagagtttcatggcaacatgtgggaactaggtattgaacctagattctctgtatgagcagcaagtagtcttaaccactgatcctatattgtgattttaaatgttttattaattatttgataattatatacagtatattttgatcaaattcatccttaagtctctcttaccatccttgcccccttattcttctcccaagtccaggttgtattgcccaactacacctggagtgtggtaaacctaccaggggctacatcattaaacttcttcctctttcaacagctatcgagtgctaatagctcctcagcttgtagtggaaataccatgcccacctctatgctaggattttatctggcttgaacttgtgcaagtcttgtgtatgtgttgataatcaccatgagttcgtatgtgcatttgccctgttgtgttgggagaatactttttttttattcagtatgtattgaccagttgaggatttctgtgttaactgtcatctatagaaagaggaaacttctacttatgaggtcagagagatgtactgattcgtgcacatagcaataagttattagaagttattttaatactatgctcatttagcaaagaaacagtggtaggttctcctttagggcctaaagcctatttagctgagtcttcttggccctgttaacagtactattgatgggtcctatctcatggagtggactaatctaatcagaaggtggttggttgctcctgtaacatttgtgccattattgcactagtggatttatcttgtcaggacagttgtttttgtaatttgtaggagtcacagcagggtgagtctaatggttttcccccctctggtagcatggatatcaccttccagaaccatcaaacttcgcagagatgaagcctccgtttgagtacatgcttgatgtctcagtgttcacagttcaacatgtagagttcaacatgtaagagcaacaggatcttattgtcaggctgtggaggcgcacagtgattcatgggtggctgctttgaaacagaggagggaatcccctgtgggtttgatatataaaatgcagagtccgtcgttgcatcctaaggcaaggactggtacgtgtgaaccttaagaagtaccacccacagagggagaactacagactcacagaaggagctgggctacagtgggcacccagatgtgtctgtcttactgaccaacatcagttgtagccatcagcggagtgttcacacgtgccaaaagagctagatcaatggtctgtgctggagaaatgctcagagactagactccagcaagatgagtactgaagtaagtaagggttgaccgtggctttgagatcctgaaacttaaacttggcatgagaaaatcagtctcagaacagtaataagacaagcgaagaaaataaaaaggatacaaataggaaagaataaaaaatagtctctatttgcttatggcattatactatacttagaagaacgtctggtttctacaagaaaagtctagaatctgataagtgctttcaggcaaagtttcattatttaataccataatacacaggtcagtagcttttctatgtaccaacaataagctggctgataaagaaatgaaaaatatctattcataatagcttcacaaaaataacgatatccatgaataaatctaatgaacgggattaaagatctctgtaataaaataagacacaaaaatgggaattgaagaagacactagatgatggaaatgtcttctctgctgctgtattgacagaatattgtgaaggtgggtacagtatcaaaattagtcacatattcaatgcaattaccttcaagatctcaaaaacattactcaaagagcttggaagaaaactcacattcatatggaaacacaaagctaagagaacactgttggatagcatggtgcctaatctcaagttatactacagagcaatagtgacaaagatagcagggtcccaacacggagccagacgtgtgcaccacgggacagagaaaagaacccagaaataaacccccacagctgtaagcactgcttataacaaaggagaaaaaaaatcagagcaagggaacacacctctttcaacaatgggtgctggggaaactggcattggtacatagaagaatgagcctagatccatatctctcactttgcacaaataccaagtcaaaatggaacaaggacctaactgtaaagccttagtcactgcaactgccagagaaaacacaacaaaatgcaggcttaggcaagtgagttatggtagcacagtgaataccccaagagtctggaattgggaaattaaaacaaacaaaacctacatagcaaacaagactagcagcatagtgaaaagacagcatacacaattgaagggaatctttgctaggtatatatccgatagtaaaatattcaagacacacaaactgccatgattaagcaacacaaaaatatgtattgaatcaatgaatatgctaataccctgaatagacaggtctcaagagaagaaacaaagtggacaataaatagtttttaaaggtggtcaacatcgttagtcattagggaaatgctgagtaaaactacaccaagatactttctcgtccctgtcaagaatggctaatgtcacaaaagcactgccagtgtgtgaacactgccaaggacgtggggaaggaggaatccttagtcattgtaagtggtgatataaatgagcacggccaatgtggccatcaacatggtttctcaaaaaaacctaaaaaagatcaaccagtgagtgtagtggtgcatgcctttaatcccaacactggagagtcagagacgggtggatctcaatgagtttgaggccaacctggtctacatggtaagatccaggccagccagggctacatagtgagaccctgtgtggattgttggaggaagtgtatcactatcagggtgggcaatgagacccttctcctaaccacgtgggagccatttcttctagctgccttcagatgaagatgtagaactctcagctcctcctgtaccatgccagcatggatgctgccatgctcccaccttgatgataatgagcctgtaagccagctccaattaaatgttgtccttataagagttgccttggtcatgatgtctcttcacagcagtaaaatcctaactaagtcagaagttggtatcaggaaccagtggtatggctgtgataggcctgaccatgttcttgtttgagtgatgtggatttggggactttgtaaagtggtgcgacttaatgggccctattaccagaagcatggaagacagtgttcctgagtgtgttttgaaaggcagggacctaactcaagaggtttcagaggagtagacttttagtatgcagtctagagatatttttggtaatattttggtgaagaacgtggctgctttttcccattgtccgaagagtctgcctgaggcgaaggtaaaggaatttagattaattgctttgacaaaggaagtctaaacccagcctgctataaattctgttgtgtgattactaaagttcactcttttttaaaaaatctatttttatttttaattggatattttatttgcttatatttcaaatattatcccctttcctggcttcccctctgcaagctccctatcccatcccccccttaccctgcttctatgagggtgatcccctaaccatctacccaatcccacctcactgccctagcattcctctacactggggcatcaagccttcataggaccaagggcctcccctcccattgatgccagataaggccccttcagctccttcagtccttcccctaactcctccattggcgtccctgtgctccgtccaatagtcggctagtcagctatgagcatccacatctgtattggtcaggctctggcagagcctctcaggagacagctgtatcaggttcttattagcaagcatttcttggcatcagcaatagtgcctgggtttggtgtctgcatgtgagatggatccccaggtggggcagtctctggatggcctttccttctgtctctgtccactctttgtcccttcagataggagcaactctgggttaaaattttgcagatgggtgggtggctcaaccagggggccatgtctaatatctggatatggtctcaacacgttctccttcctctttgtggagtatttcagctaatgtcatccctgcggggtcctgggagcctcttggcatctgggaccttctctctgaccagttcttctaccttgtttgtgcattcatctacgctgctgctgctgctgctgctgctgctaaattcctttcctgatatcagaacccaacttcttcaagcttccagtatagacgagtttggaatgaagaccagtgcctctctaggaatcctctaagccttcagtgccagactgggctgctgaggcatctggcattgtggtctcagctctccaatgtaaagaccgccattgttggaccaccctgatggaactctgtaagccaatccaataaataccttttcaacagatagtcattctattggttcggttcctctatagaaccacaaccatataattgaatgctaattttaaaaataaaaattactttttttgattactgcagggacttctgcttcctccggctaaagacttgacgaaaagatctctttaaaaatgattcttcactcagcaccactgaataggataggaagagcaggggccattcttcaggatctgcttgctgtgttgaccaaagacattccttccctaacttttagccagcgccagcggcagattgtgtccttctgcagtttggtgagatttttttttttactcttttgcttaaagctttgttgggattagggactgttctttgaccctccttactgtaatgcctagatctgatgttagagttgcatttctttaactgatctgaaacttctgtccgtattaaaggtacattttcatttaaagctttgtggacctattcaaccatgacacaacataaatttgtttcaaaaatggttctcttctctctctttacaaaggtaaatgtgcagggtatattttgaaagcagttgaaaagcaaagcattttacaaatgcaccagaaacgtagatttgagtggaaaagaagttctgtcttaagacatagtgcagctgaagagaaacagaaacaagtctcactgaacagggtgttatagggcgtacctgcgaagaagacgagagaaatctttccatcgatgcttacccatcatttagtgagtgagaattatactttggaacctccaagtttttgctcaacttttagcattaaaatgatttcacatagagctggtgagatgactcggcagggaaatggtacctgagtaaaactcaaggccctgaaacaatgtgtctgtctactattacagtgcaatacaatgtgtctgtctactattacagcgcaatacaatgtgtctgtctactattacagcgcaatacaatgtgtctgtctactattacagcgcaatacaatgtgtctgtctactattacagcgcaatacaatgtgtctgtctactattacagcgcaatacaatgtgtctgtctactattacagcgcaatacaatgtgtctgtctgctattacagcgcaatacaatgtgtctgtctactattacagtgcaatacaatgtgtctgtctactattacagcgcaatacaatgtgtctgtctactattacagtgcaatacaatgtgtctgtctactattacagcgcaatacaatgtgtctgtttactattgcagtgcaatagcttgtgccaggggcatagttacttgcttaagttgctgagacaaatgagctggatgactgagaggaacccagtcgttatgggcatgagtcttctttttaatcatctagatagaatgataacatgccatattccatctaaacccagcttaagggctttcaatcatgacgaaacccaaatagatcgtttttcaaatacctacacggattatggcacctatacatagtctttaaaaaaatattcgacaaaataggagtcactaaatactaagattcttgttaccagcacacaacactacaaactacttgcaaatatcctctagtgtggttcagtcctgcacctacaagcagaaccgcaagaacatataagcagtaaattagatttagtaagcttttattaagcgagcatagttcctacgacagtttgtacatctctatcaccagtgatgtttgattaatcgttaaggtttaaaaatcaacaaaggggaggcacgcgacggccatctcttctttggtgcatcctatcacacagcacttatctgcaaagcctctgcgtttcctttgggaatgattcccccaaaataaacttctgaaggtattcattttgttcgtgcttttcttctgaagttgtacgctcttaacatagggcttgccactgtggtatgaaaacactcttgccttaggaagcaactccgtcttttcaaactgatagtcgggcagtgactgaggctcccaagtgtgtgttcctttcttctgagagacgcctgcagggactgttgagagacaatgggggaagaaagtcctatttatccaaatctcctactagatatgaatttagtattgcaaaactaaaatcagatacttatttaaaaaacattttaaataaaagttgaaaagtacagctattcaggggcaatttttttttttttttttttttttttttggtttttcgagacagggtttctctgtgtagccctggctgtcctggcactcacttcgtagaccaggctggcc

SEQ ID NO: 1457 - DNA, 3629 bp, Mus musculus
cgggggaacaagatgtgaactgttttccctccccagaagaagaggccctttttttccctcccgcgaaggccaatgttctgaaaaaagctctagatgggaatggcctgccttacaatgacagaaatggaggcaacctccacatctcctgtacatcagaatggtgatattcctggaagtgctaattctgtgaagcagatagagccagtccttcaagtgtatctgtaccattctcttgggcaagctgaaggagagtatctgaagtttccaagtggagagtatgttgcagaagaaatttgtgtggctgcttctaaagcttgtggtattacgcctgtgtatcataatatgtttgcgttaatgagtgaaaccgaaaggatctggtacccacccaatcatgtcttccacatagacgagtcaaccaggcatgacatactctacaggataaggttctacttccctcattggtactgtagtggcagcagcagaacctacagatacggagtgtcccgtggggctgaagctcctctgcttgatgactttgtcatgtcttacctttttgttcagtggcggcatgattttgtccacggatggataaaagtacctgtgactcatgaaactcaggaagagtgtcttgggatggcggtgttagacatgatgagaatagctaaggagaaagaccagactccactggctgtctataactctgtcagctacaagacattcttaccaaagtgcgttcgagcgaagatccaagactatcacattttaacccggaagcgaatcaggtacagatttcgcagattcattcagcaattcagtcaatgtaaagccactgccaggaacctaaaacttaagtatcttataaacctggaaaccctgcagtctgccttctacacagaacagtttgaagtaaaagaatctgcaagaggtccttcaggtgaggagatttttgcaaccattataataactggaaacggtggaattcagtggtcaagagggaaacataaggaaagtgagacactgacagaacaggacgtacagttatattgtgatttccctgatattattgatgtcagtattaagcaagcaaaccaggaatgctcaaatgaaagtagaattgtaactgtccataaacaagatggtaaagttttggagatagaacttagctcattaaaagaagccttgtcattcgtgtcattaattgacgggtattacagactaactgcggatgcgcaccattacctctgcaaagaggtggctcccccagctgtgctcgagaacatacacagcaactgccacggcccaatatcaatggattttgccattagcaaactaaagaaggcgggtaaccagactggactatatgtgctacgatgcagccctaaggacttcaacaaatactttctgacctttgctgttgagcgagaaaatgtcattgaatataaacactgtttgattacgaagaatgagaatggagaatacaacctcagcgggactaataggaacttcagtaaccttaaggaccttttgaattgctaccagatggaaactgtgcgctcagacagtatcatcttccagtttaccaaatgctgccccccaaagccaaaagataaatcaaaccttctcgtcttcagaacaaatggtatttctgatgttcagatctcaccaacattacagaggcataataatgtgaatcaaatggtgtttcacaaaatcaggaatgaagatttaatatttaatgaaagtcttggccaaggtacttttacaaaaatttttaaaggtgtaagaagagaagttggagattatggtcaactgcacaaaacggaagttcttttgaaagtcctagataaagcacataggaactattcagagtctttcttcgaagcagcaagcatgatgagtcagctttctcacaagcatttggttttgaattatggtgtctgtgtctgtggagaggagaacattctggttcaagaatttgtaaaatttggatcactggatacatacctgaagaagaacaaaaattccataaatatattatggaaacttggagtggctaagcagttggcatgggccatgcattttctagaagaaaaatcccttattcatgggaatgtgtgtgctaaaaatatcctgcttatcagagaagaagacaggagaacggggaacccacctttcatcaaacttagtgatcctggcattagcattacagttctaccgaaggacattcttcaggagagaataccatgggtacctcctgaatgcattgagaatcctaaaaatctcaatctggcaacagacaagtggagcttcgggaccactctgtgggagatctgcagtggaggagataagcccctgagtgctctggattctcaaagaaagctgcagttctatgaagataagcatcagcttcctgcacccaagtggacagagttagcaaaccttataaataattgcatggactatgagccagatttcaggcctgctttcagagctgtcatccgtgatcttaacagcctgtttactccagattatgaactactaacagaaaatgacatgctaccaaacatgagaataggtgccctagggttttctggtgcttttgaagacagggaccctacacagtttgaagagagacacttgaagtttctacagcagcttggcaaaggtaacttcgggagtgtggagatgtgccgctatgacccgctgcaggacaacactggcgaggtggtcgctgtgaagaaactccagcacagcactgaagagcacctccgagactttgagagggagatcgagatcctgaaatccttgcagcatgacaacatcgtcaagtacaagggagtgtgctacagtgcgggtcggcgcaacctaagattaattatggaatatttaccatatggaagtttacgagactatctccaaaaacataaagaacggatagatcacaaaaaacttcttcaatacacatctcagatatgcaagggcatggaatatcttggtacaaaaaggtatatccacagggacctggcaacaaggaacatattggtggaaaatgagaacagggttaaaataggagacttcggattaaccaaagtcttgccgcaggacaaagaatactacaaagtaaaggagccaggggaaagccccatattctggtacgcacctcaatccttgacggagagcaagttttctgtggcctcagatgtgtggagctttggagtggttctatacgaacttttcacatacatcgagaagagtaaaagtccacccgtggaatttatgcgaatgattggcaatgataaacaagggcaaatgattgtgttccatttgatagagctactgaagagcaacggaagattgccaaggccagaaggatgcccagatgagatttatgtgatcatgacagagtgctggaacaacaatgtgagccagcgtccctccttcagggacctttcgttcgggtggatcaaatgcgggacagtatagctgcgtgaaagagatggccttcactcagagaccaagcagacttccagaaccagaacaaagctctgtagccttgtgtctacacatccttatcatgatgctagctaggcagaagaaactgtgacgccgtctgctcaaagctttgcttc

SEQ ID NO: 1458 - DNA, 3390 bp, Mus musculus
atgggaatggcctgccttacaatgacagaaatggaggcaacctccacatctcctgtacatcagaatggtgatattcctggaagtgctaattctgtgaagcagatagagccagtccttcaagtgtatctgtaccattctcttgggcaagctgaaggagagtatctgaagtttccaagtggagagtatgttgcagaagaaatttgtgtggctgcttctaaagcttgtggtattacgcctgtgtatcataatatgtttgcgttaatgagtgaaaccgaaaggatctggtacccacccaatcatgtcttccacatagacgagtcaaccaggcatgacatactctacaggataaggttctacttccctcattggtactgtagtggcagcagcagaacctacagatacggagtgtcccgtggggctgaagctcctctgcttgatgactttgtcatgtcttacctttttgttcagtggcggcatgattttgtccacggatggataaaagtacctgtgactcatgaaactcaggaagagtgtcttgggatggcggtgttagacatgatgagaatagctaaggagaaagaccagactccactggctgtctataactctgtcagctacaagacattcttaccaaagtgcgttcgagcgaagatccaagactatcacattttaacccggaagcgaatcaggtacagatttcgcagattcattcagcaattcagtcaatgtaaagccactgccaggaacctaaaacttaagtatcttataaacctggaaaccctgcagtctgccttctacacagaacagtttgaagtaaaagaatctgcaagaggtccttcaggtgaggagatttttgcaaccattataataactggaaacggtggaattcagtggtcaagagggaaacataaggaaagtgagacactgacagaacaggacgtacagttatattgtgatttccctgatattattgatgtcagtattaagcaagcaaaccaggaatgctcaaatgaaagtagaattgtaactgtccataaacaagatggtaaagttttggagatagaacttagctcattaaaagaagccttgtcattcgtgtcattaattgacgggtattacagactaactgcggatgcgcaccattacctctgcaaagaggtggctcccccagctgtgctcgagaacatacacagcaactgccacggcccaatatcaatggattttgccattagcaaactaaagaaggcgggtaaccagactggactatatgtgctacgatgcagccctaaggacttcaacaaatactttctgacctttgctgttgagcgagaaaatgtcattgaatataaacactgtttgattacgaagaatgagaatggagaatacaacctcagcgggactaataggaacttcagtaaccttaaggaccttttgaattgctaccagatggaaactgtgcgctcagacagtatcatcttccagtttaccaaatgctgccccccaaagccaaaagataaatcaaaccttctcgtcttcagaacaaatggtatttctgatgttcagatctcaccaacattacagaggcataataatgtgaatcaaatggtgtttcacaaaatcaggaatgaagatttaatatttaatgaaagtcttggccaaggtacttttacaaaaatttttaaaggtgtaagaagagaagttggagattatggtcaactgcacaaaacggaagttcttttgaaagtcctagataaagcacataggaactattcagagtctttcttcgaagcagcaagcatgatgagtcagctttctcacaagcatttggttttgaattatggtgtctgtgtctgtggagaggagaacattctggttcaagaatttgtaaaatttggatcactggatacatacctgaagaagaacaaaaattccataaatatattatggaaacttggagtggctaagcagttggcatgggccatgcattttctagaagaaaaatcccttattcatgggaatgtgtgtgctaaaaatatcctgcttatcagagaagaagacaggagaacggggaacccacctttcatcaaacttagtgatcctggcattagcattacagttctaccgaaggacattcttcaggagagaataccatgggtacctcctgaatgcattgagaatcctaaaaatctcaatctggcaacagacaagtggagcttcgggaccactctgtgggagatctgcagtggaggagataagcccctgagtgctctggattctcaaagaaagctgcagttctatgaagataagcatcagcttcctgcacccaagtggacagagttagcaaaccttataaataattgcatggactatgagccagatttcaggcctgctttcagagctgtcatccgtgatcttaacagcctgtttactccagattatgaactactaacagaaaatgacatgctaccaaacatgagaataggtgccctagggttttctggtgcttttgaagacagggaccctacacagtttgaagagagacacttgaagtttctacagcagcttggcaaaggtaacttcgggagtgtggagatgtgccgctatgacccgctgcaggacaacactggcgaggtggtcgctgtgaagaaactccagcacagcactgaagagcacctccgagactttgagagggagatcgagatcctgaaatccttgcagcatgacaacatcgtcaagtacaagggagtgtgctacagtgcgggtcggcgcaacctaagattaattatggaatatttaccatatggaagtttacgagactatctccaaaaacataaagaacggatagatcacaaaaaacttcttcaatacacatctcagatatgcaagggcatggaatatcttggtacaaaaaggtatatccacagggacctggcaacaaggaacatattggtggaaaatgagaacagggttaaaataggagacttcggattaaccaaagtcttgccgcaggacaaagaatactacaaagtaaaggagccaggggaaagccccatattctggtacgcacctcaatccttgacggagagcaagttttctgtggcctcagatgtgtggagctttggagtggttctatacgaacttttcacatacatcgagaagagtaaaagtccacccgtggaatttatgcgaatgattggcaatgataaacaagggcaaatgattgtgttccatttgatagagctactgaagagcaacggaagattgccaaggccagaaggatgcccagatgagatttatgtgatcatgacagagtgctggaacaacaatgtgagccagcgtccctccttcagggacctttcgttcgggtggatcaaatgcgggacagtatag

SEQ ID NO: 1459 - DNA, 96589 bp, Homo sapiens
  misc_feature (29878)..(29897): n = a, g, c, or t.
actaattttttgtattttagtagagacagggtttcaccatgttggccaggctggtctctaactcctggcctcaagtgatccgcccaccttggcctcccaaagtgctaggattacaggtgtgagccaccatgcctggcactattcatttttcaaactcaaatgacatctactttaagagaacatactttgtggggagacagatctagattcaaatagcaactttaatactagaagttatgtcagtttgggtttgaaatgaaattcaggcaatttctgtactttattttctgtaaaatagagataataatacttacctaatagggtataaaaccaaataataaaaatttcagtcatttcaatatttattgtaccaggcactgtcctacgtattaggtatatatggtaatgaataaaatagacctggaactcacctctccttgaaagaaacagacaaataaataaatgaaatatattgtatgtgaagtggtaataagtgcaatggaaataaactaattaagtgtttggtgtaggttgaggatggagaggcattgaaatttcaattgtaattgcatctcacctaaggaggtgatgaagtgagccacggggatgtgagaacgtgggagaggggccagggagagtcactgttctgattcctggctgcagctgtgattactgccatatctcttgtaattatgcatgtcggcttccctgaaacaccaactctggccttctacaacttcagaccaaggtctcccagtcgagtgccttcctgtttgcattctataactgagccacaaacagccctgtcttgagctcttattttcttataaagtttctggatatatctgtattttatttggtatgctcttaattatagccctctctccccattcctcttctcgctgctggaaggtggtggatggctaggctggaaggctatcctgagcaataccgtcttatgttggtatttattatttggttttataccctattaggtaagtattattatctctattttacagaaaataaagtacagaaatagcctgaatttcatttcaaacccaaactgacataacctctggtattaaataccaattatcagtcatcacacctcctaatacccagtcattttatccaggctaagcttctgcacctcaagttcttcccttaaggtgaattttttctatagcgagacctctgcccagggagttaagtgctaacctgtttcctgatagcttaggggtattattaatacggaggatttggccactgatcctcattttgtcctgctattgttcttattcattaattcatttatacaatggcacttatttaacatatactatgtgtcaaacttgcattgatactggatatacaatagggaataaaacaaatatagttctgccctcatggtctacaagggtttctttggattcttatagaatacactcttcctctgcctaccctaccaggtaacaaataggtatatttcttgggctgcctcatctctgcacactccataacttgttgtacatgtatttatatctgatgattgtatctaatcaattatctctatgatttgtaaggtctttcagcagcaacatttgtgattttagaatttgattgatttgtaataagtgtactcagtgctatttgacttaaatttgttgcactgcaacttagtgtagccctgataaaactggggctcccatgtggtctggcatatacagtaaatgccttaaaaacacaagcgttataatcaagaatacttgaagaaaaaatttaaggttttatataaagggaatgaaagtaggtccactttataagttaaagcaaaatgttttaaaattctctattgccatccacttcttattcccatctacatactgaagcaacttgaaagaaagatctcttctttttgttcattcttcaagtcaaggtactgcatctgtgcctcacttatattttattccctaacccctccccaccatatcacctgttatgaaaggcaacctaagttctttggcttatttattttcttttactttacccattacaaggattctctacaacagtggttcttgaactttagtgtgcctcagaattgtctggaaggcctgttaaaacacaaatggctggaccctacttccagagtttctgatacagaaagtctgggttggggctcaaaaatgtacatttctaacgtgttcccaggtaatgctgatgctgcctgtccatggaccacattttgagagccactcctctacagtatagcatctgggagccattccagcaaataagaaatctatccatggatagaagcctttgctatatattatacataaatattgttacctgattgcctatatattaatatgaagcttatgaatttaatgaatcatcttccatcaccacgtttaaaattctgtgggttggggtgtatacttgggataggctcagctataagcaagaagagtaaaggaaataatatttattacttgcttgtctattcaggagatagtagagtgtgattgttagaggagttagctgtgcagccaggccctttggggttcagtcttagcccagcaggatttctgagagacacttgaaagacatttaaccttttgttcctcactttcttttgagatgaggataatgcaagtaaccacctcatagccttgtggtgaggctcaaatgatttgatacatataaaactcttgaagatgcctgatatgttgtatgaactgtgatgttacctattattgttatcaggaatttgttgagtgttttctacatgttatctcattataacctcaaatcaatcctaaatgcaagtgcccctattattctcattgtagagactagaaaacagaagtttagaaaaattgagtaacagattaaaatctcccagctagtaacaatctctggtctttgtatttttccagcattttcccaaaggaatcatttcctcctgtaagaaaaatggttcaggaaatctgtacgattcaaaagcatatttgaagataattggataattacttgatcagtatggttgatgaattttatagtcaatattattgtgtctactttaaaatgtaatcaaggcaaaaatggaggcaacgatgggtaaaagagtggttgtgtaacacactagtgagtttctaacatttacagagtaccgttacataacaggcgtttaataaatactggtcaaacgactgggatgagtgtgttttggaactaaaattacctaaaattaaagattcataatattgagttagtgagattatagagaaatgagcattgatatactactgtggaacttctggaagttgatttgacagtagtcaacaaattttaaatttgtatttcctttggtacagagagtctaagtgtctatcccaggaaatacatttttgcccatgaaatgcatgttcaatgccttcaaatttaacactgtgtaactggagaaattagaaacctaaatgttcataaataaattatttaataaattattagcacctgttttactgacacagtataagagttaaaatgaatgagaaaagcaatacatattgacatgaagtatctccaaggtattctaagtgaaaaaaatgttaacagaaaaacatgtgtagaataacccattttatttatttaccaagctcaaaactatatctataggagatatgtaagaaaatgcattggaaaaagtttgaaagagtaaatctcagatagttattaatggtggcctctggaaattgaagagggctgggagaagagggtcaagagaaatttccactttgtacattttttcttctatgttgtttggattttccacaattgctatgtatttatgtttacttgtgaaattaaaaatgaaaaaaagtagtttgctcaacaaatatacttaaaagccctttaataaatataatagacattaatatgtacaacagtaagttttcatgagccttaaaacatatctattctggtaatacgcatttgttttcaaaaacctccaaagtcatcactgttactaaaattttattacttgtaatgctattgagtcccagaatatttcctgtgagtagtaaaagagctgaattagcatctgagtggaaagcacatgatactaaaattcttgtaggattagactgctcagccaaaagagcttgccttagcactgtgacatcattttatgcttgatctataacaggtggagatgacagtaaacataacaaagcaccattacacaaaaggagaaagcaaagaactgtttttcccctccaaatggacagctatatcatgttcagtgggggacactgttagatgtggatgggaaacctaagtatgtggataaagtaagaccaccctaataagggcgctcccttaataccagctgccttttctagaaggaaaacacctgctttccctctgatcaactctcatgacatagagataaagaggtacagcctcaaacctcagaaggataaggcattcagggaaaaaaagggggaaggagaagagaaaagtctagttaaggacaaattatggacatttggaggtatatggccaagcaggagtagaagttaaaatggagaactgtttcatgcagcattttctggtccagttgtgtattttgtagttgaaatggaaatacacagtattccaccacatcagtatgatactttaatatcaaatcagattttcctttggtcaatagcatagctagagtggaatgaccacagcaattcctatagctacagcccagaaaattcacaaaattattaagttacagagaaattagagtgaagcaagtgagaaaagaaaacagaacaggggtgaagggtgtggtggttgggagaaggaggcgtgggtgagaaaaatttcactgtagtaaacgtccatcataatcaaagagggcttatcttctgctaacctatgggttatatgtaatatctcagattatgactaatacttgcatagttctgcttggctttatgattgaagatagacttccacactttgtgggtgaatcatacattttttttaaatatacattttccctgttgtaatttgacagagtatttttctctctcatcagcttactatgatgtctcccttactcctggttatttcagttgtgagtacgctgacactactagatctaacttaagtcaaaaggagaaatttgtcataaggaagtattttcaagatagaaaatgcatgaagttttggtggaccttataagaaagagggaactgaaaagctatggggacacatactgcgcacattctctctctcttctcttctgtggcattcttctctcctatagcaaatcagctttctgtgcaagaatgaagatggtaacctcatagtggcagccttaactttagagcatgggtaacctcatttcaagtgaacagaaaagtctgatttgctgtttttgaatcccaactccaaattccccaggagtgagactctgatggctcagcttggtccaatcaaggggttgtgggaagcagggtgtcacaaactagaacgtaggtgccagaggctggctactctgggtgaagaggacagttctcagcaaagaggacagaatccttagtctaaattaggactcaggaattaagtctctgagtctctgtaaactaacaattatgctagggatttatttttattttttattttattttattttattttttgagatgggagtcttgctctgttgcccaggctggagtgcagtagcatgatctcggctcactgcaacctccacctcccaggttcaagtgaatctcctgccgcagcctcctgagtagctgggactataggcacatgccaccatgcctggctaattttttgtatttttagtagagacagggtttcaccatgttagccaggagatcttgatctcctgaccttgtgatccacccacgctggactcccaaagtgctgggattacaggtgtgagccactgcgcctggccgaaattttgtttttaagagtgaatgctggcatgaatcctttcacacacacaaaaaatgtttttcgtgaataggcaactatatgtctaacagttttaagttaaattttttaaaagtagcacatagttataatggtcattttacatattttgccaaataattatcctcacttgaaagaggttattaattcttggcttacaaagggaaaactgttttggttttcaagcaccaaagtttaatacatccagttatctcaagggaatgagggatctgttcactggcaatatcttttttgttttccttttctttttgtgattgaaagtaaggataagggaactgatgtagagacaaggacatgctgaagtaccgaggaggtattggaaaatttctttgccatagccaaccaaattttggaataaatggtactaaaatatctggatgatttgtagtaaaaaaaacattgcttgcttgtctgtctacttgattaataccccttgcctttgtcttttggcttataatcctacatttggaataaataagcctctttccatattttattcctttctgccttcaggaaagtacatcttccctgttttggaaagaaacaaactaactcctggacttctccccagcccttcgtttgagcctgtttccctttccaaggactttcctgcatctttttttgtgctcacatttatgtccctccttaagaatgatgttttcagtctcatcatttaatgatatagttctgttttttaaaattcaaatggagatcttcacatttatctctattacaactcagcccttatcctaccagcccacacagtcctgtgtagtgcaataaactgtgacaaatacttcaatcttcctaataaaattcaacaaatttcttatacctcccagcttggttatatctgtaaattggtcctgccacagatataatagacatttgataactgtgctaagggttttaaaatactttttcacctaatcttcaaaatctctctacaggggagattattatcctcattatactgatgaggaaacagaggcttagaaaatctaaataaactttcctggcaaaagctgtgattgaaagaaacctgggtggtctggactcttaaagcgtaagttcttaaacccttggccatggattttcaaccgtggctttatgtcaaaccacctaaaaatgttaaaaagttatagaagccaatgcgccatctcacacttactgaggcagtcttgttggggtggggggaaggtttgggcatagcagtcaagaatcactgctgccatgctggccaacactggaaggacaaaacctcaagacactacacacagccccacagtcaacaactagctgttaagttttcccattagatcttgccacaaagttttgaatctaaatgtgttaccttacagctcatatttcttgtttcttcatattgtatgaatgttttgaaagacttggtcaaattccttggaattcttttcatcattatcaaagaataagggaaatttcctgaaatgtttgccttgagtagcaaatttctagtgatgccactaccaggaatcacataaagagctcaaaagttctgttaatacagagtgaaaaaagctcaacattccaggttagcattgacttaaaatcatgtcttagtgatgagggaggctttcactttctgaatgacaggaggcaagttgcttcatctttctatgtggggagacagaagatttctcaattctataggcttatgaataatataccccttgtccaccttgtcttccatacccacatctctaatattaagaaaataacctgctcccccacaaaaatatcctcaatattcaccacttccaaatggcttctccctgcaattcaccaatttcaaatggcttctccctgcaaacaggctgtggacagtaagagataccatgcctagttacataagtatatcactgcaaaatatagaaacatcacttataatgaaagtaatactgtttcagagttctaaaacaagcattttcttcccctcacaaaatatcacatttccatttccacagttgtgatgcttttcatttacccatgacgttaagctcatctttagctcttcttcattatgtgggtctgtgttctagcttttacctcagtagcagtttttgtttgcaggaaaaaaggaactcttttggtagtcactgtttgtaattgcggccttgatattctaagccattgagtcacaattaataattagaaattcttactaactttgcccatatattacctatgaagcagtagccgtaggaatgcaattttcctgtaaatccctccctcttatacagctctagttcattatttaaaagattcagggtgaattcaagtaatttcctatgctgctatcatttgcttaaagaccttttgcaatgggtcttatgtaagaagaaatgcaggagttgctttggtgaggtttatttaaagaaaccattaagtgcaagacagacctgaagagcagcatcagttgtgtatggggaaacaggagctatgaatgcgtcacttcatttaggttgacagaaagagggctaatacttgaaaaaaatccctacacgatctggtgccaggctacttctttggcctcacctcttaccactgccccctccttccgtgtcctccagccacagtgacctctttcctgatccttgaacttgccaaacactttcccttctcaaggtctttgccttcaggagtccctctgcctgaaattcttttcccagatagtcatgggactggttcattctcatccttcagatctctgctcaaatgtcacttattctaggaaatcgttcctggccaccgtaaaatagcacaccccctcctcactttctactccttttctttgttattatgtatatggcagcagaaaactatgcattttcttagtggcaattacacaccccgcacattatgcatttaaagcgttgtttgttgttttgtcgcttccatcagaatacaatccagtagggcaaggagtgtgtggggtcgtgttcacctggtatctctggggacctacagcccggcacctagtagacactcagtaaatatttgaatgaatgaatgaggccctttggcagccgggaagcccgtcacagccgttgtctccaccctctcccgggctacaccaggccacgccggtaaagttgtttctcctctaggagaaacattcgctaggccttgttgccaacccgcaggcggctgggcgcttcatcccaccctcacccctttccagccaaggtggctgatgggagtcaggctctcgagggcgcattgccacgaaacagcgtgtgtgagcgcgttgtccccggcccccggcgccacttcccctcggcctagcagcctggactggggaaggacgggtctgctgtacccgggaggtggaaggaaaagccgaaagcggagaagtgtgcgggaggggagtctccgcgcggaggcagcccggcctcctccagtgcaggctgcgcgctggggagccagccagggtgagtcactcccggccgcttccctggagggcggcggccacacacacacccgcccatctagtgagggccgggcccagcgctggcgcctagctccagccgggcaccagcgtttcgcgaggcgccgccgccttaacttccttgcgcgctcacgcccaggggccgtcccaggaatctccacgcgcgctcgccggcttcccgagaggcagctgccctgcgtggcccgcgcctgccggtcccgcgaccagcaccgagcggcgcacgcgcactgcaggacgcgcgtccggctctcccccagcctctatccggcccggtctcctgccattcggggagactgcaggccaaccgggaggctgagttcgaagctagcagggcggcgaagccagtgtcgcccgcggcgttgagaagacggtgtggccccggagagggtggagacaactgtgacgggcttcccggctgcccgaagtgggagtggtgtggggctgcaggaaggagagaggaagaggagcagaagggggcagcagcggacgccgctaacggcctccctcggcgctgacaggctgggccggcgcccggctcgcttgggtgttcgcgtcgccacttcggcttctcggccggtcgggcccctcggcccgggcttgcggcgcgcgtcggggctgagggctgctgcggcgcagggagaggcctggtcctcgctgccgagggatgtgagtgggagctgagcccacactggagggcccccgagggcccagcctggaggtcgttcagagccgtgcccgtcccggggcttcgcagaccttgacccgccgggtaggagccgcccctgcgggctcgagggcgcgctctggtcgcccgatctgtgtagccggtgggtgttatctctgcctggcttctgggtggggggcagcagctgtctctccacccccttcctaccttttggtcccgcctgccccctgctagtggcagcaaacttctgagccagaaaaatcttcctctttaagacgacacctagaacgagtcttgctggtgatatttgcttccatttgtgtcttataattccctcgctcccgcctccttattcctttttaaaattttctagacacttaaacagcctagaaaaagcatttgtttcccctggatttatgtggtagtagttaactgctgcttctgtttttaggtttcagaagcaggcaacaggaacaagatgtgaactgtttctcttctgcagaaaaagaggctcttcctcctcctcccgcgacggtgggtgtgctgtcctttatcgctgcagtaaaggcgaaggtgtctggagctgggagtgcgtgcgtagggaaggttggaagcgtgtgaagagaggcagggctcattgttgcttactcttctgaaaatgtcagtgctaaacttttaatgttgatctgggagagtaattttggggtgttttgttgttcgtcttggatcctttaagaaacatttttttgttggctttacacataacgtgactttgcagagaaacgaaaaacgttgtccattaccctttcttcttaagcagccagagattcttaatcctttaaagaggagtatttccaagcaataagagatagcttttgggagaacacgttagctattcttgctggggtttctgctaccacattgaatgtttcctcatggttttatctgcctaagcttgctgtgtcggttgaatttacccagtttgttttccagtaattactaatctgttaggagaaactccatttctctgaatgaaagggtaggagcggctgagtatggagaaggaaactggaagtgggaataagggaaatgattgcttttggtttcataataagtttgtacagtgagttgttgggctactgcaaataaagattttgtatcccttctccagaatgcttgggaccaaaagtgttttggattttttttaaaaattttggaatgtttgcatatacaaaatcagacatcttgaggatgggacccaagtgtaaatacgaaattcgtttgtttcatatagaccttattcacacagccactaagtcatttgcaatatttttaatacgtctgtgcatgaaacaaagtttgtattaagtacctatgcggggaattttccccttgtagcatcatgttggtgctcaaaatgtttcagattttgcagcttttcagataagggatgatcagcttgtattttgatataacacccagaacatttgaagatgaataatcaatttttggcctcccttcccccatccgcctcaccttataccactttaagtgtgagaattatttgcttgtacatgcatttgtctgttggtgtgtaacgtatgtacagactggatgtatccagcacttgccttaatagtacatgtatttacctgaataggaaagctgcagtacttgctggccagaagagcacaccatgcttgtttttgctctaactgaatatcctgtatttgcaatttatagcagttttagggactcattagggaattttgtgtgtgtgtgcctttggtgatttgagacaggtgtctcagatatgggaagggaatatgacattgtttctctttcacctggctattactgaaaggtgggatgcttttgaggcagaataggaaagtgcattggctttggagtgagatctggatttgaatcctggtgttcttgccacttaagagttgcattatttacggctggtcatggtggctcacgcctgtaatcccagcactttgggaggctgaggaaggaggatcacttgaggtgaggagcttgagaccagcctggccaacatggtgaaaccccatctctactaaaaatacaaaaattagccgggcgtggtggtgcacacctgtaatcccagctactcgggagggtgaggcaggagaattgcttgaacctgggaagtggtggttgcagtgagccgagatctccactccaggctgggcactgcactccaggctgggcaacacagcaagactctgtctaaaaaaaaaaaaaaaagaaagaaaaaaagagttatattatttacgactcttttagcttcactttcttataagattgttgtgagaagtgagtaagacacatgcaaagtggtaaactgcctggctgtcataaaagtcttggctactatcacggctgggaggcaaaggagattcagagaagggcagaatgactgcataaggtgatctgcctgtaactcgtgtttcttcctttctagtataaagagataaaggacttcaaggtcttaaactggtgagggagtattacagcctttgtatggaaaggtttgactttgtgtctctgcttaaacccccattgtgttgcccctaccaattattgtgctgcccccttgtggttaactgtgctaagacctttcttttgctcttctcccattacatttcccacccttccccactcccttttagacccctcctcttagctcccagtttcccaaactgtgtgccaaggtgcccagagcacctcaggcttgaacttgtgttttgagttggttcatggtttcaatattagatacctacacccgtttctacaatgtcatgtctttgtaaagatgtattttcagaggttgctccgataaaaagcaactactacatgaaaatgaatgtagaacaggaaatgacagtgtggtattgtccaatttgattctaaggtttgataagttctacagtgctctacactaagttgtaaggacataactactaagtaagttgttcaaacctatttcttttggcctgggggtgtcgtgaaaaatttgctaagactcagagctccctgaatgggtttggaaacctctgccttagcttttagtttgcttttctgataaaattattgatataaagctagtaccagctgatcatggcttaatatatttcctctcctatgtaatatgtttataacttctgcccagttctttcattttaaaactaatcctattgctaacttgttgtactagtcacttcctggtttttcctgtactggtcttctgcttctacttctgttcatctccttaaactccgaatgccccaagtgaaagttaccattttctaccccttaattttcttctaatcatgtaggctttaaattaggcatcatctttaaactacttctttcatttacctcttattcccattcaaaatgtccatatttcctttctttctcatatctctgctttccctcctttactgtgtgaatcccaggacacatttcctgagcctagaatattgaaagtcatttgaacttctgagaattcagtgtcccttccttctgtttatcctcaatagagattccactctaatactccttattatagcattcccttgccccaaaaccttcagtggcttaccattttctacttattaaattttcctgacttttaagatagtctattatcaatccctgccctatttatttagtcttttgtctaaggatctctagtccttaagcttgtaagctgatttccacactttctaataataagctatgcttcttctatcctttaatttttgcccatgttctccatccctcttttttttcctctatttctgtagctctttagtcttagaacattttcacatggtttaattatatgccatgctttagttgtttgatagttatttccctagtgttagccatatcttttcaagttgattgtgtattctttgaggagcagtaccttagattaaaaaaaaaccacaacacacagtggagagcacatgggcagcattcaagaaatacatgttgattgtgtgataaggaactgtagtcaccaaacaaatatttgttaatacttgcaatgtaaaaggtacttggctgtattcaaaagagaaataaagaaatataaaataggctcctttccctaaggacttacagtataattgggcagataagctaaataataaaagttacagatatttaagaccacttgagttgagcagagattttgcataataggaaggaactggtagagggggtaagcaaaggcaaaatatgtatatatgtatgatatgttcagagagcagtacataaataacttgactgaaatgaagatttgtgtgaaagagtagtaagaaattgtgttaaaaatgtagttggaatttgattatggatgtctttaaatgctaggatgagaagaatgtactttgacctgtagatatggagaagctttaaaagttttgaattgagaaagagtttgctgaaataagtattttaggaaaatcaaagcagcaccagtgctaggtctcatatgaattggaaagagaatggtagaaagaggtaggaaaataattgagccctgaagtaatgaggacttagaaataagtcagattgcagagatgtcacaagacattattatggattggataagaagggagaatggaggggagaagagtgattaaagattaccttaccttgaaggtttgcttttcagtgacggaggaaatcaaagagtgttgactctccaagacatcttagaacatctaagtctatatgttttgtatattaggactcagaccagagagatttaaaaatgtgtccaaagttactcagctagttaatgacaaagaaactgccgtttgattaatggcagttactaacaaaaatagttatggcagtgttagtagctggtagaggggatgtagacagttgagcgtatattgtggatatgttgagtttgcggtggccgtgggatgggcaagtgaaaattgatagcatacagtgggacatatgactagaatttgttagcgaagttaaggctggtgctgtggtacttaagagaaaagagtgggattgcccataattagcgggtgggtgaaaggagaggaatgggtaaaggagacaaagaaaaaaacagtatgagaggcaaattagtggataggttaggaggcggaatgatcaacatgttgatcattggcaagaaatgagaagaatcagatccaaaaaaaggtcttaaaaagatgtattcgtgtttttcctaataagaaatctataaaaacagaagaaaattgcttatactttccctacgtggaaataaccactgttaatattttgttctctccggtttaacaaaagacctttggatttgacagttgggtgatcagtggagacttttccaaagctctccatcactaggactaaggatgagaattttaggcataataaaacctaggagatatttttcaacagattgtcattcgtctgtatcgtcttatatatcacactgtccaggtactattcttcctgtgtgcattggttctgtgtttttttctgaatgatagaaggttagacaagccatctctgggtgcttttgtgctggtaaaatttgaataaagtgataaaatatttgtttctaaaaggaaggagaaattcttggtcgataacttataaatctgagggttgaatgattgatgaaattaggggtactggaaagaacaaagagaagcattatttattttgaagcttttctgtatagttacaaagggttaactaggttagaatggtccatgggctgtttactttgcttgcatgtttattttgatcttcccaagaacattcttctgttcatctttttagtatgttattggaaacagagtactcattagttcttactaagtggttttagtttaataaattatgattatgaaataaaatgctattaggtaatatttttataatataaagggccatgtgatgtgagtaagtgcactgttttggaaatcaggggataagggactgaccctgctctcagcatggtatatgatttcaggcaactcacgtaatcagtgagtcttgtctattgagggaatggactaaatcttttctagaaaatttaaaaaggtgggatcacatggtaaaatgtgtataaagtttaaaaaggaaatggtttaccaatgtttatgacaaaaaccagcaaactctttcccacccccccaccccacatctccttttctagtctctaattcctgtacaccaggcaaccacctgtcctctgtactttgccgttttcacctttataatgaatgaattgtttagcatcccctctaaagcctctccattcagttgtgtagaagagctcatcccctttgccttcaagggctttaccattatatttctctcctctttttcttgccttctcaattcttccctctactggattatttccatcagcattactctgattgctattgctgtgtaacagaaactacccaaaacttagtgatttaaaacaactactttattaggctcacagataccatgggtcagtaattgagacagggcacaccagggatgactttgtttttgctccacaatggctactaggacatgagttgggaagaattgccagccaggggtgacttgaaggcaaaggactggaatcatctggaggtgtcttcactcacatgatgggtagttgatgctggctcttgactgggatgttagctgggctgttaactggagcatgtacatgtggcctggatttcctcacaatatggtggcttcagggtggtcacctttcatagtggtgagtagagaattaaaagtgagtgtgtctcagcataaatcttttatgatttagccttggtagctgcacagtataacttctgccatgtcctactggttgtaagggtcagaagcctgtccagatttgatgggggagtggcaagttcacactgcagaagaaaaacatgtgagatgggaaatagtgttatggccatctttggacaattattaatactattgccatagtttgccattttgccaaacttcacatccctcctgtatctgaaatacacgcaaaatacactgagcttctcctcaaaggtccctaattcacatcccatcatgacagtaactcagagtccagtatctcatcatataaatcaggtccaggtacagaatagttttcttgggtatggttaattggatatggttcttcttgaactgaggacccatgaagagacagtttatatgtcccctgcatactttacaaaatggaaaaggcacaggttatctgcagtagacattcctcctcaagaagcatgcaaggtaggcacagtctgtagcaattctgcaacctcactgggcacatgttgccagttccttgattaggtctcagtcctgcttcctggaagtcattcttaataggacataggcttcttctgtttttgggtttaccttctgaattatttatctcccccacccctgcacccaacccatataaattgctttgtatttgtaagagtagctttctgagcttgcttcctgcctgtagtgctccagagtccaaaggcccccttttatatagcaactgtccctttcattccaagctaatacaactcctttaaaaactttgtggacttcctgtgtgtaagtttataatctgtactgccatacccacaaatctcttttgagaggaactctttcctcccctaagctctgtgtgagtctgctgtgggacaacacccttaagatccttagataatatttcgtctgaaaggatctatgaggtactgatttagatcttaagaaaggatcttataatcacactctagattggatctttgctctgaggccctttttatttgacactttgctggctgaaaagattgttctgagtccattacatctccttgaaattctactcaaaaaatgaatagcttattctttagttcatctctctgttctctcaattataagggcagctagaagaagccaaattgctttaacttcctgctgagaatctccttaattcattaggtcaggtatgtattttattttccatgttaatgtaggtgacagttttgctaaactttgccctagtatgtaacaagggtgtcctcttattcagctttcactatcatttctctcactttgcttgaagtcctcactgacagtctccttgagggctcttaggctcccatgaagtttcctcaagaccctttacatgtgtgaacacaaagggtccttatctgttcctggctatatagcaggtccttgaataactgtcatttcttcataacgttgataagaaaaaaatggattcctggctggggccactgtttgtgtggagtttggacattctccccacgtctgtgtgggtttttccgggtgctccaatttcctcccacattccaaagatgcatatgttagtggatcggtgtgtctaaatggtctcagactgagtgatcatgtatggatgagtgtgccttgcagtgggtgatgtcctgtctagggttggttcccaccttgtgccttgagttgctaggataggctctagccactcgtgactgaactgaattgggttaataattatcctacttgtttttattagtctttcttaaatgtgtgtatagctcacatttatttcagtgtttaataatcagagtgtttggaatctttacttagaagtttgatgatgtttttgtggccataaatatgccataggaacttccttatctcaattagcctatggaaaaatggattttgttacacattgtttcacttaaagtcacagtttccaagaacctattgaagacagtgaggattaactgtactagaactgtttcctaacccactggttcttatcagaattacctaaaggacttattgaaacacaaattgccgctgggccccacccccagagtttgtttcattagctctggagtgggacttgaggatttgcatctgtgagttcccaggtgatctgataatgttgatctggggcctagattgtgagaattactgatttaaaccagggattggcaagatttttctattaaggatcataaataaaatattttagactttgtgggcaagattgtttctcttgcacctactcaattccgcctttgtggtgcaaaagcagttatagacaatacgtaaatgaacagacgtggctcatggctgtgttctcataaagctttatttacataacaggcagctggctaaatttggtatgtgtgaactgtgctctgccaattcccaatttaaatcattacttgactccacatctcttcaagctatggccccatttttcactcccctttggaacaaaactctctgagagttgtctgtatttgtctctttttattctttcataaaaaaattatctattttttgaacacatttaaatgtcttagaattcaaaaagtagtaaatatctttgtacatttgtcagggcgtgtgtgtgtgtgtgactataactaaagattaagtagaagaggagttgctgattcaaaagtggtatatgttactaagttcaacaaatattgccaaattgacatagaaataccaagttatgcttttctacacctttactaacattgtgttttcagatgacttgattgttgccaacttgagacgtgaaaaatagaatctcattataattttaatttgctttttattctccttttttagggaactcttcactcatatcttggcccactttctattggatttgtggtccttttactttgctttgtgggagctcttatactaaggaagatagctttgagtttgcgaaatgagttgttttccctaggttgtctctttatctttttgattctgtagatagtgtgattttgttgttgtgcatctaggtaggttccttctaaccctgaaattatattttgagattctcccttgttttcttgttccatctggaatttatactgatgcaagatataagatgggacgcaacttttttcccctagatggttgtccagtttcaatactatttgtcagataatccttcttttctctgctgctgtgaaatgctggtgttttaaattgtgtatgtagttggatctatttctggactttgtttcattctaaaaatggctcctctgaaaccatattgtgagttcttgggtagtgaacatttctatttatttgtttccaagtcctgtataatatttattagcatatgggaggcattcaagtacttgaaaataaaatgaataaatcaagcatttaggaatagaagcagatctttttgccaattattcattttagttattctatttaattctctatttctgattttaaacttgaatttaaccttggttttccattttagttttaccttttttttaaactttattgtgaagtattaagttattttttgtacttactgaatgggcatttgctaacttatgtgtctgctcttattagtctatttttggcctcaaattgttaaaaattcacagtatagttttatttgtatcaaatttgctactgagggaagcttgtcatttcataatggcaatccataggataggtcaagtcatttgagattggaaccattaaggataagttcatttaacattgaattattagatctgtggttaattggccaggttagagaagacagaattacagggaagtctggattttacaacttattattttagagggtcaaatttagaataatatttttaagctttttaagtagaagtatatggatcacctgaggtcaggagttcaccaccagcctgactaacatggtgaaaccctgtctctactaaatacaaaaaaatagccaggtgtggtggtgcatgcctgtaatctgagctacttgggaggctgagacaggagaatcgcttgtacctgggaggcagaggttgcagtgagctgagatcgtgccattgcactctagcctgggcaacaagagtgaaactctgtctcaaaaaataaataaataaataaataaaaataaatacataaatagaagtatactattctgattctcttatttatatgtataatttatttttttaaatacatgaggtattgtagattttttggtttttttgaggaggggcgggggtgatgtgaaatatagttttcattgcatcagatcttcagttgtaatgatattgctggaatccaccatttaggaccctgtcttgttaaaaaaaaattatccttgccttcacccctacccctccctgccacagacttttaaaggtaagtattctgcgataattggattatatttactattatgaaaatttaaaattattagaagtaaaatgaaatatacctccattgtagtaagtttgattcacagtgcctctggttatggtggtcagtaaaagtaacactgtattaggaacagtcttcatggtgggagttctctccttttactcttctgttagtttgttctttttttttttttttttttttgagatggtttcactgtcactcaggctggaggacagtggctcgatcacggctcactgcagccttgccttccctggggtccagtgatcctcctacctcagcctcctgagtagctggcactgcaggcgagtgccactaggcctggctaatttttatatttttttttgtagagatggggtttcaccgtgtcactcagtctggtcttgaactcctgggctccagcaatctttctgcatcagcctcccaaagtgctgggattatggttctggagccaccgcgcatggcctgttagtctgttcttgcattgctataaagaaatacctgaggctgagtaatttataaagaaaagagatttaattggctcatggttctgcaggcttacaagcatggggctgacatttgctcagcttctggggagtcctccgggagcttttactcatggtcaaaagctaagagggagcaggaatatcacatttcaagagctggagcaaaagagaatgtggggaaggtgcacacacttttaaacagccaaatcttgcaagaactcagtatcttcaggacagcaccaagggggatgttgctaaaccattcatgagaaatccacccccatgatcaagtcacctcccaccaggcctcacctccaacattggggattacagtgcaacacatgaaatttaaaggggacaacatccaaactgtatcaaccttgctgtacccctcagcctcattttataggcaacaattgaatatattggttttataaaggtttgatatggaaagattcattaggagtggattttaggacttggggaatgactcagagaagaaaatagtgcatgatagtataagtctatctgattgatgagtaactggaaatccttccaaaacataatgcttcagtgtctgcagaattgtttcatttccatgtttatgtatttcttattgtttccttgtttatccataggtgcttaatttttttttaatctgaatgcattatgataatctttaaataattatttcagaggaatatctgaaatattcagtgttcttctagcatggcagtattttaaaaatcattatgagcttaaattcatactgatttaaacaacttctagatttttttgaatatcaatagcagagggtagttttaaatatttcacgagcagaattaattaaatttcctgtgcaattttattttttatagacaaactcgtcacttcttaaaatcttttaaaaatgtcttggtaatacaggcttggaatatgatggtattgaaatgagatcttaagggaaaaaaaactccaacgggtttttttgttgttgttgttgagatggagtcttgctctgtcacccaggctggagtgcagtggcattatctcagctcactgcaacttctgcctcccagattcaagcaattctcctacctcagcctcccgagtaactgggattataggcgcgcaccaccacgcccagctaatttttgtatttttagtagagacggggtttcaccatgttggtcaggctggtctcgaactcctgacctcgtgatccgcccgccttggcctcccaaagtgctgggattacaggcatgagccaccatgcccggccaaaaactccaacttttagaggcctatttacagcacttgtcccatatttgttcacactttttctgtatgtgtgttgtgaattataaatctggcttttcctacaaatgtggcttttcctgtgtagtcatcattaagcatgattctaagaagtagctcaaaatctcctaagaccaaaaaccacaaaaaacaaaaaaaaaaacaacaaaaaaccaaaaccagaaaagggatacattttgcagaataatttatattttcttctcttcatggcatcagttttctcaggagttctttttttgagatggagtctccctctgtcacccaggctgtagtgcagtggtgcgatctgcaagctccgcctcccgggttcacgccattctcctgcctcagcctccggagtagctgggactacaggtgcccgccaccacgcccggctatttttttttttgtattttcagtagagacggggtttcaccgtgttagccaggatggtctcgatctcctgaccttgtgatccacctgcctcggcctcccaaagtgctgggattacaggcgtgagccaccgcacccgggctcaggaggtcttttaagcttttgcctgtcatgtgtgtacttctgacgctggcccaaggtaaaatgattacatttgacttcggtagcccttaaatgtatggctgttcttaatcttttctaaagcctaaaagttgaattagtattcatcttagatttcttgtttcttaagtgaaagaatcatgacattgtattaaaatatcttatttgcatgtattttatatactgttttaataggcagtagtagtatacaagctttgaccaaatgtctcttcatataaaaaattcaagtgaataaaaacagtcatttaaaaatgacattagtcaaaggggcaaaaaagattacaaatgcttattgtgattgacagaacttgcttaacatattagggttctctagaaggacagaactaataggatatatatatgagtttattaaatattaacttaaatgatcacaaggtcccacaataggctgtctgcaagcttgaggagcaaggagagccagttcaagtctcaaaactgaagaacttggagtctgatgttcaagggcaggaagcgtcttggctaatccacccatcttggcctcccaaagtgctaggattacaggcgtgagcccccgtgcctggtgtacatcatttttaatatctttatagtattctgttggctaagttgccacaatttatcagacccctttaatgtcattaattttttcccaatatttagacttgtttcatagaattattagatatgcatgctactactcctgtcctttttcaaaggacaattattagatattcttgttttcctcatatctttgccaacactgggtattggcattcttcttgtttaccagtcagctaaggaagctaaggaagaaacaatatctcatttttatgtacttttctctgattcttaattatgttgaccatgttttcatttcttttgtgaaatgcctatttatgttcattttcatattaaattgtaagagttacttgtataaatatattaaacctttgtagtatatattttttctgtttttttttaaagttttgattatagtgtttataatatgcagtcaaatttacccatcttttatttcctctatcatttttcacttagatgtggggtttagaaaggaggtacataatgtgacagagtttttggtatagaaataactgacatagttagatataaaacataccaaggaaatagtcggaaatgtccaatttcgaatgtgtaaggagaccagtaagaaaatcatgaagaacagctaacagcagtaatttttaaaagggtatttacaaacacttgaaaatgtttatgtagtttaaaggaatgattcaaatataaagagaagcgtaacataaaaatgaaataaaggcatatatatagtcattgtgtagatggttttctagtaacagttataccaagtttgaaatgatttttaggctttgttatgccaacttttaggagttttctttttaaactttttgagcttatgtttcatcatggccaatttttataaattttccctatatgctcaaaacatttttttagtggaaggttttaatacgtctgtaatttctccggtgtcttaaaaataattagtttgtggagctctttgtgtattggagataccatcttcttgtttgatatatttgtatatgtattaagtaagaactggataaagaaggtggttgggatatgtataaatatcaggtaagaacttgataacgtattggttggtttgcatatgaaaagttgccctcactgtcaggttctttcctgtttctaggaattggctagccctggaaggactgccccttccagggtcagcaaattcccaagatagcaaagcatcaaaaatacagaataaaaagacatgcttagtagagtatatagaaatacaattggttttgtttattttgtgatgtatcctgtgatactggtaaattcatttataagttctagtaattttttggtagaatcctcagcatttttgataaatacaatcatgtctgcaaataaaaagttttatttctttcatttcaatctctatgtcttttatttcattttcttaccagattgcattaggtagaacctccagtgttgaatagaaatggtggtggtgagcatcctttccttgttcctgattttatggagaaagcattcaatatgtaatcattaagtaatagaaggttgtttgtagatgatctttattttattgaggaaattcccttctttttctaatttatttccagaaattttatcatgaattggtgttgacttttgtcaaatgcttttcctgcaacaattgggacgatcttatggttttgctccattattctgttaatgaggtaaattgcattgattcattttcaaatgtcaaagcaaccagtatgactggaataaaacccacttggtgatggtgttctgacctttttatatgctcctggttctatgttctattattttgttatgttcatgagaaacatttgcctgtaatttttttttttttttatgatgtgtttttgccaggttttggtattaggataattctggccacataaaatgatttggaaattatttctgcccctctgttttctgtaagagtttatacagaattggtactattttttccttaaatagttgacagactttcccagggaagtcactttggccaagagttttctttgtgggtatgtttttaatgaagaattcaatttattgaagagatatgatactattcaaggtttctgtttcttcctatgtcagttttggtaatttttgtctttcaaggaatttgttcatcaaatctaacttgttaaagtcattggcatgaagttgctcctatctttttatatccacttactgtttataaaatctgtagcgatatcctgctttttttacatcatatggggcacatattggtaatatgtgttcttttctgtttgtaaattgatcatcttagaggtttatcaactttttaaatcttttctaaaaacaaagttttggtttgattgattttctttattgttttatatattattaatttttgttctttattctttcttcactctctggttttgttttctagctacctaggaagcttacataattaatttcatatctttcttcttttccatcataagcatttatagctatacattctctctaaccactattttagctgtattcccccaaattttattgtttattatcattcaggtgaaaataatttctgatttcccttttaatttcttcttcgaacctgggattatttagaactatgttaattttgcaatactgggagattttctagatagttttttgatatttatttctaattcaattttgctatggccaagaatataattcatattaattcagtcttttcaaatgtttgagaattggtttatggaccaacctatggtataacttagtgaatgttctgtgagcacttgaaaaggatgtatgttctgcagttgttgggcattgtgttctgtaaatgtcagttatatttagttggttgatgtttaggtcttcattatttttactgattaaaaaaattttttttgttaattcctgagaaatgagtattgaaatttttagtgtaatagttgttttatttccctctttacatttttgcttcatgtaattggaaactattattgtgtgcatatatatttaagaagagtaatttataaatcttctatgattagtgtttttatgttctgcttacaagaggtcacattggtctgttttccatcttaaattaatatttgtgtaccgtatgaagtagatagaagttaaggttattttttgccccatatgaataaccagttgactaagccacatgttttgaaatgaccaatatttcttcactgaaatgcaatggcacatctgttccaaattaggtaactgtatgtgagtatgtttttttggactctattctgttccatttgtctatttgttcatttttgtgctaataccaatctgcttgttctatctttatgataaatcttgatgtctgataatataaatctttagtttgctcttcaagattgttttggctattgtaaatcctttgtttttcacagactttaggatcaacttgtaaatttccacaaaaactgctaggattttaattggaagtgggttgaatctatagattaatttggaaaagaaccgacatctgaaccatactgagtttttctgtattcttatatcagcatggtctatccctctcttatttagctagcatttattttttgtagaaatgttttacagtttttattgcacagtttttacagatatttccatagatgtattcctaggtatttgattttttgttactattgtaaatgatactatttttaaatgttcatttaaaaaattgtttgcttctgacatacagaaatgcagttgatttttatatattggtcttgcatcttgtgactttgctaaattcactcagtgattggtagattcttttaaatttcctacatatacagacatgtcctctatgaatactgacaattttacttatcctttctaatcatcataacttttatttagttttcttgccttattgcactagccacaatgtccactatggtattgaatagaaatcatgattttagacatgattgttacgtttttgaactctagaagaacaagatcaatattttaccattaggtatattgtttttttactgttaccctttatcagagtgaggaagtttgcttttattcctagtttgagattttaaaatcatgaacattggttaaattttattaggagtagtttctgcatctattgaaatgatcatatggtgtgttttctcattgtgctaataatgtaaaatatattgactatttaaaaaatttttttctaaattacataaaaattgtatatatggtgtacaacatgacattttgttatatgtatacattgcagaatggcaaaatcagtctaattaacatatgtatcacctcacatacttatcttttgtggtgagaacacttaaaatctactcttagcaattttcaagtatacgatatattgttattggtaatcaccatgatgtacaatagatctcttcagtttactcctcctatctaacagaaatttcgtatcctttgaccaacgtctcccattcctcctaatgggaccctcagcctctggtaactgctgttctacttactctctgcttctatgatttctacttttttagattctatggatcagtgagatcatacagttttgtctttctgtgcctagctttatttcacttaatataatgtcttccaggttcatccatgttgttgtaaatgacaagattttcttctttttttaaggctgaattatattctattgtgtacatatgctgtattttctttatcagttcatctgttgatggacacttaggttgattctttatcttggctattaagaataatgctgcaatgagcatgggagtgtagatattgctttgacatattatttttagttccaatacccagaagtgggattgctaaatcatatggtagttccattttaattttttgaggaacctccattcattttccatagtgactgtaaaaatttacattttccccccaagagtatacaagagtttctttttctccacacactcaccaatgcttgttatccttatatctttttgataaggctcattgtaacaggcatgaggtgagatctcactatggttttaatttgcatttagtgatgttgaacgttttttcatgaacatgttggccatttacatattgtcttttttttttttttttgagacagagtcttgctctgttgcctaggctgaagtgcagtggtgtgatcatagctcactgcagccttgacctcccaagcgcaagtgatcctcctccttcagcctcctgagtagttgggactgcaggcatgtgccagcatgcctggctaatttttttttttttttttttttttttttnnnnnnnnnnnnnnnnnnnntcactgtgttgcccaggctggtcttgaactcctggtctcaagtaatcctcccaccttggcctcccaaagttttgggattacagggttgagccactgcacccagtctgtattgtcctttgaggaatatctgttccggtcctttgcccatttttaaatcaggttatttgttttcttgcttttgagttgtttgcatttcttatctattttggatattaactccttatcatatggatggcttgaaaatattttctcctgttttataggttgtcccttcactctgttaattgtttcccttgctgtgtacaagtttttaaatctggtataatgattgatttctaaatgttaactttgcactcctgggggtaaattcatttggtcaagatgtattcttttaaagtgttattggatttaatttgctagtattttgtttagcatttttttccaaatatgtttatgagagagattccagtgtaatttttttccttttcatgtccttacatattttggtatcatgtttatactctcattttaagaatgtgggtaagtgttttttattttctatttcctgagagagtttgtataagctcaatgtttcttcctcagacatttggaaaaatttaccagcaaagtcactgggcattacattttctatgtggaaaagttttaaatggtatattctgagggctctgttctgttccattgatctatatctctgttttgctaccagtaccatgctgttttggttactgtagccttgtagtatagtttgaagtcaggtagcgtgatgcctccagctttgttcttttggcttaggattgacctggcgatgcaggctcttttttggttccatatgaactttaaagtagttttttccaattctgtgaagaaagtcattggtagcttgatggggatggcattgaatctataaatgaccttgggcagtatggccattttcacgatattgattcttcctacccatgagcatggaatgttcttccatttgtttgtatcctcttttatttcattgagcagtggtttgtagttctccttgaagaggtccttcacatcccttgtaagttggattcctaggtattttattctctttgaagcaattgtgaacgggagttcactcatgatttggctctctgtgtgttattggtgtataagaatgcttgtgatttttgtacattgattttgtatgctgagactttgctgaagttgcttatcagcttaaggagattttgggctgagacaatggggttttctagatatacaatcatggtatattcaatttttaaattactgtatttgtttgttctcatattgctataaagagctatctgagactgggtagtttttaaagaaaagttgtttaattgactcatggttccataggctgtacacaaggcatggctgggaaggcctcaggaaatttacaatcatggtagaaggtgaaggggaaaaaagtacatcttcatacagcaacaggaaagagacagcaaaggacgacatgctgcaaaaatttaaataaccagatctcatgcaaactcactcactatcatgagactagcaaagcgtaaatccatcccatgacccagtcacctctcaccaggccactcctctaacactgaagatcataattcaacatgagatttgggtggggacacagaaccaaaccatatcaattatatatagaattattcaaattttatatttcttcttgtgctagtttaggtaaattgttttaaaaggaacttcatttgtttttaaattggagaatattcctgttgtcttttacatgtttcaatattgtaagctctggtaataatgtctactttttaattcccgatattgataatttatgttttatcttctttttttcttgatcagtctttctagtgttttatcaattttaatgcttttaaaaagccaacgttttactttgcttttctttattttatttttatttttctctgatttctgctcttaagtactttcatttttatggtttttggcttaatttgttgcaacttcttgaaatgaaaatttatttaataacattgttcagcctttcttctcgtcttgtgtatgaatttaagattatgaatatcttagtatacacttttactgcgttttactcattttcattattgattcaaagtatttttaaagttattctttgtaccatgggttctatgaaaatatattgattaatttacaaatatatgcgggtttctagttatttttctgtatatgctgtggtacttttgtcagtggttatattttccataagagatttttaatttaggtgccattggcaaatttccattaattcaaatgcagaacttcacatttttcaatgcatacgtgagttttttttgttgaggtattaagaatagcataaatttataaaatattaagtaatcattgaatgcaaaatatgtcctattttgcaacttaatatacttttattaggttgacgctaaagtaattgcgttttttactcatactttaatggcaaaaaccacaattacttttgcaccagtctaataatgagaattattattattattatattgtcttttttttttttggagtggagtctcactctgtcacccaggctgaactgcagtggtgtgatatctgagccttggctcactgcaatctctgcctcccaggttcaagcaattctcctatctcagcctcccaagtagctgggattacaggcacgtgccaccacgcctggctaatttttgtgttttcactggagaacagggtctcactacattggcctggctggcctggaattcctgacctcaaatgatccccccgcctcggcctcccaaagtgctgggattacaggcatgagccaccgcgcctggccctaataatgagaattcttatcaaactgtttacacagaataacatgagtgggtaatggtgaagctgagtttcacatttttatgcgatattcttcagtgttgctatttgttcagtacttttaagaattatataaattttttatagtctatacataaagtcaatattatgggtcccaaatatataaaatgtttgcttgttccattgtttatgttttgaatacaaattatattttgtatgatttcattaataatttgttgagaattttatggcctaacatgtggtctactttctaaaatattccagcttcatttgaaaaggatatgcattcttcagttgttaggtgtttgcttttgattgcttgtatttctcagtcaaatgtaggaagtggagattaagaaaagggctggcacttttggtgattgaggaggagaaagtatgagatagttgtcttggatagtggaagagtaaatgttctaaagaaatataaaatgatagttgagcagcactaagggcccatttgagtatgaatctaaagagggaccaatctgaatgcatgtgttttcatcagtgatttttatatgtgtgggtaaaagctctgagtagacagagataaactgaactcttttagagtttctttgttatctttggtgtttggatcctttgctttgatttgtatcggtacagtttttaaaaaattaaatgttatctcctctcagcagatctttttaacatgaacccagcatctttaacaccaataaaatttcttctattatttttcttccctgtgttttcattcgtcctccatctagagcttctctttagaattgtactccctggattgatcctcttatttcttacttttatgctcataatatttttttctttctgtctgtctctttctctttctgagtctaggacctgggagtttgtcttgactgtcttccaaattatgagtttgatcctttgagtcgtattattcaactctttcactgaattgtcatctatctctttttctttaatgtatagagaatttattatgcacagccacttgcaaactttaacaagtatgattagagcagcattttctataacagcaacacataagttggaacaacacaaatcttaaaataactggaatggatgagcaaattgggtggtccgaggctcagacatcagcaggtgttaaacacctgtgggaaaggagagaacgatccatttatttatttctataggaaatgcaaaagaggcaaaattaagaaaaatactgcttcatgataaagaataaagccgtgaagaatatccacaaaattgtgtatagtggctacatctgatacagaatggaaacagccaggatagagcagcacaggaacactatgaaatgcccaggctgtcttcattactagtcaggatttttttttttaattttgtaaactttatttattctctgctcctttttcataatctagtgatgctttatgttttcaaaatattcttaaatctctctgagaataccgagaaagattttaaaccaagttatcttccctgcattatctgtttcttctggggtcagttgttttctggtccattttggtcttactcttttattcctacaacccctgccccatccccatcctaactgtaataatccttgataatcattgcatatttatgctttttatgtgtgtgcagacaactgtttttatgcttatagatgccttcctctgtgtattttttttcttcagttaaaattttttttttttgcagtcacagtcttgctctgttgcccaggctggagtgaagtggtgccaacctagctcactgcaggctcaaactcataagcttaagccgtcctcccatttcagcctcccaagtagctagtactacaggtgcacactacatgctggctaatttttagatttcttttttgtagagacagggtctcgcaatgttgccggggctagtcttgagctccaggctcaaacgatcctctcgccttggacttccaaattgctgggattggaggcatgagccatcgcacctagcctatgtatgttttaaatagagtctatttcctctactctgtcattctagtcctatctacttttgatcttcctggaattactgtaaatttctgatttgctgatagcaccttttcttatttgtcggagccgccatgaattcgtttatataaacttttaattttactccttttagctactgttgttacctgttttacttttatatctattttaagccctaccatacaccgttattattcatgctttaaacaattgtcagttgtcttttttttttttagacggagtctcgctctgtcgcccaggctggagtgcagtaaacatgacctccgttgcaacctctgccttcggggttcaagcaattctcctgcctcagcctcccgtgtagctgggattacaggcgtgtaccactatgcccggctaatttttatatttttagtacagacagggtttcaccatgttggccaggttggtctcgaactcctgacctcaggtgattcacccgcctcggcctcccaaatgctgggattacaggcgtgggccaccacgcctggctgtcagttgccttttaatacatttaataaatggaagaagaataatattataattaatcacatatttactatttttgagctcttcattcctttctgtaaacctgagtttacatgtaatatttcctttaatccacatgattttctttatcagttcttgagtgtgagtttgttggtgatgtactctctcagcatccatttatctgaaaacatatttgttttgccttgaattttgaaaattcttattttttataatacaacagatccagtagtatgagaattatttttcaggattgtagaattctgggttgacagctttccccctctccctaccagtactttgtcttctggcctccattacttctgaagcgatgtcagttctatttcttgtcttggttctcctgtatgtatgtgactgcttttaagattatctttttgtctttggtttttagcagtttggctataatgtgacttaagtatggatttgtatagattggattcagatgaactttttggatcggtggtttgatttttttaaacaaacttggaaaacatttagccagtattttttcaagtatttcctctgttccacttatatgtatcagactttgttactcttgttgttcagtggtgtgatcacggctttctgcagcctcaaactcctgagcgcaagtaatcctcctacctcagcctcccaagtagctgggactacgggcacagagcaccatgcccagcaaattaaaaaaaaatttttttgtagagatggggtcttgctatgttgccagggctagtcttgaactcctggactcaagcaatcctcctgccttggcctcccaaaatgttgggattaaaggcatgagccatgactcctggcctagatttcttgatattgtagagtttacatatggcttctttatcttcatgcattatattaattttttactgtaaattctattacatatgtatcatagtaaacaaagtctttaaaataaattctaatatttgggtctgctttgggtccatttctattatatatattcttcttttcatgtttaataagtttcagctgactattgtacattgtgggtgatacagtgtagaaactccggatgatgtggatttcaatctttctctgaagtaatgagttttgttctagcaggcagttaaatttactagcagaccaacttgatcctgcggaggcttggttttaggctttgttgggacaggtctatttcagttttgccattacttctggtaagtggctcttattcttcaagtgtggcttttctggcgtttcagtggaaagcctgagatatttaccagttccctctaacactaaatcctgactctccaggaccagatagctgttgaaatctcttcccagttctttcagatttctagctattgcctgtccctgggcttcgattttcatcctatggatgggaattcaggagtcaggccccactgactcccattttcctgagatttctgccctcaatttttggcttttctagcagctccaaacttcattctctgatactttcacccagtaagactgcagctttttacaagagctctgtcccctcctctggcccctgcctgtacacaacagactgtgtatgtagttgtctcaggatggaagaagagtaagtatgggcctcattcagtgtattccccttctttcaagggtcatatccccccgatttgtatctgcttttgtttctttgacaatgccttcaaatggtgtttttataaatatatatttttaaaaagtttataattgtcgtcatcaggaacattagtgtagtataaactactctctcattatcaaaaatctgtatgttaaaaattacttaaaattgttgttatttatcatttccttggtgtttggggcagaagggaatgcacatgatttttctgaacttctcattaagggaggcaacccagccttggtctggagatcccgaaattataccgtatgtataataaaataattattttgttatttttatgagcatagcattaataaattaaatatttagtaagatttgtatctcaggatttttctacctgctaagaatagatcgtttgacaaggcagatgaggttctttgttgaattataaggtattgaagcctataatttagtagtggaaagagcacatagcaagagttgtatgatgaggttggagaggtaagcagcaaacagataatggaattttagtctaaacattcgtaaaatatgagggtggctcctgtgggagattaggttattgggaggcaaagtagacttagggaaaatagttaggaggacattgcaatagttcaggagagaaataatagctgtttagtgtatgatggtagttgtggaaaaaaaagccaatggatggatttgaaatatagtttggaagtaaaactatcagtacatattgatggactggatataggggtgaaaaaagagaagaataaaggttgaccaaattctttattatctcaaagtatgaaagcttgttaagacctcttttctgtttgtattttctttcttgctcaataagaaaacaacccaaagcactttttttctaataacttatatcttcttcttttgtgataaaaaaaaataggagtggtctttagagtacaatacaaaattcttttacatttcacctcaccatatttaggtttaccaaagtagtataggaataattgtaggaaaaacatagtatatctacttggactataaaattttggtatactaaagaaagtaaatcaaaatggttatatcttgcaatagaatgcaaaatcacatggatattaaaggtaaacatttaaatgtattttatattcttggcttcttcttcagaccactccattgccttttgggacatttctgtggaaaagttgagaagcactgacctatctgaaccttccaatccagccaaacttgtctctactttgttccaggaacatgctgtgtacattcctctttccatgttttgcatgcttttctccctgccaataatgccctgtttttcattacttgtcaaaattctattttccttttaaggtccagcctatgttttaattgttgtgtgaaacttctaaaacctttctttgttttaaataattatgatcattttcttcttgtcattttgtagcacttaatttttaaaatttattttgtacttagatgatgtgtaatttactataaatcatagatttttaagaattgggaggaacagcggaaatttaattaagtaattttattatacaagtgaggaagctgagattcatttgtcatgtaagtagtttgcaataagaaaggatgaaacttatttttaggtctcttggctcccaggttagtaatttttctaatctactgcattacttcttcatgtatatttattgatctgaaaagttgtgtctcttagaattatgtagtatatgagtaaagtttgaaaatatgaacttttaaaatgtgatatttgaggtactggtttttgagtgtatgtgtacagttgattaaaatttattataacttttatttactctttctttttttttttttttttttcgtagagacaggttctcactatgttgcccaggctggacttgaactcctgagctaaagtgatcctctcaccttggcttcccagagtgcagggattacaggtgtgagccactgtacccagcctcttatttactctttattcaacagatttgttaatcaacacatgttgaccagacttaattacagcttttatatactcttcatttattcaacaactttcatgtgtcagagagtatcctaggcactgagtgcagtagtaaataatacattaaggttcttaccttcaagaaactttcattctagtggtacaagacaatgagcaaaatcataatctaatctatggtgggaaaatatcagaacagctgtggccacttgagtggttggagcagggactgatggagaaggagcatggaagaactttctgggatgctgataatttcttagggctttgggttacataggtatatgcagtgtccaaacttattgactggtacacttaagatttgtgcatttgattgtatttaggagggaaaatcctgtaaaactagaatagatgtaacttatatgagagttataaatgacaatatgttaaacacccatgaaactaccacccaccccaggaactagaatgttgccagcaatttgcacctacatatgtgtttctccctagctattctcctgtctatcttgcagaagtaaccattgtgtattgtattttgggattaacatttccttgattttttattttttttttgcgggggcggggggagatttgtttaacacatgtatatgcctaaacaatgtactattcagttttgcttgtttttgaaatttagaaaaacggtattttacagcttacagttttctataatttactgcttttgcaacattgtatttttaagatttatccatgttgcataaagctatagttcatttattttaacaactgaggaacagattctgtagtataaatgcacaaaagtatttacctattttcctgatagtttgggttgtttgcagtttttgccattggaagctgaggcgcaatgaatattcttgtaatgtgtctcttggtgtaaatatgcatgaagtttgtaactagacgtagaattgtagcagttctcagaacgtggtctctagaggatgcctgggtatcctaaaaacctattcaagggtttaatgaaattaaaatgattttcataataatgccaagatgttaaatgtctttttcattgagttgacatatgcacaaatggtacagaagtaatagtgagttaaacggctggcaccttagcacaaatcaaagcagtaatgctggttgtagttgtgatcattgtattctttttctttttcttttcttttttttttttttgagacaaggtctcactttgttactcaggttggagtgcagtggcatgagcacaatcactgctcactgcggcctcggtctcctgggctcaagtgatcctattgttttctttctcgtcatgtacttccaggaaaagaaaaaagccaattcgagtcacttattcttttgattctttttcgtagcaaagcatcaatgcattttctaaatgattgaattcatttaaattcgggaaacatttactgagtgcctatggaattctgggatatgagtgtatgtttaaggcagtgtgatttccagttaccatcctttctgttctaaacacgattgtgtcatattaaaatataaaaagagtaaaaaatatcctgaataaaaatagatcaagctgtacatatatatagattataagtgcaaaatactgagtgtggttaaagcctatgctatgcttgctgggtttcctgtacagaagtaggcattggagacagttttgctcttgtggtacaacatggatgactagaggcaggtccaggatgttacttttactgccagccgtcgcttccctccaaatagactattggaaggggaacctcccgccaaacgctgcctactgctatagtgttggataagttgcaagcttaggaagatgagatgacatgatttaggaacttcaggatgaagtgaagtatctcctgccttgtgactgactggatctgcatcgtatcagatacctcctcaaggcaggaattttaacctgctgttataagacctggttctatatatggatagcccaggtaggctaagttgtggcagccacagattgttagatgaggagggacaccacagactgtgtatgtgtgtgtgttgagggcaaggtgaggtgaggaatggtgcaatgagcctgcaaaccaaattgcaaaatatatgaagaaatgtagtgctaagaaaaatagtcaacaaaattaaaaattgaaaaatgaattttttcctgataaaatttaaaaatgtaagtaaacctctaattgaagtgtaacacacaaacaggaaagtatgctactcataaatgcacagcttaacaaattttcataaagtgaacacacctttgttaaccactacttagatcaagaaatagagtatcacctgaattactggcaggaggcaccccagaggtctccctgtacctcctgccagttattctccatgccctcccactatcccaaccctgccaagctaaccattatcctaactttttttcaccatgagaaagaaatggaaggatatggaagtgagcttgagaggcctccatggtcagtgaacagttctgctaaaataatttagagggaataacaaagaagtagcatttgacggcatagtagctgagaatttcctagaatagaaaaaagacatgaatctttagattaaaagtatgtagtcatttttgatcaagataaagaagaatctacatcaaaacctttccaaaaatattgcagaacattgctgctaatgcaaacaagttttaaactacttgagggaaagccatgacatgtaggagtgatagcagacttcatatttatgttaatagataccacaaaacaatgcagtaatatctttaaagttctggggaaagaaaattataaataggattttgagagtgagggcaacatatttttttcaaagactacaacttaaaaacccacagagccccactgaaaggtctactaaaagatacatttcagcaggaaaaagtgagtcctgaaggaagacccaaaacaatgatgagcacaaaacaatccaaagtcagtggtgggcacaaactgataaaattctagcaaatttactccttaatgctaagaacttcgtttaaattaactttctatcttttcagaaaaccaactcttagatttgttaatcttttccatcatttttatagtttctatgtcatttatttctgctgtgaacttcattttttccttccttctgttagctttgggctttgttcttctttttctagttccttgaggtgtaatgtaatgttgtttgacatctttcttcctttttgatgtaggtatttattgctataaacttccctcttataactgcttttgctgcatttaatactgactataataagatacgatgtaatagatttcaaggaattatgtatttttgaataaattaattctttaaagttgcatatccagttgcagatgaacttcaaaaatcttgcagttttatatctgttacagtaattgccaggttttgttgttgttgttttgatacattagaagttctagaattgttatatcctcttgatgaattaatccctttatcattctagaattaccttgtctctttactgtttgtgacttaaagtctgttgtatctgatatacctttgcatggaatatctttttctatccctttactttcagtctatgtgtatctttaaaggtgagatgaggttttgtaagtggcatgtagttgggtcatgttttttagtccatttagccattctctatcttttaagtggaaagtttaatctatttacattcaagtttattcttgatatgtgaaggcttattcctgtcattttattaattgatttctggttgttctgtaggtcctttgttcttttctttctctcatattgtttagcattgtggtttgttggttttctatagtgataacatttgaatcctttcttgtctgtgtgtgtttgctttaccagtgggtttgatactttcgtcatctgtttttcataatggtagtaattgtcctttttgtttgtttgtttgtttcttttttgagacagggttttgctcttgttctgtcctccaggctggagtgcagtggtgtgatcatggctcactgcagcctcgacctccatggtctcaggtgatccttctgcctcagcctctcaggtagctgggactacagaaacctgccaccatgcctggctaattcttttgtatttttcgtagacatggggttttgccatgttgtccaggctgctcttgaactcctgggctcaagcagtctgcctgcctcagccacccaaagtgctaggattacaggcttgagccactgtgcctggcctgacattgttctttgacttccatatgtagaactccctcaagcatttcttgtaggtctggtctagtagtgttgaattcctcagcttttgcttgcctcagaaaaactatttttcctttgcttaatgaaggataattttgctgggtatagtatccttgacttgcaggtttttttctttcagcacttttcatatatcgttccattctcttcctggcctgtaatgattctgctgagaaatctgctgttagtctgatggagcttcccttagaagtgactagactcttttttcttgctgtttttagaattctctctttgtctttgacaagctgttgtctctgacaacagttctctctttgtctttgacaaactgttgacagtttgactctaatgtgttgtggagaacctgttggaattttgtctttttggggatctctgagcttctgtatctgaatgtctaaatctcttgatatacttgggtagttttcagctattatttcattaaccaggttttctattccttttgtattttcattgtcttctagaatactgaaaattctaatattagtttgctttatggtatcccatatgtcatgcaggctttgttcattcttttttctttatttttgtctaatggggttatttcagaagacctgtcttcaagttcagaaattctttcttcgtagatgctctagaatgtattttttatttcattaaatgaattcttcagtttcagggtttcttgttttctttttaaatgatatctctctctttggtaaatttctcattgatatcctgagttgtttttctggtttctttgtattgtttatctgtatgcgtttgtatctccctgagcttctttaatatcattatttttaattctttttctggcatttcatgaatttcttttgcattggaatcttttggtagaaaattattttgatcctttggagatgtcatatttccctatgttcccatgtttcttgtgaccttacttctttgatatccacacatctggtgtaatcatcacttccatttttttgaatttgctttcatagggtaggactttttcctgaagatttgactggggtgtttgttggccagggcactttgggtttgaatctgggtgcatgcagtagtgtagtctctgtaagattttttttcctttgtaaacagcatcagtggtgtctgtgatttcctcagtggcatagtgtgtggttgtggaggctgtggtgaacttttgctggggatggtgacaccagctggactgatcctcagtcctcagttgtggcagcagttggacaaccatgcctgtacattagccccagggtggcttacattagtaatggtgttagtgggtccaggcagtccaatttttgggtctccaggtgacttgtttgggtaccaggagtggcagtgatgggctgggcagctgagtgggtccacaggcccctgggcagtgagcatggcatgggttatgtcagtagcagtggtaggagaacctctggctgtccagttgtctgtgcttatgtcggcagtgacggcgattggctgggtaggcaagtcctaaaacctgcaggtggcaagtgtgagtgggaaccagctgtggtggtagtggcaggttgggtgggccacatcctcagacccccaggtggaatgctcagttgacactggacgtggacaaactggtgcgatcccaaggcccccagataacatgcttggatacgtgggagtggggtgctgagctgggcagggtgagagtatcctcaggccctccagtggtgttagcaggtgctgtttgtggtgggcaggagcaggatgatttccaatttcctggtggaatgttcaggtgggggcagcagtggctgtgctgtgccctgatgctggggagggtgcggttgctgtcagtgggagcagttgtagggagttggctaaggagtgtgcactgcagctgcaggtggaggctgtagatgtgatgaagctgtactcagggtgcatgcaaatttgcattttgacacctagcggcagcagcctgcaatggtggcagctgtaggtggtagagcttgtcctcagggcacataccaatatatggcagcccttctgctgggagcagtggggttattgccaatggcttgtgctttggtcccagaggcggcagccagcaatggaggtgactgtcggtggaggatgtcagtggggctctaggggtgtggatatgcaggggctgttgggctccagggtaggaggcattctggtgtgggttgggctttaaaaatggcaccgtgctgtagctgcttaggactcaggggtgtgttggaccagcataagctccctctctaaagcaatgtcattgtgcagtctccaggcagctccctatgttactcccagggcccatgaaagttgacgggctctcttgtgtctgggattgcaggagtttgcagtgaaaatgtgggccactgggagtctctcacttactctttccccacattgtgcaggctctctaggcttctggctgatcctggctgagcaggctgccccacttccctctccttccttgcattaggtgttttctatcacttctctgttgaatttccgtgttctctcttagatgacctattcaaagtgtgattatctactcgctattttggttcttctttgtggagcaggtgagtaccagataactctagtcaaccttctggacccctcttcccccaatttgagatctcttcttctgttgtctgtaactgagtttaatgcttgtttgttcatgttaggattttatatcatcgtcctcaattaggttgttaactggaattttataatctttgtccacaggaagtttaaaatgtatgatttcttgcattgtgctttgtatgtagtaatacacgatatttatccagttaatggatttgacagccattgctgtcaaggagcagtccttctttgtgtatgaagggtgccttatcaatattatttccatttgtaactttatttatttatgtattcatttttgagacagggtcttgctgtgtcacccagactggagtgcggtggagtgcggaggtttgctgcagcctcatcctcccaggttcaagcaattcttccgctccactcccagagtagctaggactacaagtgcgtgctgccacgcccagctaatttttttcttttgtatgtttttgtagagatgaggtttcaccatgttgctgaggcttgtctccaacttctgggctcaagctatctgcccgcctcggccccgcaaagtgctaggattacaggtgtgagacactgcgcccagcccatttgtaactttattgttttctcttacaggcaaatgttctgaaaaagactctgcatgggaatggcctgccttacgatgacagaaatggagggaacatccacctcttctatatatcagaatggtgatatttctggaaatgccaattctatgaagcaaatagatccagttcttcaggtgtatctttaccattcccttgggaaatctgaggcagattatctgacctttccatctggggagtatgttgcagaagaaatctgtattgctgcttctaaagcttgtggtaagtattaaaaaacagcattttcctttttatgcatggattgttttaattatgctatgctaatactaggtacatgcataatatatatttttatttttttaatgcttgtatggctggcgtgtgtgttttcacatgcatagaaaatgaaagtgttactggagtacaatttatggtgaatctgccttgggctaggtatcaaaacaaattgatgcccataaatgtttgctgactattctttataattacatataaggtggttaaaaaatcctgtcatgggctatctcatgacataaggtaatattaaagctagatcctgagagcaacatgaaagcaaaaaattaatgttttgaaatatgtatttgatttaaaatcttgattaaatggctgacaaaccatcattttcttctagttagcttctgaagacctctgccaatctttcctcatatatatttcttatgtctttggtgtatcttgaaatcatttttactcttgagacctgattatattatctatggaccaaaactgtgaaccagagaactctttctatagagctaacacattttactagaccactgaggttactatagagcctactatcatggtatctcatttttaaatgttcttttaatagaaagactagttgacactattttgaagaatagtcgtatgattttatttgtagaggcaaattaaatgtctaatatagtatttataagaatgtatgattacatcaatttattctcttatttaagatcagtataggtcagaataaccattaactgtaagttggaggaagctaggtacatttcaagttccttctagctattttgaaaaatacaatacattgttgttaactatagtcaccctactcttctatcaaacatttgaacttgttccttctgtctgtatttttgtgcccattaaccaacatctcttcatttccctcttcccacccatataaccttgccagtctctgctaccaatccactctaccttcatgtgatcaactttttagctcccacatatgaatgagaacttgttatatttgtctttcagttcctggcttatttcactcgacataatgaccttcagttccatccatgttgctgtgaatgacatgattacattcttttttacgatgccactgggccccaggggagtacgcattctgttgtgagctgggcttcaaaatatcaccttgctgtagctgcttaggactcggggggagcgtgggacccagtgtgaacttcctcactggaataggaaatgcttttgtgctgtctctgggcagccctctatgtgaattttttgtcctgcaaggggctagggtctctcctgtgactaaaattccaggggttcacagtaggaatgtggaccattgggcatctctaacttaacctttccctgtgtggagtctctcctagcttcttgccaatcccggctgggcaggctgtcttgtttcgtctccttccttgcttttctgttgaataccagtgttcctcttggataatctactcaaagtgtgattatatactcatggttttagtttttagtggggaagtggatatgagagacctctggtcagttatcttgactatattgtaaagtctgtattttttgttgtgtgtagtctctgaaatctctgatcctttagcttatagtaagattttagcttgtaagatttttttagcttttaagattttttagcttgtaagatattttttagctagtaagattttagcttgtaagatttttagcttgggccgggcacggtggcttacacctgtaatcccagcactttgggaggctgaggcaggcagatcacaagatcaggagatcgagatcatcctggctaatatggtgaaacctcatctctgctaaaaatacaaaaaattagccaggtgtggtggtgggcacctgtagtcccagctacttgggaggctgaggtgggagaatggcatgaacccaggaggcggagcttgcagtgagccgagattgcgccactgcactccagcctgggcgacagagcgagactccatctcaaaaaaaaatttttttttggcttgtaagattcatttttagcatgtaagattttgctttagcttgtaagatttttttttgacagattttattgaattcctagggccaaaagaaaataatagaaaagaacaaaaaactctttcagtctttgcagattggctctgtgttggggctctcattcagtgtttacccagtccatttacaactctgccttagccttcccttcctgcttgtgctgactctaaagaacagcttgaggtgaaagcttagggtcttttcttctaagttctgttccttgggcatgcatatggcttttctactctccaatacatagaaatgcttttcagtgctgtcatttcccaaataaactctcctctgtcatctctgttttggttttcagtgtgtttattgtttgcctcaactttagacctctgccccagatagcaacagcttgttcatttgcaatgttttcaatgaatatcttctgtgaagctgcttttctgccctgagaaagtcctgaattaagtggaacataggtgtgctctttgcatcatttcttcagtcagtccccagtcagggcaaaagagagaaaaacagttttttgagattaaggttggctctgttcactccagagccagggaccagagtttcacactgggagcaccaattgccatcttcaagactttgcttaactagggggagtggagccggggctggtgggcaggacatgggcgtagtgggtggttaagggaaagtaaaaatgctgcacaactttcctgccatttttaagtggctgttttcttgattcagcatttatctgattgctgcatatctttgcctattttctgtagtttatatgaagttcattctgacagtttttactcattttttttttcctgtttctgggagaaggataggtccttggaactacctactccaccattttcactgatgttactcttttacttttctaatcatggaagtaaagtttaagatttttctatctatattggtgagattacccttggtatcgtagtcaaactaaattcacaaaatgtgtcaatttctctgttcgctcttggtctattctctgtgatagtatacttaagatggaattgtctttcatgtttggttgaactcaaatataaatcttgtctgggcctgatggtggttttttctttcttcattgttattttgttattcttcttccttcccttcttctgtctctttcttgctccttctttcttttcttcttcttttgtttaagtggatagagtttgtttcctttttttttttttgagactgagtcttgctctgttgcccaggctggagtgcagcagcatgattatggcacactgccacctccgccttccaagttcaagtgattcatttccctcagcctcctgactagctggactacaggcacccaccaccacacccagctaatttttgtatttttggtagagacggggtttgccatgttggccaagcttatctcaaactcctgacttcaggtgatccacctgcctcggcctctcaaagtgtgtgagccactgcacccagccagaatctatttctttaatggttatagttctgttgaagttttaaattaatgaatctttttaaagttacattttcacaaaaattgtccatctgtctatattttcaagtttattggcataatgttgttctagcactctttgtcttcataacttataattatgctttttaaaagttcttagtgtttatctgtgcctctttttttcttattatccttgacaaagatctattttgcaaagaatcatcttttattttgttacttctccctattggatttttatcatgtccatctctaacctttctttgggattactctattgtcttctactatattgagttagatacttagatcatttgctcttattttctaatataagcagataaagctacaatttttcctcttgagtttcaccttagttgtattccacaatttttagtacatgatattggtaatcattattcattataaatgcctcccaatgtatttttcctttgacttctgagttatttggaagttatttgtaaataaaagaatgaatgcaagtatactgtttaaaagttgctgctaaataatgttattataaataacttaccgaaattattacacatctgtaagtagacggtcgtgttaataatttaaattaagaatttaagtctttcttgtcagtttgtcatttgtgccgtttctatctacagtggaaaatagtgaaaacataactagaataaaatacttttgtgttctgtgagccttatgttttaaatatataggattaaaaaaattttacatattcatttctgatttaattgaagtgtggttagagaacatggtatgaatggttattctgtggaacttctaaagacttgttttgagttcacgtgattgttgtgtttgtgcttgtgtgtgtacgtgtatgcgtatgtgtgaatgttctatatatgcttgaaaatagcttgtattatttacttgtgtggtttaggtattctcttggttttttagttcagtggctttcaaccatttgttgatgtaccttctaaaatatcttttaagaaattacatatgcactcacattttaagttgatatttaaaatttttcattgtaaattaaaatagcccaaaggacataattattaatgtattgtgtaaaacttgacacattgttcttttaagagtattcatgacttctaaatatttttgtgatttgatacctattaattaaaacaactccttctgtgcaaccacatgcaagcatggatttttattatacctccagttcagggaaacttgaaaatttgaaccaacctttctatagaggacaactgaagaaaccagatgaaatgttttaaaaatatctgcttgaaagagtctcagcagttatattttaaaatactgacacacctcggagatattgtgggtttggttccagactatcgcagtgaagcaaatattgcaataaagcaaatcacatgaagttttaggtttcccagtgcatataaaagttatgtttaaattattctgtagtctgttaagtatgcaataatattatgtccaaaaaagtacataccttaatttaaaaatactttattgtcaaaaagcactcataatcatctgagccttcagtgagtcataatctttttgttagtggagagtcttgccttgatgttgatggctactgactgaccagggtggtggctgctgaaggttgggtggctatggcaatatcttaaaataagacaatgaaggttgctgcatcagtggactcttcctttcgtgaaagatgtctctgtagtatgcaatgctatttgatagcattttacccgcagtagaacttctttgaaaataggaagttgattcactcaaaccctgccactgctttgattaagttgatgtagtattataaatcctttgttgtcatttcaacaatattcacagcatcttcaccaggaatagattccatctcaagaaaccactttctttgctcatccataaaaagcaattccttatatgtccaagttttatcgtgagattacagcaattcagtcacgtcttcaagctccacttctaattttagttctcttgttacttctaccacatctgcagtgacttccttcactgaagattaaatccctcaaagatacccatgagagccagaatcagcttcttccaaactcctgttaatgttgacattttgacctcctctcatgaactacaaatgtttttcatgacgtctagaatggtgaactctttccataagtttttttatttactttgcttagatctgtgagaggaaacactgtgacagccataaccttactaaatgtgtttcccaaataataagatttgaaagtcaaattgctccttatccatgggctgcagaatggatgttgtgttagcaggcatgaaaacaacatgaaattcaatgtacatcttcatcagagctcttgggtgaccaggtgcattgtcaatgagtaataatacttggacaggaatctttttttctgagctttaggtctcaacggtggcttaaaatattcagtaaaccacgctatatacagatgtgctatcttctaggctttgttgtcccatttatagagcacaggcagggtaattgagcatagttcttaatggccatagattttcagaatggtcaataagcattggcttcaactaaaagtcacttgttgcattagctcctcagaagagagtcattcagttctttgaaactttgaaggcaagcactgacttctttctagctatgaaactactcctagatggtatcttcttccaatagaaggctgttttgtctacactgaaaatctattgtttatcagtgatctttgttagatctttggataacttgctgcatcctctccatcaacacttgctgcttcaccttgcacttttatgttagggacatggtttcttttcttaaacctcatgaaccagcctctactagcttcttgcttttcttctgcagcttcctcacctctctcagccttcacaggtttgaagacaattagggccttgctctggtttagggtttggcttgagggaatattgtggctggtttgatcttctatctagaccactcaaacttttgtcacatcatcaataaggctgttttgctctcttatcatttatgtatttactgcagtcgcatttttaatttcattcaaaaactttttctttgcattcagaacttgattgactggtgcaggaggcctggcttttagcctctcttggcttttaataataccttcctcacttagtttaattatttctagcttttgatttaaagtgagagatatgaaactctttaatatatgaaactcttcctttcccttgaatgcctagaggccattgtaggattattaattggcctaatttccatattgttgtgtctcagggaatagagaggcctaaggagagggagagacacaggaatggctgttgctggagcggtcagaacacacacagcatttgttgcttatgtttgtcatcttatatgggcacggttcatagcggccccaaatgattacaattgtaatgtcaaagatcactgatcacagatcatcataactgatataataataaaaaagtttgaagtattgcaagaattaccaaaatgtgacatagggacacaaagtgagcacgtgctgttggaaaaatggtgctgacagacttactagattcacacttgctctaaatccttattttgtaaagaaaaaaaccccacaatatctgcaaagtacaataatgcagggtgcactaaaatgaagtatgtttgtataaaaaaagattgtgattaataattcagttgtaggggttggtatatcaaaagatttcgactgctattacattttgttccgattttaagagttgttactttagcttcatttcaaattataggtgctatgtaaaaatattctgttgtgtacctttaataattcctttctctgcttcttttctaggtatcacacctgtgtatcataatatgtttgctttaatgagtgaaacagaaaggatctggtatccacccaaccatgtcttccatatagatgagtcaaccaggcataatgtactctacagaataaggtactttcttcagtaaagtaactcacttaatgctaaaaggcaaaatgggagaaattatcaaatattttttaattgcaaggtacttaataccagatacctgaaccaattagttagcactcatttaagatttcatttaagattctattctgtttctccatcagagaaactgtttatacatgttgtgtaagtagaatactctgagaataaagctgttttggtgggatgccacttaactccttatgattataattaaataagtaaacaaaatcacagtggcctttattaacaaaatcctaaatgtttgggatattgctggtttgtgcagcgttttgtgcaatagaatgcaatttcacatcttatctttataaagaactttttaaaaagttgacgtgaagaaaagagacttttcccagtgtgtatttgcagcctcaaattgtaagttaatttatataatttatggtaatgtgtaatgcctatttagagaaatctagaagtatttttttgctcgaaaggatgaaacaaagatacgtttgatttgtgtctcacaaatacctgtgatttttctaagcatttatatacatatatatataattcatcataacttcatgaggtgttaagatttccacattaaagataaagaatttggagcactgagaagtaatattactcaaatttattcatggtcacacaggtaggaattgggagtcaggttcaaatccaagcctggtttgcttcataagcttgcctcttaatcacctcatgtgtacttcattaaagagataatgtatatataatatttattattgtgcctatcacttggtgctctctcaataaattttagtattgttttgcttctttctcttcccctattctatataaaaatatgcagttggatgtgtttgcatttactgatgtctaatgtataatttgcactgagttcaaaaaaatattttttatataattattgaaaagacaattggtgaaaaaaataaatgttcaaagaaataatagatgtacaaaaatcaacagcattcttatatgcaagcaaccagttatataatagataaagaagatcctatgcagtgtagctacaaaaacccttaactaaccaggaatggtcttaataagaaaaaacagaagacagtataggaaaattagaaagttatttgaagaatatgaagaattaggacataacattggaatggggagatggaatattacaaagatcaatttctcttatgctatatccttagctctaagccaatcaaaatcctaacaaaggcattttacggaatttgacacattactatgtaaattgagaattattaaataagatagccatgagaaagaagacttacctggcaattgtaaaatattttgtcccaggagatattttcacattatatgaaactacaaaatggtatctattattaaagccacataattaaattcagaatcataaactaaataatgagaatgatggggccagtatatcttgaaagtactccttcatacatatagaaacataataatatgaagaaatcttttcatattaacgtggaagggagagattagtcaacaaatggtggtagaatagttgattagctgtttgaataaaattttagcttcttactttataatgtatatcagataaattatagattgattaaagatcagattgatatgtaaatagaaatgtaaagaaaatcaaactataaaagtctgaattggaactgaattcaagtccttgggaaaataccatttaagttgcaaaacaatagaaaaaatcatatgggaatgactgcaattgtcaactataaaaattttcaaatgtctgaaggtttcctcttaaaatgaaaaggcaggagggtggagccaagatgactgaataggaacaggtccagtctacagctcccagcatgggcgatgcagaagacgggtgatttctgcatttccaactgaggtgtaccgggttcgtctcactggggagtgtaggaaagtgagtgtaggacagtgggtgcagcacactgagcatgagccgaagcagggcgaggcatcgccacacccgggaagcgcaaagggtcagggaattccctttcctagtcaaagaaaggggtgacagacggcacctggaaaatcgggtcactcccactctaatactgcgctattctaacggtattagcaaatggcacatatcccgcgcctggctcagagggtcctacgcccacggagcctcgctcattgctagcacagcagtctgagatcaaactgcaaggtggcagcgaggctgggggaggggcgcccgccattgccgagggttgagtaggtaaacaaagcagccaggaagctcaaactgggtggagcccaccacagctcaaggaggcctgccggcctctgtagactccacctctgggggcagggcatagccaaacaaaaggcagcagaatcctttgcagacttaaatgtccctgtctgacagctttgaagagtagtggttctcccagaatgcagctggagatctgagaacggacagactgcctcatcaagtgggtccctgaaccccgagtagcctaactgggaggcacccccaagtagggggagactgacacctcacatggccgggtactcctctgagacaaaacttccagaggaacagtcaggcagcaacatttgctgctcaccaatatccgctgttctgcagccactgctgctggtacccaggcaaacagggtctggagtggacctccagcaaactccaacagacctgcagcagagggtcctgactgtcagaaggaaaactaacaaacagaaatgacatccacaccaaaaccccatctgtatgtcaccatcatcaaagacaaaaggtagataaaaccacaaagatggggaaaaaacagagcagaaaaactggaaactctaaaaatgagagcacctctcctcctccaaaggaacgcagctccttaccagcaacggaacaaagccggatggagaatgactttgacaagttgagagaagaaggcttcagacgatcaaactactccaagctaaaggaggaagtttgaactcatggcaaagaagttaaaaaccttgaaaaaaaattagacaaatggctaactagaataaccaatgcagagaagtccttaaaggacctgatggagctgaaaaccaaggcacgagaactacgtgatgaatgcacaagcctcagtagccgattcaatcaataggaagaaagggtatcagagatggaagatgaaatgaatgaaatgaagtgagaagagaagtttagagaaaaaggaataaaaggaaacaaacaaagccttcaagaaatatgggactatgtgaaaagaccaaatctacgtctcattggtgtacctgatggggagaatggaaccaagttggaaaacactctgcaggatattatccaggagaacttccctaatctagcgaggcaggcaaacattcaaattcaggaaatagagagaacgccacaaagatactccttgagaagagcaactccaacacacataattgtcagattcaccaaagttgaaatgaaggaaaaaatgttaagggcagccagagagaaaggttgggtaacccacaaagggaagcccatcagactaacagcagatctcttggcagaaactctacaagccagaagagagtgggggccaatattcaacattcttaaagaaaagaattttcaacccagaatgtcatatccagccaaactaagcttcatatgtgaaggagaaataaaatcctttacagacaagcaaatgctgagagattttgtcaccaccaggcctgccctaaaagagctcctgaaggaagcactaaacatagaaaggaacaactggtaccagccactgcaaaaacacgccaaattgtaaagaccatcgaggctaggaagaaactgcatcaactaatgagcaaaataaccaggtaacgtcataaagaccggatcaaattcacccataacaatattaaccttaaacgtaaatgggctaaatgctccaattaaaagacacagactggtaaactggataaagagtcaagacccatcagtgtgctgtattcaggaaacccatctcacgtgcagagacacacataggctcaaaataaagggatggaggaacatctaccaagcaaacggaaaacaaaaaaaggcagggattgcaatcctagtctcggataaaacagactttaaaccaacaaagatcaaaagaaacaaagaaggccattacataatggtaaagggatcaactcaacaaaaagagctaactgtcctaaatatatatgcacccaatacaggagcacccagattcataaagcaagtccttagagacctacaaagagacttagacttccacacaataataatgggagactttaacaccccactgtcaacattagacagatcaacaagacagaaagttaacaaggatatccaggaattgaattcagctctggaccaagcagacctaatagacatctacagaactctccaccccaaatcaacagaatatatattttcagcaccacaccacacctattccaaaattgaccacatagttggaagtaaagcactcctcagcaagtgtaaaagaacagaaattataacaaactgtctctcagaccacagtgcaatcaaactagaactcaggattaagaaactcactcaaaaccactcaactacatggaaactgaacaacctgctcctgaatgactactgggtacataacgaaatgacggcagaaataaagatgttctttgaaaccaacgagaacaaagacacaacataccagaatctctgggacacattcaaagcagtgtgtagagggaaatttatagcactaaaggcccacaagagaaagcaggaaagatccaattgacaccctaacatcacaattaaaagaactagaaaaccaagagcaaacacattcaaaagctagcagaaggcaagaaataactgagatcagagcagaactgaaggacatagagagacaaaaaacccttcaaaaaaatcaatgaatgctggagctggtgttttgaaaagatcaacaaaattgatagactgctagcaagaataataagaaaagagagaagaatcaaatacatgcaataaaaaatgataaaggggatatcaacccgatcccacagaaatacaaactaccatcagagaatactataaacacctctacatgaataaactagaaaatctagaataaatggataaattcctggacacatacaccctcccaagactaaaccagaaagaagttgaatctctgcatagaccaataacaggctctgaaattgaggcaataattaatagtttaccaaccaaaaaaagtccaggaccagatggattcacagctgaattctaccagaggtgcaaagaggagctggtaccattccttctgaaactattccaatcaatagaataagagggaatcctccctaactcattttatgaggccagcatcatcctgataccaaagcctggcagagacacaaccaaaaaggagaattttataccaatatccttgatgaacattgatgcaaaaatcctcaacaaaatactggcaaaccgaatccagcagcacatcaaaaagcttatccaccatgatcaagtgggcttcatgcctgggatgcaaggctggttcaacatatgcaaatcaataaacgtaatccagcatataaacagaactaacggcaaaaaccatatgattatctcagaggcagaaaaggtctttggcaaaattcaacaacccttcatgctaaaaactctcaataaattaggtattgatgggacgtgtctcaaaataataagagctatctatgacataccgacagccaatatcatactgaatggacagaaactggaagcattccctttgaaaactggcacaagacagggatgccctctctcaccactcctattcaacatagtgttggaagttctggccagggcagtcaggctggagaaggaaataaaggttatttgattaggaaaagaggaagtcaaattgtccctgtttgcagatgacatgattgtatatctggaaaaccccatcgtctcagcccaaaatctccttaagctgataagcaacttcagcaaagtctcagcatacaaaatcaatgtgcaaaaatcacaagcgttcttacccaccaataacagacaaacagagagccaaatcatgagtgaactcccattcacaattgcttcaaagagaatacctaggaatccaacttacaagggatgtgaaggacctcttcaaggagaactacaaaccactgctcaatgaagtaaaagaggatacaaacaaatggaagaacattccatgctcatgggtaggaagaatcaatattgtgaaaatggccatactgcccaaagtcctttatggattcaatgccatccccatcaagctacagatgactttcttcacagaattggaaaaaactactttaaagttcatatggaaccaaaaaagagcccacattgccaagtcaatcctaagccaaaagaacaaagctggaggcatcacgctacctgacttcaaactatactacaaggctacagtaaccaaaacagcatggtactggtatcaaaacagagatatagaccaatggaaagaaataatgctacctatctacaaccatctgatctttgacaaacctgacaaaaacaagaaatggggaaaggattccctatttaataaatggtgctgggaaaactggctagccatgtgtagaaagctgaaactggatcccttccttacaccttatacaaaaattaattcaagatggattaaagacttaaatgttagacctaaaaccataaaaaccctagaagaaaacctaggcaataccattcaggacataagcatgggcaaggacttcatgtctaaaacaccaaaagcaatggcaacaaaagccagaattgacaaatgggatctcattaaaccaaagagcttctgcacagcaaaagaaactaccatcagagtgaacaggcaacctacagaatgggagaacatttttgtaatctactcatctgataaagggctaatatccagaatatacaatgaactctaacaaatttacaagaaaacaacaaccccatcaaaaagtgggcgaaggatacgaacagacacttcttgaaagaagacatttatgcagccaaaagacatgaaaaaatgctcatcaccactggccatcagagaaatgcaaatcaaaaccacaaagagataccatctcacaccagttagaatggcgatcattaaaaagtcaggaaacaacaggtgctggagaggatgtggagaaataggaacatttttacactgttggtgggactgtaaactagttcaaccattgtggaagtcagtgtggcgattcctcagggatctagaactagaaataccatttgacccagccatcccattactgggtatatacccaaaggattataaatcatgctgctataaagacacatgcacacgtatgtttattgcggcactattcacaataacaaagacttggaaccaagctagatgtccaacaatgatagactggattaagaaaatgtggcacatatacaccatggaatactgtgcagccatgaaaaatgatgagttcatgtcctttgtagggacatggatgaagctggaaaccatcattctcagcaaactatcgcaaggacaaaaaaccaaacactgcatgttctcactcttaggtgggaattgaacaatgagaacacatggacacaggaatggaacatcacataccggggcctgttctggggtggggggatggaggagggatagcattaggaaatatacctaatgttaaatgacgagttactgggtgcagcacaccaacatggcacatgtatacatatgtaactaacctgcatgttgtgcacatgtaccctaaaacttaaagtataatagaaaaaaatgaaaaggcaaattgtaaagatagtttcaacaaatcaaataaacataaggttagtattcttgtaagtatgaaatttaaaacagtgtatccatttaacaattacttaatgtacatgaatatatagcgtcactagttatgagaataatgaacgagattgcttgctttagcacatagttacaactattcattattcttataactagtgatgctgagaattttttgaaaaggccattaatgatttgttcttcttttgttaaatatttcttcatgtacattaaataattgtttaatggatacagtgtttttaatgccaacaaattagaggatcaagatgaaatggacaaattcctagaaagacacaagttataggaactgctaaaagaaagaacagaaagtttgaataggtctatgacaaataaagaaatcaaattagcaatttttataaaagcccaggcccaagtggcttcacttgtgaattctatcacacattaaaaaaattattactagttattcacaaaaaatagaaaaggaaggaggatttctgagctctttctgtgagttcagtattaccctgataacaaattcagacaaagatgtctagaagaaaagaaaactacagaccaatgttgtaggtagaaaatcaacaaaatacttgcaaaccgaatccagcaatacagcttgaatatgtcttatctgaaatgcttgggaccagaagtgttttggattttagatttttttttttttttttggattttagaatatttgcagagtatacgctggttgaacatacctaatataaaaatctaaagtctgaaatgctctgatgaatatttcttttgcacatcaggttagcgctctaaaggttttgaattttggagcatttcggatttcagattttcaggttaggaatgctcagtttgtttataaaaagatgaaatactatgaccaggtgggatttatcccaggaaatacaaggctagtgtaacttccaaaaatcaatcaatgtaatacaccacattaatagaataaatgaccaaaaccacatgatcatcccaagagacacagaaaaagtatttgataaaatccagcatcccatcattataaaaaaactcaacacaataggaatggcaaggaacttcctcaatttgttaaagggcatctgtaaaaaattcaaaagtaatgtcatacttattagtgaaagactgaatgccttttccctatgatcaggaatgagatgaggatagctacttttaccactttgatttaacactatactgtagattcagggtagggaaattaggcaagaaaaagaaataaaaggcatttatattggaaaataagaagtaaaattgtagtcatcccgctgtatccatgggtttcacatccatggattaaaccaactgcagattgaaaatacttggaaaaaaagttgtgcttacactgaacatgtacagactttttcttgtcattactccctaaagaatacggtataacaactatttacataacatttacattgtattaggtattataaatagtctagagattttaaagtatactgaaggatgtgcacaggttatatgcaaatactatgcctttgtatatcaggaacatgagtatttgcagattttggtatgtgtgggaggttctggaactagtactgcatagataccaaaggatgattgtgtattcacagattacatgatcttgcatattaaaaatcctaaggaattaataaaaaaactattagaactaataaatgagctcaggtcagttgcagaatagaagatcaatatataaaaatcagttgtatttctatacagagacaaagaacaatccaaaaatgaaattaaaaaaatttcattaacaatagcataacaaatttttaggaataaacttaaagaagtgtaaaatgtatacactgagaaatataaaacatcattgaaagaaattaaggaaacacctaaataaatggaaagatatctcatagaggacttcatatttttaagatggcaatactccttaattgatctgtatgttcaatgcaattcctactgaattcctaaatgtctttattgcagaaattgacaggttaatcataaatttatataaaaagcaaagggacttagcatagctaaaacaatcttgaaacaatacaaagtttgaagacttatacttcctaattacaaaatttattacaaaaggactgtaatcaagacaatgtgatactaaaggatgaatatacagattaatggaaaggaattgacagtctcaatataatttctcacattgatggtgattgatttttgatcagggtgccaagacaattcatgggcatagaatagtcttttaaactaacagtgcggggacaactggatatccacatgtaaactaatgaagtaagacaatctacttcacactatatacaaaaaaaaaaagcttaaagtggatcataggcctatatatgagagctaaacttattaaaactccaagaagaaacacagaagtctttgtgtacttagattaggcagtggtttcttagatatgacaccaaaagctcaagtgacaaaagaaaaatagttaagttaggctttatcaaagttaaaaacatctgtgtgtcaaagcacactatcaaaaatgcgaaaagaccacccacaaatgggttccacaaaatggaagcaaatgtttgggaatcatatatctgataattgtcttatctccagaatataaaagaattcttacagctcaacaagacaatgacaacttaatttaaaaagtaggcaagggacttggatagacatttttccaaataagatatacaaatggccaaaaagcatgtaaaaagatgcccaacaggtgggcccctgagcgggcgtccgggaccgtggtgtgccaggcgccttccgcccttaacatgcggtggctggcccaggcggtgcaggagctggagcggggcccgagtggggcgccagagccccagcgcgagcaggagaggggccggagcgcggatccgcgccgcgctgctgaagcctggccggccacccagacgctgccggcagcctggccatggcggagccaaggaaagaatctctatacaaacaaatatgtggctatcaaattggagctgatcaagttccggaccccgcagctgcacctgggtaccggttctacaagcagctcagcgccatagagggcgtccctcaggtctactacctactacagcctggaggacctgttcgaccttcacgcccaagacggtgctcctgatcgccatccggctgatcacgcgcatggattatgtgcacaccaagaacctcatttaccaggacgtgaagcccgagaacttcctggtggggcgcccggggaccaagcggcagcacgccatccacatcatcgacctcgggctggccaaggggtacactggtctcaggaccaagaagcacatcccgtgcagccagcacaagagcttgacaggtacggcgtgctacatgagcatcaacatgcacctgggcaaggagcagagccactgcaacaacctggaggtgctgggccacatgttcatgtacttcctgtgcagcagcctcccctggcaggggctcaaggctgacacgatcatgagcggtacagaagatcggggacacatagcgcgccacgcccatcgaagtgctctgcgagaacttcccagaggagatggctacgtacctgcactacgtgcggcgcctggactttgagaagcccgactgtgactacatgcggcgcctggactttgagaagctcgactacgactacctgcggaagctctccagctacctcttcgaccgaagcggcttcgtgttcgactctgagtacgaggggctcgggaagcccttggcgacccccatcagcagtgtccacaccgacctgccctcccagcctcagcttcgggacaaagatcagccgcacagcaaaaaccaggcgctgaactccaccaatggggagctgaacgcggacgaccccatggccggccactccagcgcccatcagggcgcctgcagagatggaggtgggcgatgaaacgaaatgctgctgtttcttccccctgaatcttctccgtgcggccccttggggagcgagcttgtgtgagggccttggggcccacccacagcggcccagggccagacgctggctggaagccaggacacagactgcagggtcttggccggcggccccatccccgggacgaggggtcacttccttcacgtaagactggccaaaatttcttttttttttttttttttttttttgagacggagtctcgctttgtcgcccaggccggactgcggactgcagtggcgcaatctcggctcactgcaagctccgcctcccgggttcccgccattctcctgcctcagcctcccaagtagctgggactacaggcgcccgccaccgcgcccggctaattttttgtatttttagtagagacggggtttcaccttgttagccaggatggtctcgatctcctgacctcatgatccacccgcctcggcctcccaaagtgctgggattacaggcgtgagccaccgcgcccggccaagactggccaaaatttctacacctgtgtctagtcctcccctccaagagcattaactatttaaaacaaggaataaaggaaaaaaaagaaaggccccctccacccccacccctccattactttgctgaagtgagtagtgggatcctggaggcccccagggctgaggcccagccagctgcccccgttagcgtcataaagtccagcttgtctccctcatccaaaggccgttttctcagtgggagggcaggcctggcctggaggggtgctgtggggccatcttgcccaggcccacctgggagggacacaggcattgctgccaggggtgaggctgtgccccaggcctccccaaaactaaaggggaacggaggggtggggccgcggctgaagccagccccgcaaccaaaatgctgcaccaaagctcggtcgccacaggcacggccaccgcagcctttcacagcctggccccggcgaggggcaggtgggccctgctaggagggtgcttctcgaggcacctgttccccgaggctgtgctccgaccctcagaagctgaggggggtgggccggctggcgtcgcgcggctcggcccctgggccctgctgtgtggaggcgcgcgggctcgtggcttcctgtctctgtgctccgccccctggcaagcagccgcagacaaaatgccttaaagcccccgacccagccccgcaggtgtatgtgcaggggggtctgcgggcggccctggactggctggcggactcccagcgggtcagcttgaggcagtgcccagggcggtggccgtgagtctggtttttgctttaccaagtgtacggaaatggcgtttacgtttctctgatgctcttttgaagccatacaacttaggggctttaaaaaaaaaaaggaaaaatgaaaccctccgaaaaaaagatgcccaacatcattggtcattagagaaatacaaatcaaaaccacgatgggataataataggtctacaaggatggcaaaaatcagaaagacaaacaataacaagtgttagagaatttggactaatttggatgcagtatattgctgttgggaatgtaaagtggtgctgctactttggaaaacagtttggccattccttaaaagggtaaacaaagagttaccatatgactcagcaattctacttctagatatatatgcaatagaaatgaaaacatatccacaaaaacttgtacatgactcttcatactagcgttattcacaatagaaaaataatagaaacaaacccaaatgtctgtcaggcgatgaatggatacagaaaaagtggtatattcatacaatgaaatattaatttggcaataaaaggaaatgaagtaatgatacatgctctaatgtggatgaaccttgaaaacattatgctgagtgaaagaaggcagacagaaaggccacatgttctaaaattagattgtgatatttgtacaatgctatgaataaactaaaaacattgaattttacactttaagtgggtggactttatggtatgtgaattatatctcaataaaggtgttactaaaagacaatatagagtgttctttgtttctctgaaggacaagtttttaacttccatttctccaaataagcaattatttgtttttataccaaattagcattttcagattccctactgatgttactggattaagctatgtttttaactttttgttaatttctacattttttgtttcctactattgcttctacattttgtgcactgaaggaggtagtatattgattttacacttacatttcttgtactttctgcctatattagtgttatccacatatccttttgtctcacatttatatttaatactgttagctgtgttttctaagtatgggataatacctttcagtatgctgtaggtgactatatatagatagtacgtttgtatttgaactatttggaagctgaccaaatgtttttattatcttgtagattttactttcctcgttggtattgcagtggcagcaacagagcctatcggcatggaatatctcgaggtgctgaagctcctcttcttgatgactttgtcatgtcttacctctttgctcaggtatgattatattatcttacttgtacatgagttaaatgataaatatcttgctgtttaataagtcacttaatcaggaaaaactttacatatgggaaaattgcagttctgtcttgcacagcaggtgcagagaagtaacaaaattgagtcttttagcactagtttttaatcccatggtttatggataatagaatctattttataaagtttttttggactgatccttttgaatttctttcttttttaggactttagatcattttaaggatttcgcaaagtatagactgaggtttacaacatgattcatgtagacatacgtggctaaaatattagtaacatttctttatggtttttaaaaaaatttttggacaatttcaggcttacacaatggacaatgaactgtagagaaagtaggttacataaaaaaatgagctctgatagtttgtttagctgtttataggaaggtgactggatgttgatacttagtctaagagctatattcaagttatttgttcactaatacagttatgtcaaatttttgtattgtgttggtatttcataatgctttcttctctattaccttgatttaaacagtaattgaaatattttgtcattaaataacttgtttttatgtgctgctagactagtaggaatagaaattaaaggaagaaaatatattagtgctcttgggtaaaaataggcacttggtatccccaaggtatcaggagttctaaatcagatttgctaatattgtaggaaacaagcccacagatcctcatggctcgcatttctgagaggaagcctagtaagcctagttcagtttatgaacaacaaaaggaaaaacatttctctattggggtatgagaccaacaaactttatttttattgtggtaagagatatataataaaaatgaccattttaaccattttaagtgtacagttcagttgtattaagtacaaatacattgctgtacaaccatcaccaccatccatctccagaacatttttcatcttcccaaatggaaacttcatacccattaaataataactctgtatttcccactcccaatggccttttgcaatcaccattctactttctgaatataaatctgccttttctatgtacctcatacaaatggagttatatagcatttgtccttttttgactggcttatttcacttagcataatgtctgtcaggttcatccatgttgtagcatgtgccagaatttctttcctttttaaggctgaataatattccattgcatatgtatactgcattttatttgttcattcatctgttgatggatacttgggttgctgctgtgaacatgggtaaacaaatatttccttgagtccctgttttcagttcttttcaatatatacccagaaatggaatcgctggatcatatggtaaatttataattttttttgaggaactgctacattgttttctgtagtggctgcactatttttcagtcctaccagcagtgcacaagtgttccaatttctcaacatcctcaacaatgctttgctttgtttgataatagccatctctatgggtttgaggtggtatcattgtgattttgatgcatacttctctaacaaccagtgatcatgagcatcttttcatatgcttgttggccatctgtttatcttctttgcagagatgttgcttgttggctatttgtttatcttctttgcagagatgtctactgaagtcctttgcccatttttaaatcaggttgtttgtttgttgttatattatagaaattattattctggatcttaactccttataagatacatgatttgtagatagtttttcccattctctaggttgccttttcattctgttgcttgtcttttgatggacaaaagttttaaatttggctgtattctaatttatctattttttgtttcctatgtttttggtgtcatatccaagaaatcattgccaaatccaatgttatgaacctttctttctgttttcttgtaagagttttatcattttagctcttacatttaggcattgggtccattttgagttaatttttgtctatcgtgaaggtaagggcccaacttcttttgcttgtgaatatccagttttcctagcaccatttgttgaaagactgtcttttctccattgaatggtcttggcacctttgttgaaaatcatttgaccaccaacctacttttttatacagctcctttatctgtatagccattatgaaaagagaggggaatggagagaggcttctaagaatagccttttgaaaacaggatattatgaggttacaactttctgttgcttttacgggtatattatttcacctgtgctgcagagctagtatattttgggggtaggctagttaagtcccatttataagccaagttttcccaaactattcattcagctactttagcctaatattaatactgcaatgtctagtatttttgatctagaaaaattttgggtgatttcagaatactcaattttatccttctaggaaggattgtcttatctagcatggcaaggtaattccaccatataattctaaattatgtctagatagtaccacaagcaattttctattttttaatgtttttacttctctaaatttgtgcccagaaaatatgatagtatttagattactctaagattgtactgttatcattttatattatatgcatgttgtagactatatatagcaaatgtgaccagtggcattaccagagtgtaagaatatcttgacatctttaaataaccaaaaaatagataagccactgaactgtctttaaagttcttaagacagtacctgtaggaagacagatttggaaaaggtaagcaaataaaaatcaaaagtaagatggcccttttaaattcagtttcctctgggaattaattgcctttatatcatcaaatatggctgctaagcaaataaactgctgacatgtgaacaacttttaattaattcatatctattcaacaacaattggatgtttacctcatgttcttggcatcatttctgattttgtgactgtgactgttttttatttccctggctaatgaagatgtaaatttcttaagttcaaattttgtcagctactcaaatgagaaaaggttttctttcttattttatttttttatagagattgaactcctgggctccagtgattgtcttgcttcagcctgtcagcctcctgagtagctaggtacaggtgtgtgccactatgcctggctaatttttttagttttggttttgtggagatggggtctcgctctattgtccaggctggtttcaaacacctggcttcaaatgatcctcctacctcagcctcccaaagtgctgggagtacgagtgtgagccaccacacctggcctgaaatttttcagtagttctaattaaatgaaatttctgagggtacatactataatatttaaggaatagtatttattatgttttggcatttgagactcttccatttgtaacttttctctagtgaatagtttattatgtttttagtattgccatcactcatttttcatatatttattgtcttctgatcatgacttccatagaatttccacatgagcagaatttgttatctaccagttcttttcttttctttctttttttttgagatggagtctcccactgttgcctgggctggagtgcaatggcgtgatctcggctcactgcaacctctgcctcccaggttcaagtgattctcctgactcagcctccctagtagctgggattacaggtgcctgccactacgcccggctaattttttgtatttttagtagagatggggtttcactatgttggccaggctggtctcgaactcctgaccttgtcatctgcctgccttggccttctaaagtgctgggattacaggtgtgagccactgcacccagcccatctactagttctatagggaaccaaggcaggctattaaaaagaatctaccaagtcattgatcatcttctacttaaacagtataacttacttgcctgttctcaaaagtgtggtgaaataagtgtttaaaattgagcaaaaatctgtctcctaccctgaattaattttgtattagcaacgtttaggcctttgttttgggtgatactgattatttgatggtgtggttcttaatagtttattttcttatatgaaaatatcttctatattttattaatagaaaagcaaatatacttttaaatatgtttcttttaataaaattagtttaaaaaggttccagtaaagctttaatttcatgagacaagttattacatcaagagaagagaaatacagatgtagagtatagagggcccttgtccggtttaaaaccttgattcgcattgttattttaggtaatatggctcttacctttttttctacaaagaaaattggtattatgtttagaatatttgtacttctgctttctttttctttctcccattacatgttcagtcagatttatctgtattcctaaatcctccaggtcaaaatcgtagaacctctgtgtttctctcttcttcattctttagacaatatatagttaataaagttatcagccttttttcagaatcttttagtatcttctgtttcctggatcagatccttattatttcgtatctgagccatacaccagcctcttaaagagcctccgtaaatacactttattttcttcaagcacttctatcattgctactactctgccaatggaagagacatgatgaaaacagatctccatagtttctaggatcaggtcattcaagggtacctgcagtcggaccccaacttacttttctaagttttaatccacattatttcttcacataaacttcaggccctaatcaaattagtttatgcatctgaacatatctggtgcttttgtgtgtgtgtcattccttctatttctttaccctgttttgtgtccatcatacatttctttatttttaaacacactgtgaagtttcaaatcttccatgaaaccctccttgattactccagctgaatataatcttaactttctccaagttcctgaaggagcttttgtgtggtgcttcctatatcatgtctggtgttataattatttgcttctgtttcgcttctaagctaaattttggtccccttgatgactgagaccacatcttatacagtcatgtgtcacttacttatggggatatattctgagaaatatgtcgttaggcaattttattgttctgtgaatatcatgtattgtacttatacaaacctatatgttatagcctagtatatgcctagtctgtatggtatagcctattattgctctaggctacaaacttatatagcatgttgctgtactgaatattgtaggcacttgtaacacaacggtaagtatttgtgtagttaaacatatctaaacataaaaaagatacagtaaaaatgcagtattacaatcttatggaaccatcgttatatatgtggtctgccattgaccaaaacattgttatggggcacatggctatttctttgtatccaacaccacttgtagtatgatacttccaacataattggagttcagtatatatttaactcagtaatatctactttaatttaggtaatttttatgtagaagatataatttgaagatatatttaatgaaataggttgatgttatatgtactctgtaattgggaacccagtgtaaatcagtttccatttgcaaatgaacttttattaaaattgtatcgcaaaatgaatgaaaattaaaggaggaatttatgccatttatttatttattaatcattttagagactgggtcttggtctgttacccagactagggtgcagtggtgtgatcatagctgaagagatcctcctacctcagccccccaagtagctgggactgcaggtatgtgccaccatgcctggataatttttaaattttttgtggagatgagatcttgccatgttgcccaggctggtctcaaactcctgggctcaagtgatcttcatgccttggcctcccaaagttctgggattacaggcatgagccactgagcctggccaatttgtatcttgtaaatgcatatgttctgaaaattatgattaaaatataatcatagattaaaacatgataatgaaacttacgatgagatatttccttcaaatttttggttttagtggcggcatgattttgtgcacggatggataaaagtacctgtgactcatgaaacacaggaagaatgtcttgggatggcagtgttagatatgatgagaatagccaaagaaaacgatcaaaccccactggccatctataactctatcaggtaattttcttttgcaaatccttacacataagtgtgagtagagattttatataattcgtatatattttctgtgtttacccatgccttttgattttgtaatactagttaagtactccttatctaaaatgcttggaatcagaaatgcttcagattttggatatttccagattttggaatattggcattgaacttaccagttgagcacccctaatccaaaatgctctaatgagcatttcctttgaacatcatgttgacgttcaaaaagttctggattttggaacatttcgtatttcagatatttgcaagagggatagtcaacctataataaaaaatcatatgggtaagttttatatcttgggagtaaaacacactttgtaaggtgaaattatttaaagagttgtactacaggaaatatcataggtattaaatatctattatttgatttcatttattctgagaaggctagggaagttcagaggaacagaagaaacacctggaggcatactttttgatagaagatcctccagttggctatataaatgacctgaataagtatttcccaaatggtggtgtatattttatttgcattagactcacgtgggggagcctgttaaaatcaaagatttctgggtcctaatccaagagatttggattcagtaaatctgagttgaagcccacaaatatgaatttttacagatgctctagggtattcttatacaaatggtccaaactctgcattcttcaaattattcttctgcatattgaacttgacaatcatggctaatataaaactgctttttaaaaaggtatatataagaatggtttaagtttgaaggcaaatatgtattttatatattacatacttcccagattaaaaatttgagtacatcatgagtgtggttaaagcttccttttttgaaattgttctcccaataactggcttcagtcatttctttgccatgtcatcaaaacagttacatacccaatttgcagagtatcaatttctgtatttctctctttggttttaaatattcttgttttactttcagatgtctgttaggtcttaacctaagggtgtaggccatagggtataattttaggaactcagaaatctagaagattccaaagcccaaaggaaaaaaaaaacacattcattcattcaacagctacttattgaatacttgctgtatgccaggctatagtagaacatagttggaggaagagtatcttagatgtcgttacatagaaactgaaggaattcaggggaacacagttgaagaacagaagctttgacccattgaagatgaatgttataaatatgaagccatctctagacttaagctatcgtggaatatttctgctttggaaaccatgctgtcatccaaagtcttggcacaatctttctatgtagattgtagtttcttccagtttgagaatcatgtcatctattgctcttatccctacattatttagtctagtgtcctaaacctaatgactatttagtaactatttatctgattcttttaactcatgctcttagccaggatataaacacagatgcaaaatgctgcatcatttttttttactgctttactttaaaaatagtgtagatattaaacattcatataagattccatgatattttaaaagagtttattgagataatttacaaatcataaatctcacccatttaaaatatacaatttaatattttgtattatattcacagggttgtataaagatgaccagaatctaattttagaacatttgcatcctttctgaaagaaaccccatgcccattagcattcagtcctcatcccactttcccccagcctctggaaaccacttatctttttgtttgcgtggattttcctgtctcaaacatttcatataaatagaatcatgcaaaatgtggtgtggcattttttttgtctggcttctttcacttaatatgatgtttccaaggttcattcatgttgtagaatgtatcagtacttcatttctttttattgctgaatcatttcattatatagatataccacattttgcttatttgttcttcacttgatgaaaatgtgggctgcttccatgttttggctattgtgactaatgtggctatgaacagttgtatatgagtaattttgtggatgtatttttttcattttttcttgtgcatatatttaggagtggaattcctggaacatatggtaactgtttaactttttgaggaactgcttaacttttcaaaagcagctgtgccacattacattcacactagcagtacatgaagagttccaactctttccgcacttgtttctgtctgtattttatccatcctagtgggtggaagtgctgtctcattctagttttgatgttcatttctctaatgactactgatgtttggcatcttttcatgtactttttggccatttgtatgccttctgtagagaagtgtctatttgaattcattgctcattttttaattgggttatttgtcttttaattattgagtttagaaaattctttttatattctggatacaagtctccacatataatcatatttatgatttgccattatttcctcccattctgtgtattgttattttactttcctgaaggtatcatttgtagcacaaaagttttaattttgaagtagtctaatttgccccatttttctttgtgtcttgtgccatgtggaaatgtggttttagcaacatggatgtctttcttggttttagcaagagcagtttctcttgaaataatggaacagaagccaaactggaatgagttgagggataaatggaaggcaagaaaatggaaatggctatgtacatgctttcaaaaagaggccagataggctgtggccagaaggaaatgtgggattaagagattttacattttatacgggacggacattaatttagcaagtcctttgtgcctgtggattctacatctaatatgccacagaatgaggtccagaaaggcttcctggattagatggtacttgagccttgtcgaatgagtaactagataggagatggatgattggaagaaagattagcatatattacggcatggaaaattatttaatggtacttcagaaataaaatgttccttagaagcacagaaataaattaccttctttagaatattgtacatagagatgaatgtacagaaaagtcagaatatttctaaatggaattgttttgatcacaaaggaattattaggagttgaagctggcctaacaaaataatatacagaagtatgtttgcataatgaaaatggcttccaacaaaatgtaacaatttccaaaattcaggtaaatgttggagcacagcatcataggaaatatttgtagcacagttcaatatatgccaaaatattatcttataaaccattaactctggtatgtgaaatagagaaaaggaatttttagagattcttattaactagactgaggattcatttcattaggggaagaagattaacatcttcttttgtaaacattgatgataacttagagtgtgtggatatatttatatcatcaaacaaaatcttaaagttttatactgtatggatgggggttatgtcaacttacgccacttggccactgtgttgtaaggcctacttaatcatggaaaaaggtggtaacttctttttcaatttttagatttatcttccaatttttgttttgttttgtttttctgtatgtgcttttttatccctagctacaagacattcttaccaaaatgtattcgagcaaagatccaagactatcatattttgacaaggaagcgaataaggtacagatttcgcagatttattcagcaattcagccaatgcaaagccactgccagaaacttgaaacttaagtatcttataaatctggaaactctgcagtctgccttctacacagagaaatttgaagtaaaagaacctggaagtggtccttcaggtgaggagatttttgcaaccattataataactggaaacggtggaattcagtggtcaagagggaaacataaagaaagtgagacactgacagaacaggtaatccttaatgatatgttcttgttctttgttattttaagtacaatggaaataaaaacaaagtaattttaatcatttgcaacatggtattgcacttctcccatttgatagaagtggaagtttttaatagcgtgaacctatcaaggtcatataattctttgcctactattcttaaatggttttttcatttaattttttatgacaaaataattaccaatgactatattatagtttcagaaagatgtcaaattctaaaagtgattttaaaggagttttgcctttcactactagtgataacagaaggcataattataaaacttgttaactagaaaagattgatattaattgattttatgataatatatacctgctaaataatgaatttattttaggtttgcattgcaagttttgaatttgttaatatccgtgttgttcatagattgttactagagatttagagggatcattttttaatttttcatctttggtagtcacatttccagttttctggcagtggtttctactaatgttaattgaattgaagagtgccatagcacattttagattcctggcatcatttaatgccctcatttttaagtcaagcaagatacagcatagtcttagggttagattgatagagtaaatcacgtttaatgcttatctattgttatcaataccttttttattttaaagaatttggaaagaatgttgtcttcttaagtcttgttttaaaatggctctgtaaattctacccgtttttaattttacatgcttttaattataggatttacagttatattgcgattttcctaatattattgatgtcagtattaagcaagcaaaccaagagggttcaaatgaaagccgagttgtaactatccataagcaagatggtaaaaatctggtaagtttgctttatgattgaataatggtttcattttatagttctcagaaatgtgtattttagaatcttagtaccaaaattattttctggtaggaattttgattgtagttttaaatataactctaaacatcagttcagtaaactttttgataacatctagctttttgtattactatcaacaccatcttcctacagagtttcttgtacattactgtactttttttactcatttttatgattagcaaagcaccagttactttctcccccatccctactctagattatactagttctctgatgtaatgctcacccctgactaaaatattttatcaacagggatgtatatgtgccagttatactgcctaattaaaggagaaaaaataaatcaatgatgtctggaatttatataacaaaatgtaaatcaatcccaggtcagccccacccaagctgtaggacatggttgattctaaaagattaacgctttctctttttttaaatagcttcagaaatctaatttattttaatgtaaataggagaaatgaattattttatactttgctcttaagtttctcatttatcttctctgtcttctttttaactcagatgcttcttgacccttcctggcttaaactagtcctattaatgttatttgtctatttatcttaagtatttatatggcttacctgtctggctgttccagggttatattaccaaaattgtaactaacttgcaactcacttaattcagcatagttttctgttcttagataaaaatatgatagtacacctactgcctagtagactgtgagccttttgaaggtaaggatcatatttttatgtgtgtttgtaccccctacaccttgcacagtactcagggcctagtttagaaaaagcttgataaatattttatggatgcataaaaggatgattaacaattatcaacctcaatgtggatatataataaatgtttctgggagagtttattgatcttaatgtgaacaaactgtagtaacccaaagaacttctccatgggactgtatttggacttggcttaattttaagtctgcaatacagagaagttaagtaactttccaagggcacagtgttagttaagtggtagggctatttaaactcaaatgcatgctttgaaaacctaagctcttaagtgtgacactaacttctttgctaagtatccgtaaagctccttaaaaatattatactgacattttgttggaattgtgcaacaaactgggaagagttgacatttctttctcatattaaattttttattttagggatacattgtatttctccttgtatacaagtattattttatgtttttcagtaattcttgatcattttattcatattgatacatcatgtttcttgctgaattttattcatgatatgttatgctttttctgttgtttattaaaattaatacttcttctctgtgtattttcctaccaaattatttatggatataggaaagtaatttttgcttattattgcattttcccagtgtattatgtgttagtaacattttgtttttactgtcattttcctcttcattctggcatttatttctctttataattttggtaaaatatatataaaataaaatttagcatcttaaccatttttaagtgtacagtttagtagtgttaagtatattcacttttgcatccaatttccagaactcttttatcttgcaaaattgaagtctacacccattaaataaaaactcaccatttccccctcttcccaatccttgcaaccagcattctactttctttttttttttttttttttttgagatgagtcttgccctgtcatccaggctggagcacaatggcgcgatcttggctcactgtaacctgtgcctcctgggttcaagcaattttcctgcctcagcctcccgatagctgggattacaggtgcacgccaccatgcttggctaattttttgtatctttagtagagacggggtttcaccatgttggccaggttggtcttgaagtcctgacctcatgatccgcctgcctcatcctcccaaagtgctgggattacaggtgtgagccactgtgcccagcccctctactttcttattctatgaatttgactactctagatacctcataaaagcaggctgaaacaatactgtctttttgtgacaggcttatttcagttagtataatatactcaaggttcatttgtattacagcatgtatcaatttccttcatttttaatatatgtatgtattctgtgtcatgtatataccacatttgttcattcatccatcaatgaatattcaggtcacttttttactttttgacaattgtgagtaatgctgctgtgaacatgggtgtacaaatatctcttgaaaactctgctttcaattcctttggatatataccttctattagtccgttctcacactgctataaagatactacctgggactggataatttatttaaaaagagggtttaattgactcgcagttcggcatggctggcccaggaaacttaaaatcatggcagaaggtgaagggcaaggaagccatgtcttacatggcagcagaagagagacagtgtccaggggaaagtgccacttttaaaccatcagatctcatgagaactccctcactatcatgagaacagcatgggggaaacaacccccatgattcagtcacctcccaccatgtccctccctcgacacatggggattacaattaaagatgagagttgggtggggacgcagagccaaaccatgtcatacctagaagtagaattgctggatcatatggtaattctacttgtaattttttagggagccaccatgctgttttccatagcagcggcaccattttacattcctaccaggagtacattctccacatgctcatcaaaacttgttattttctgttttctgatagtagccatctgatgggtgtgaagtagtatctcattgtgattttgattcacatttccctaatgattagtgttgctgagcgtcttttcatatatgtattgccatttgtatatcttctttgaagaaatatatattcaagtcctttgctcattttttaatcaggttttttttgctgaattatagaaattatttatgtattctggatattaatcccttttcaaatatatgatttgcaaatattttctcccattccatagattgcttttcactatgttgcttgtgtcctttgatgcgcagatgttttaaagttttagctagttcaacttttgttgcctatttttctttttactttgttgagatataacatgaacccagtaaagcacactaatcttacgtgtatagctcaatgaatttttacatatttgtacatctttgtagccacacccacctcaaaaaacagaatagttctcttactcctagaaggtttccacatgcatcttcccacatattcacctccacccctaacttaagatacctatcatctaccatcacttagttttatctattaataaaggttgtataaatggaatgatactgtatgtattcttttaaaatctagattcttttagttagtataatgtttggagattcatttatgttgttacatgtgtcagttcattcctttttattgctgggtagtattgaattgtttgactgtacctcaaattttaaatgtattctgttgatggacatttgggttgctttcactttggggattttagggataaatttaccatgaacattcttatacatattttttggtggacttatgcactctttttttgtatatatatatcctagagataggattattgagtcatagtgatagctttagtatactgccaaacaattttttgtagttctatcagttcactcttctttcagtaatgcatgaaaattacagttgtctcatatccccatcaactcttaattttgtcagtctaaaaatgtcttagtttgtctggtggatgtgtactggtagctattgtagtttttattttcattgccctggtgagtaatgatgttcaatactttttcacttacttattgttcatctgaatatccttcttatgaagtgcctgtgacagtcttttgcacatttttcattgacttgtccctttctgatcaatctgtagagtctctatagattctaagtcttttgtaggatgtttgtaaaacgtatatagacatacgtcagagatatttctagttcagttctggaccactgcaataaagcaaattttgcaatgaagtgagtcacataaattttttggtttctcagtacatataaaagttatgtttacactataatcaagtctactaagtgtgcaacagcattatgtcttaaaaattaatttaaaacactttattgctaaaaaatcctaatgataatctgagcctccagagagttataatctttctgcttatgagggtattattttgatgttgatggctgctgaccgatcagtgtggtggctgcttaaggttgggttggccaaagcaatttcttaagataacaatgacatttactgcatcagtagactcttcatttcgttaaagttgtctctgtagcatgtgacattgtttggtaacattttacccacagtagaatttctttagaaatgagtcagtcctctcaaaccctgccactgctttatgtactaaactttattctaaatcctttgctgtcttttcaacaacattcacagcatcttcacccaggactagattccatctcaagaaaccatttttttatgcataagaagcaacttatctgtccaaattttatcatgagattgtagcaattcagtcacatcttcagctctacttctaattctagttctcttgctatttctaccacatcctagtgacttcctccattgaagtcgtgaacccctcaaagtcatccatgagggttggaatcaacttcttccaaattcctgataatgttaacactttgaccttcttccatgaatcactgatgttcttcctggcatcaagaatggtgaatcctttccataagtttttctatttacccagctccatcagatgaatcactatctatggcagcttagccttacaaaatgtatttcttagataataagacttgaaagttgaaattactccttgacccatgggctacagaatggatgttgtgtcaccaggtctgaaaataacatgaatatccttgtacatctctgtcagagcgcttgggtgaccaggtgcgttgtcaatgagagtaatactttgaaagcaatctttttttctgagcagatcttaacaatgggcttaaaatagtcagtaaaccatgctataaacaatagatgtgctgtcatccaagccttgttgttccatttatagagcacaggcagagtagacttagcataattcgcagagccctgggatttttggaatggtaaatgagcgctggtttgaatttcaagtcaccaatggcataggcccttagcaagagggtcagcctatcctttgaagtttgaaggcaagcactgacttctcctctctagctgtggaagtcctagatggcatattcttccaacagaaggctgttttgtttacatttgaaaatctgtttgttagtgtcaccatcttcatcaatggtccttactagatcttctggataacttgctgtagcttccacatcagcatttgctgcttcaccttgcacttatgctgtgcacatggcttcttttcttaaacctcatgaaccaacctctgctagcttccaacttttcttctgcagcttcctcacctctctcagccttcatagaatttaagagcattagggtcttgctctagattaggctttggcttaagggaatgttatggctggtttgatcttctatctagaactttctctgtatcatcaataaggctgttcactttcttataatttatgtgctcacaggagtagcactttcagtttccctcaaggacttttcctttggattcataacttgcctttttagtgcaagaggcctagctttcagcgtgtgttggctttcagcatgccttcctcactaagcttaatcatttctagcttttgatttaaagtgagagatgggtgaatcttcctttcacttgaatactcagtggtcattgtaggattattaattggcctaatttcattattgttgtgtctgagggaatagggaggcctgaggagagggaaaaagaaagggaaatagctattcggtggagcagtcagaacatatacaaatttatcacttaagttcaccatcttatataggcccagtgtgtggtgccccaaaacaattacagttgacccttggacatcacaggtttgaattgtgtgggtccacttatatgcaattttttttcagccaaacatggatggaaaatatagtattcacaggatgcaaaacctgcatatgtgtagggctgacattttgcatatatgggttctgcagggctgatttcagaacttgaatatgttcagattttggtatatgcaggggtcctgtaactaatcccccttgtattctgagggacaactgtacaatagttacatcaaaggtcattgatcacaaatcaccgtaacaggtataatagtaataaagtttaaattttgtgaaaattaccaaaacatgacacataggaagtaagcatatgctattggaaaaattgcactgatagacttgtacttgctccacttaagtttgtcagaaaccttccatttgtaaaaaaaaaaaaaaaaaaaaaaaaaaaaaaagggtcatatctgcaaggagcaataaagggaagtgcagtaaaacaaaatgtgtctgtatatcaataagagggatactagttagtgaactgctagttcaaagggtatgaatatttacaactttgatagattattaaaatacttctcaaaaggtgtttccaatgtatctgtacacctgttttcttgtatcctttgccaacactggatgttatcaatcttttaatttttctgccaaatcaatgggcaaaataatgctgtcctgttatatttcatttccttaattagaacctgagattgagcaatacctcatgtgtttataggtcagctttaatatttatacttctgtggattgccttttcatgtcctttgactagttttctttttttatttttaattgttttatacgttttattcccacaatgtatgttaggtatattcctttgttatacatgtttgtaatctccaagtcttttaattttgtttaggataccttttatagtacttgtttttttggctatttgtgttagctaaataccttttatagttcaaacatgtcacatgcttgtctctttattataatttttggttgaggactctattctgtgttctctttatgattatgtaaatattgttcattgctgggccaagaaatatgctgtaatcacattttcgttcttatataactttttccaggagttaattattgctttatgatttttcctttgtatctagctttattttcattttctacaagaactctgtaaagtagtggacttctcaatacaaaatttcacataatcaaacctgtcatatatgatagcatttttacttcttttctggagaagtacctcttcgatcacagcatcttactttgtagtgtggactggaagttttctgggtacagctattattttgtcagctgtaatttttggtcattcctttcttatcctggtaactatgttttcatctctcttatattggatctgattttctaaatctcatgtttgccctgtttttctaggtacagcctctggtatttgttggtatctttaatgtgattgagacaaattagaaaattaatttagagaggatttttacatttttatgatattgaattttcctaccatggttaatcttctatatatttaaataaaaagttgcataagagtgttttgaagtttttgttaattattgatattgcatcctctttgttacaaatggggcttttttcattatataactgactttttgtatgtaaaaatataatacgtctatatattttcccatgtaagtaacatgctgcatttttggctgactacatgttcacatatgtattaagatacaatcaggccgggcatggtgactcacgcgtgtaatcccagcactttgggaggccaaggcgggcggatcattaggtcaggaatttgagaccagcctggccaacatgttgaaactctgtctctactaaaaatacaaaaattagccgggcgtcttggcgtgtgcctgtaatcccagctttttgggagactgagacaggagaatcgcttgaacccaggaggcagaagttgcagtgagccaagatcgcgccattgcactccagcctgggcgacagagcaagactctgactgggcgggggccacaaaaaaatcatagcatagctacatatcctaacattttagtttgtagcatgaatactttagcagtatgtaattggtatgtagggctgatgccgtggctcacgcctgtaaccccaacactttgggagactgaggtgggtggatcacttgaggtcaggagttggagaccagcctggccaacatggcgagaacctgtctttactaaaaatacaaaaattagctgggcatggcggcatatgcctgtaatcccagctactcatgagggtgaggtgggtggatcgcttgagcctgggaggtggaggttgcagtgagccaagattgtgccagtgcacttcagcctgggcgatggagcaagactctcaaaaaaaaaaaaaaagaaaaaaggaaatgctcatgatttctaatgtcaacttttatatcatattaaatagatttctagctgagataactggtatattagtctaagaaggacattggaaaataaagtaaaatgatggctatagagtgaactataactgggaaggtatgataatctgtatttaggaggatcttaaatatcagacatgagaatttgtaattcatattgagtactgagccataaaagatatgagcaatttagaagaaaattgtatttaacatggaatgaagaaaattttcaatatttaacatggagttgactttctaaaaggtgctatttctttttcttttctctgcttaggaaattgaacttagctcattaagggaagctttgtctttcgtgtcattaattgatggatattatagattaactgcagatgcacatcattacctctgtaaagaagtagcacctccagccgtgcttgaaaatatacaaagcaactgtcatggcccaatttcgtgagtaatacagacttaaaagtaaatttttagaaaagtaaatgctgtatttacaaagaagatttaacagagtgatacatgtatgtttagaaaaaaataatttgacaagttttttttaaacaaaaggctatttgcaatcagattacataataattagaattatttagtgtataatttaccatctgtatcccaatctataatatttataagttgtacaagtttaacatttgttaatcatgcctatgtgtgattcactcctgcatgttactaaaaaagaaagatctccaatttatgttttattaattttaaaatactgcaaggaagccacagtgcaaaatttgaaaattctttatgtttggatagtccatctccttctactgaaaggttcaaacacaagatatatatgatgtccacatttctagactagtgctatgtagaacttcctgcagcgatgaaaatattctatatctgtgctgtgtaacacagcagccactagctacatgtggctgtttagcatttgagatgtggctaatgcaaccgaggaactgaattttaatttaattttaatttctttacatttaaatagctacatgtggctagtaactatcacattggctcacacagttgtagatccttactttaatactgggtaaagctagctatcatgcataacatctatttagcttaagtcctaatgatctcttagctaggatgtggtttatgttgacaacagatttgaataactcgagcaaagggaaaatctgggatcatgagcatattatgttctttgcatttaacctacccctaaatatttgagaaaatacatcttgggtaatataaagagttgatttagtctatgcttaatatttatttagtaatgaatattgttgctatgaaaaagttgtactacttgaactttatgtctgtaatttacatgtttaatatttttaaaactccttgcctttattcatgtatccataaattcattcaaacattcttttatttatatttactgagtaactactatgtgcaagcattggtttgtatattagaaatatggtgataagtgaaacagaatgattctttcttttgtatagattatattttgcttttctttcagggtgtgcagcttcagaaaacataaaaaattttaaaaaccagtagtctttgtcagttgccatggttcttctcttagactttgttatcgtactgaataataaaatcatgcattcagatttttatgtcagtaactgctatggtagtagagatataagtattttctgatatataatctttatagttaaatgaaggtttctgagagtatggttttaaaaatattaactttgtaatcagcaggcagaaaaatcaaatgaacaaattgttctttgtgattttgtcttataaataccttttattggtttttaaagctatataattgtcccttgaagtggtttgaacttactgcaaaatagcttggtactttgattttttcctttgaaagattattgctaaacatataaagtagaggagacaattctgacagttttagatttgacttttgattgttttagatgacacttggtcataatattatggtgcttgatatattattcaaattgcttcttctttacctttaggatggattttgccattagtaaactgaagaaagcaggtaatcagactggactgtatgtacttcgatgcagtcctaaggactttaataaatattttttgacttttgctgtcgaggttagtatgtcacacttattagtggtaacactttatttagttcatttaatttcctctccatatttatttaccatatttcctttttaatactgagaattatagctttggatatgataactagtataatgcttaatttcctcagagattctgtacaaataaacaagttataattcccagggtttatataaaaatataaaataatttataatgtctatctttttattttgcatttattttattttctgatgttttggtgttaccagtgtgttaaaaggtatttcatcaagtgtcttgatgtttctttgtttgcaaaactggaaatctttgccacatcatgtagaacaaaataaatcggaagcaaattttctgtttattaacagtggttgcagaattagaggaaacagaattagagaaaactaggtcaataacaaacaaatagaaacattaaagcacttttaactgatgattttctaatatttttaagaatagtggtctacaatgcatgtttcaacggtaaaactgcaatgaaaccccactgttaatacagatcattttggatctcatctatgattatatactatcacttatgaggcaatttcatggtataaatcctaagaaactatagaagcttgcaaatttatcttgcttttttaaaacagagaaaaataagaactttgttattcaattattttaatttttataaaatgcaacttatatttggcatatgtagagggtagattacttacagaagggaggttatgccatcactttacctttgtgtaaaactggtaatctatcctaatttcaaagtatcctgttactataacagataatagtacattatattcaagtatgaattcaaaaaaatatatatatatattttatgttcactgtatgtgccaagcctaatatgagagctatgtattatagagtttatgctacagccctaccttcaggaaacttatctactggacaaacaaaaattttcaaatatacaaaaaattctaaatcgaacattgtaattatctagcataggcaaatatagacagtaacagacaggtttacaattattaagaaagggcagccaggtgtggtggctcacacctgtaataccagcactttaggaggccaaggcgggtggatcacgaggtcaagagattgagaccatcctggccaatgtggtgaaatggtgaaaccctgtctctaccaaaattacaaaaattagctgggcatggtggtgcgcacctgtagtcccagctactcgggaggctgaggtaggagaagcgcttgaacccgggaggtggaggttgcagtgagtcaagattgtgccactgcactccagcctggcgacagagcgagacacggtctcaaaaaaaaacaacaacaaaaaaaaaaaaaaacaagaaaggttatttggcataggaagaacctgattgaccttgaggtattggtagattttatataaatgtttctgagtagaatgaatatgtttataaaatgcaccttaaaaataggtgaacaagttcataatatagtgcataagacaaatatttaaaaactgcaaaatattaaaaatgtaatattaaagataattatacaaatacaatggtggtgcagtggaatggctgtatgttcacctttgcttgtgcaaagaggtgagcattagagaggacctcttagaaacagtggtacttgaactgagttttgatgaatgaataaaggttcattgctcagaagaagtgggtatacattcttaggtagaaagatagcatgaagaattatcaaggcatgaagcagcatggcatttgcttgaaatgatttaagtcatttaatatggctggaacgtaggttgtatgttggcagtggcaggagctgagattggagatggaggcagaaaccagctcatggaaggctctatatgctacatttgttttaggctttatcttataaatgatggaaaactattaaggatggtattgttgctattaattatcattgccttcttacatgctttttcataaaatcaacttttaaaccacttttgtaggctgagaaattgtaaattgcccttttgaggaactaagtacttctatcactatactggcactacatcggattcatggttcaaatgtttattctgttgcttgttcttgtgatatcattttgtcagaataatcactgtgatgtccattgtgactatccctccctttctttataattaaacttatacagcgagaaaatgtcattgaatataaacactgtttgattacaaaaaatgagaatgaagagtacaacctcagtgggacaaagaagaacttcagcagtcttaaagatcttttgaattgttaccagatggaaactgttcgctcagacaatataattttccagtttactaaatgctgtcccccaaagccaaaaggtaagataattttctagttatttttaaattactggtcatggattgtttatgtggcgtgaagtatcttcagtacattgatttcaaaggatatatgaaagaagcagctctaaaagttaattttatcttattctattgtacaagcatcatcaaataagattgtttactttggttttggtggtctagaagtgacttgaagttcaattattctaaaatgagattttaaacataatgtgtggtatgatgtcatttattgaactggaagatctcactactaaattcttatgttgttttaagtaaaaattttcatatacttcgaggattttaatttctgtattttaaaaataaagacagtaaagttggaaattccttgaaataatgagccttactattaaaaattattaaaattcctgaaaaattgtatgagttaaggaagttactataattttgaattaatgaaataactggcaggaatacatcaaaatccaaattacattagttaaggaagtgattataattttgaatgtatgaagtaactaagaagaaatatcaaagttcaatgagttgacccctaaaataattttctattataaaaaaagaacaattaggagttattaagcatttcttatacgtagaacacatttcattttactcctctttggagcaattcatactttcagtgtattttgaagtgatatatatgtattttattttttcagataaatcaaaccttctagtcttcagaacgaatggtgtttctgatgtaccaacctcaccaacattacagaggcctactcatatgaaccaaatggtgtttcacaaaatcagaaatgaagatttgatatttgtaagtcattagatactcattactgtcttttttgtccttttaaaacaacatctgttttcttgatttacattcatgtgacattggaattattttgttatatacaaatttagttgtgatttaaatatttttcttatgaaaaatatgccaaccttgtgttagatgttagcaaaattaattatcttaattatcctaagaatggaatcttaattttctttttggaaatttaaaaatgattcttcacaaatctcaaattaaaaattaaaaatctacaaagacctatatcgcaactcccaagttctcaagaaagtaagggaaattcaaggggttaaaaataaagaagaaactgagaaaaaaatccagccatctctcagtgtccatgagggattggttccaggactacccatggataccaaaatctgaggatacttaagtggaacctgtggatatgaaaagttggccctctatatacatgggttttgcatcctatgaacactgtatttctttttttaaataactaattattttttaaaattatttatttatttattagagcaggacttgctgtgtcacccaggctggaatgcagaaatactatattttccaactgagtttccttgcagatgcagaacccgccctgccagtacagagggcccactggatttattgaaaaaaacccacatataaatggacctgtgcagtccaaacccatgctgttcaagggtcaactgtagtacataagatctgataatctggcagtcaggtggtgagggttgatgatcagccacatttatcaagggggttaagatttaagagcaatttaaaagggccaggtctcagacctgtgcaaggccacgagttaaaagtgagactatccctgagtaaaaccaggacacttaagtaaatacatcctcagtaaaacaatatatagaatgtgaaaaattcacccactagcaagcagagaagaaaaggaatattgtcatttttaactgcgcttctggtgaggaaaaggagtctctcctaagaatttgtcatcataagctttggaatttgggcttcattatactacctacatagactgagaaatcctaaattaaaagtggtactctcctaatattgtgtggtgcttggaagaaacaaaaaaatcttttcggaaccacatactcttaacctaggcaacccataattcccacagataaaagcattgcaaacacaagcttttaatagaaaatttagaaacatacaaggaaataatgcaggattaattaagagtcagtagaccaacaaacatcaaaattagaactccaggaacttcctatcacagaattttcagatacagactataaaatacatatacatgtttaaagatagaaaaggaattgaaaccacggagaaataacaagacattgttttaacaaacaaaaaagatgtcaggaaaaaggcatagaaatgataaatatcctcattgacattaaaacagaatatacaggatgaaaagtaaattacttatagctgaagagagatgtagtgaacctcaagacagatctgaagaaattaagaatgcagcagttagggagaaagaaatggattatatgaaagagggattaagtggcatggaaggcaaaatgagaaagacccaactcatatctgagctctataaggagacaatagatagaattagccagaatggtaaagacaagcatcttcatgtgagtaacaggaaacagagtggccaggtaacttgactaacattacaaatctaataaatagtagaccttggatttga

SEQ ID NO: 1460 - DNA, 5097 bp, Homo sapiens
ctgcaggaaggagagaggaagaggagcagaagggggcagcagcggacgccgctaacggcctccctcggcgctgacaggctgggccggcgcccggctcgcttgggtgttcgcgtcgccacttcggcttctcggccggtcgggcccctcggcccgggcttgcggcgcgcgtcggggctgagggctgctgcggcgcagggagaggcctggtcctcgctgccgagggatgtgagtgggagctgagcccacactggagggcccccgagggcccagcctggaggtcgttcagagccgtgcccgccccggggcttcgcagaccttgacccgccgggtaggagccgcccctgcgggctcgagggcgcgctctggtcgcccgatctgtgtagccggtttcagaagcaggcaacaggaacaagatgtgaactgtttctcttctgcagaaaaagaggctcttcctcctcctcccgcgacggcaaatgttctgaaaaagactctgcatgggaatggcctgccttacgatgacagaaatggagggaacatccacctcttctatatatcagaatggtgatatttctggaaatgccaattctatgaagcaaatagatccagttcttcaggtgtatctttaccattcccttgggaaatctgaggcagattatctgacctttccatctggggagtatgttgcagaagaaatctgtattgctgcttctaaagcttgtggtatcacacctgtgtatcataatatgtttgctttaatgagtgaaacagaaaggatctggtatccacccaaccatgtcttccatatagatgagtcaaccaggcataatgtactctacagaataagattttactttcctcgttggtattgcagtggcagcaacagagcctatcggcatggaatatctcgaggtgctgaagctcctcttcttgatgactttgtcatgtcttacctctttgctcagtggcggcatgattttgtgcacggatggataaaagtacctgtgactcatgaaacacaggaagaatgtcttgggatggcagtgttagatatgatgagaatagccaaagaaaacgatcaaaccccactggccatctataactctatcagctacaagacattcttaccaaaatgtattcgagcaaagatccaagactatcatattttgacaaggaagcgaataaggtacagatttcgcagatttattcagcaattcagccaatgcaaagccactgccagaaacttgaaacttaagtatcttataaatctggaaactctgcagtctgccttctacacagagaaatttgaagtaaaagaacctggaagtggtccttcaggtgaggagatttttgcaaccattataataactggaaacggtggaattcagtggtcaagagggaaacataaagaaagtgagacactgacagaacaggatttacagttatattgcgattttcctaatattattgatgtcagtattaagcaagcaaaccaagagggttcaaatgaaagccgagttgtaactatccataagcaagatggtaaaaatctggaaattgaacttagctcattaagggaagctttgtctttcgtgtcattaattgatggatattatagattaactgcagatgcacatcattacctctgtaaagaagtagcacctccagccgtgcttgaaaatatacaaagcaactgtcatggcccaatttcgatggattttgccattagtaaactgaagaaagcaggtaatcagactggactgtatgtacttcgatgcagtcctaaggactttaataaatattttttgacttttgctgtcgagcgagaaaatgtcattgaatataaacactgtttgattacaaaaaatgagaatgaagagtacaacctcagtgggacaaagaagaacttcagcagtcttaaagatcttttgaattgttaccagatggaaactgttcgctcagacaatataattttccagtttactaaatgctgtcccccaaagccaaaagataaatcaaaccttctagtcttcagaacgaatggtgtttctgatgtaccaacctcaccaacattacagaggcctactcatatgaaccaaatggtgtttcacaaaatcagaaatgaagatttgatatttaatgaaagccttggccaaggcacttttacaaagatttttaaaggcgtacgaagagaagtaggagactacggtcaactgcatgaaacagaagttcttttaaaagttctggataaagcacacagaaactattcagagtctttctttgaagcagcaagtatgatgagcaagctttctcacaagcatttggttttaaattatggagtatgtgtctgtggagacgagaatattctggttcaggagtttgtaaaatttggatcactagatacatatctgaaaaagaataaaaattgtataaatatattatggaaacttgaagttgctaaacagttggcatgggccatgcattttctagaagaaaacacccttattcatgggaatgtatgtgccaaaaatattctgcttatcagagaagaagacaggaagacaggaaatcctcctttcatcaaacttagtgatcctggcattagtattacagttttgccaaaggacattcttcaggagagaataccatgggtaccacctgaatgcattgaaaatcctaaaaatttaaatttggcaacagacaaatggagttttggtaccactttgtgggaaatctgcagtggaggagataaacctctaagtgctctggattctcaaagaaagctacaattttatgaagataggcatcagcttcctgcaccaaagtgggcagaattagcaaaccttataaataattgtatggattatgaaccagatttcaggccttctttcagagccatcatacgagatcttaacagtttgtttactccagattatgaactattaacagaaaatgacatgttaccaaatatgaggataggtgccctagggttttctggtgcctttgaagaccgggatcctacacagtttgaagagagacatttgaaatttctacagcaacttggcaagggtaattttgggagtgtggagatgtgccggtatgaccctctacaggacaacactggggaggtggtcgctgtaaaaaagcttcagcatagtactgaagagcacctaagagactttgaaagggaaattgaaatcctgaaatccctacagcatgacaacattgtaaagtacaagggagtgtgctacagtgctggtcggcgtaatctaaaattaattatggaatatttaccatatggaagtttacgagactatcttcaaaaacataaagaacggatagatcacataaaacttctgcagtacacatctcagatatgcaagggtatggagtatcttggtacaaaaaggtatatccacagggatctggcaacgagaaatatattggtggagaacgagaacagagttaaaattggagattttgggttaaccaaagtcttgccacaagacaaagaatactataaagtaaaagaacctggtgaaagtcccatattctggtatgctccagaatcactgacagagagcaagttttctgtggcctcagatgtttggagctttggagtggttctgtatgaacttttcacatacattgagaagagtaaaagtccaccagcggaatttatgcgtatgattggcaatgacaaacaaggacagatgatcgtgttccatttgatagaacttttgaagaataatggaagattaccaagaccagatggatgcccagatgagatctatatgatcatgacagaatgctggaacaataatgtaaatcaacgcccctcctttagggatctagctcttcgagtggatcaaataagggataacatggctggatgaaagaaatgaccttcattctgagaccaaagtagatttacagaacaaagttttatatttcacattgctgtggactattattacatatatcattattatataaatcatgatgctagccagcaaagatgtgaaaatatctgctcaaaactttcaaagtttagtaagtttttcttcatgaggccaccagtaaaagacattaatgagaattccttagcaaggattttgtaagaagtttcttaaacattgtctgttaacatcactcttgtctggcaaaagaaaaaaaatagactttttcaactcagctttttgagacctgaaaaaattattatgtaaattttgcaatgttaaagatgcacagaatatgtatgtatagtttttaccacagtggatgtataataccttggcatcttgtgtgatgttttacacacatgagggctggtgttcattaatactgttttctaatttttccatagttaatctataattaattacttcactatacaaacaaattaagatgttcagataattgaataagtacctttgtgtccttgttcatttatatcgctggccagcattataagcaggtgtatacttttagcttgtagttccatgtactgtaaatatttttcacataaagggaacaaatgtctagttttatttgtataggaaatttccctgaccctaaataatacattttgaaatgaaacaagcttacaaagatataatctattttattatggtttcccttgtatctatttgtggtgaatgtgttttttaaatggaactatctccaaatttttctaagactactatgaacagttttcttttaaaattttgagattaagaatgccaggaatattgtcatcctttgagctgctgactgccaataacattcttcgatctctgggatttatgctcatgaactaaatttaagcttaagccataaaatagattagattgttttttaaaaatggatagctcattaagaagtgcagcaggttaagaattttttcctaaagactgtatatttgaggggtttcagaattttgcattgcagtcatagaagagatttatttcctttttagaggggaaatgaggtaaataagtaaaaaagtatgcttgttaattttattcaagaatgccagtagaaaattcataacgtgtatctttaagaaaaatgagcatacatcttaaatcttttcaatta

SEQ ID NO: 1461 - DNA, 3399 bp, Homo sapiens
atgggaatggcctgccttacgatgacagaaatggagggaacatccacctcttctatatatcagaatggtgatatttctggaaatgccaattctatgaagcaaatagatccagttcttcaggtgtatctttaccattcccttgggaaatctgaggcagattatctgacctttccatctggggagtatgttgcagaagaaatctgtattgctgcttctaaagcttgtggtatcacacctgtgtatcataatatgtttgctttaatgagtgaaacagaaaggatctggtatccacccaaccatgtcttccatatagatgagtcaaccaggcataatgtactctacagaataagattttactttcctcgttggtattgcagtggcagcaacagagcctatcggcatggaatatctcgaggtgctgaagctcctcttcttgatgactttgtcatgtcttacctctttgctcagtggcggcatgattttgtgcacggatggataaaagtacctgtgactcatgaaacacaggaagaatgtcttgggatggcagtgttagatatgatgagaatagccaaagaaaacgatcaaaccccactggccatctataactctatcagctacaagacattcttaccaaaatgtattcgagcaaagatccaagactatcatattttgacaaggaagcgaataaggtacagatttcgcagatttattcagcaattcagccaatgcaaagccactgccagaaacttgaaacttaagtatcttataaatctggaaactctgcagtctgccttctacacagagaaatttgaagtaaaagaacctggaagtggtccttcaggtgaggagatttttgcaaccattataataactggaaacggtggaattcagtggtcaagagggaaacataaagaaagtgagacactgacagaacaggatttacagttatattgcgattttcctaatattattgatgtcagtattaagcaagcaaaccaagagggttcaaatgaaagccgagttgtaactatccataagcaagatggtaaaaatctggaaattgaacttagctcattaagggaagctttgtctttcgtgtcattaattgatggatattatagattaactgcagatgcacatcattacctctgtaaagaagtagcacctccagccgtgcttgaaaatatacaaagcaactgtcatggcccaatttcgatggattttgccattagtaaactgaagaaagcaggtaatcagactggactgtatgtacttcgatgcagtcctaaggactttaataaatattttttgacttttgctgtcgagcgagaaaatgtcattgaatataaacactgtttgattacaaaaaatgagaatgaagagtacaacctcagtgggacaaagaagaacttcagcagtcttaaagatcttttgaattgttaccagatggaaactgttcgctcagacaatataattttccagtttactaaatgctgtcccccaaagccaaaagataaatcaaaccttctagtcttcagaacgaatggtgtttctgatgtaccaacctcaccaacattacagaggcctactcatatgaaccaaatggtgtttcacaaaatcagaaatgaagatttgatatttaatgaaagccttggccaaggcacttttacaaagatttttaaaggcgtacgaagagaagtaggagactacggtcaactgcatgaaacagaagttcttttaaaagttctggataaagcacacagaaactattcagagtctttctttgaagcagcaagtatgatgagcaagctttctcacaagcatttggttttaaattatggagtatgtgtctgtggagacgagaatattctggttcaggagtttgtaaaatttggatcactagatacatatctgaaaaagaataaaaattgtataaatatattatggaaacttgaagttgctaaacagttggcatgggccatgcattttctagaagaaaacacccttattcatgggaatgtatgtgccaaaaatattctgcttatcagagaagaagacaggaagacaggaaatcctcctttcatcaaacttagtgatcctggcattagtattacagttttgccaaaggacattcttcaggagagaataccatgggtaccacctgaatgcattgaaaatcctaaaaatttaaatttggcaacagacaaatggagttttggtaccactttgtgggaaatctgcagtggaggagataaacctctaagtgctctggattctcaaagaaagctacaattttatgaagataggcatcagcttcctgcaccaaagtgggcagaattagcaaaccttataaataattgtatggattatgaaccagatttcaggccttctttcagagccatcatacgagatcttaacagtttgtttactccagattatgaactattaacagaaaatgacatgttaccaaatatgaggataggtgccctagggttttctggtgcctttgaagaccgggatcctacacagtttgaagagagacatttgaaatttctacagcaacttggcaagggtaattttgggagtgtggagatgtgccggtatgaccctctacaggacaacactggggaggtggtcgctgtaaaaaagcttcagcatagtactgaagagcacctaagagactttgaaagggaaattgaaatcctgaaatccctacagcatgacaacattgtaaagtacaagggagtgtgctacagtgctggtcggcgtaatctaaaattaattatggaatatttaccatatggaagtttacgagactatcttcaaaaacataaagaacggatagatcacataaaacttctgcagtacacatctcagatatgcaagggtatggagtatcttggtacaaaaaggtatatccacagggatctggcaacgagaaatatattggtggagaacgagaacagagttaaaattggagattttgggttaaccaaagtcttgccacaagacaaagaatactataaagtaaaagaacctggtgaaagtcccatattctggtatgctccagaatcactgacagagagcaagttttctgtggcctcagatgtttggagctttggagtggttctgtatgaacttttcacatacattgagaagagtaaaagtccaccagcggaatttatgcgtatgattggcaatgacaaacaaggacagatgatcgtgttccatttgatagaacttttgaagaataatggaagattaccaagaccagatggatgcccagatgagatctatatgatcatgacagaatgctggaacaataatgtaaatcaacgcccctcctttagggatctagctcttcgagtggatcaaataagggataacatggctggatga

SEQ ID NO: 1462 - DNA, 22744 bp, Mus musculus
  misc_feature (1711)..(1743): n = a, g, c, or t.
  misc_feature (5038)..(5057): n = a, g, c, or t.
  misc_feature (20752)..(20771): n = a, g, c, or t.
gcagaggagtgagaaggaagcctggccagtgggtgctgcccctgggagtcaggaggagcaagcaggaactgaaggatttaacaatccagataatgggtacagaagtcaaaacgttagacatgtccactggacattgtggctcgtggacaataatcctaacactggagctgttggaggcaggaggatcaccaagttcaaggttaccatttggggctaacctgaactctatgagattctttctcaaaaaccaaaatagacttgtgtaaacaagtggagactaataggtttttttcggccgaagaagtaagccaattcaagcggaattgagagtatgaaaggaggtttattgggggcggcaggttcaccgatcccaaggaaggaggctagggaagtcgccatgcagacagggtaagagggaggatgtgtacgcaaggagaaagaaatgcagagacagaaaaagagacagaggaggggaacgaggacaaaatgtctggattatataggtaagagcctttgggggaggggaagcccagttctggtatgccagctatatcctgcaagaggtgtgggctaagggatgctcggggaatctggaggccaggtctgctttgatgcgttacatatgcacctctgcagctcgtctgaaacccaacaacaggggcagaggacaaatacaggaagtcgtaaattaaatgcctttgttttcaagttaatggcaaagctaagtaatagctcggcacaagtgttaagcatgcttggatccctaaccgcctgaggcctcccagcaagtgtccagaggtgcctaaccgaggcctctgggatcgggatagcagtgggcggtaaccggctggagaaaaggccagtgagccccaaaacctgttaacagaggctccctcattcagtgggtcacttcgccgagctcccccgcctcacggccagccctttctgcagactgcaagttcacctgccattaccgttgtcgcgcgctcgtctgcttggactgctgcgggccccgagacctgggctgggactctgcactagagcgggatacgaacgtggtgagcgcggggtcgggggagggcgggccgggagggaagccgggactcggcggaggtgtgcagggttaatccctacgccgtgcataatgaacaccccagtgatcaatttcccggcatcagagatgctagtttcgctggcgggtttgtcaggcgaaggcgctccctggctgggagcacgcgcacctctcacaccccgcttccggccctaagggcagcggcggtgcacatgcgcacacgccccggcccgctgggaggcgggacctgagaggcggagccgagtggagatgcctctgcgatgaggtcatccgtcgagctgtagcgtcgtggccccgcccctcgacgtcttcaccccctcacccacctcgacaccagagctaaagtcgggctgtctaggtttcagtcctaacggttgccgcgcggcgctggcctccgcgcaagcgcgacctgacacgctcacacgcacgcacgcacgcacgcgcccgaggcggtggttagaggctctccacgcagtggactagggatcgggcgggtaaggcgatgggcgaggctgaaacaccttccttcgaaatgacctggagcagcacaaccagcagtggctactgcagccaggaggactcggactcggagctcgagcagtacttcacggcgcgtannnnnnnnnnnnnnnnnnnnnnnnnnnnnnnnncccgagtagaagcccagttccagcgcgatggtactgaggacccagggctacccctgcccttgcagtcacagaccggttgagccagggggaatcaactctgaagcttgaagggtggaccacaggcgggcgtttttcacccatgactaaagccagcctcgcaatccaaaccggcgtcttgatttcgcatttgggcgctcccactccctccctgggggaaatgaggaagtggaggaggagtccaccgggaagtgagaagttagtttgggaggggactctggccgtgccgtatgcggtcttggatcagccagcaaagtgcccagccgttgctcgaccaactctttgacaccagctgctggactcgatctttctttcctccatggtggaactgtgcagagggatttggggaattcaggaagagggccttaaaagactattaaaaaaaaaaaagtgtggtaccagggcagctgaacctctttaaaaagtctagatgtgcccaaattatccgactttctgggaatatcatagttgtggccaccaagctcggataacttgttctggagcgggaatccctcggaacagcacagaggccagcgaatcaggaaagtgaggacggagactgaggttagaaaacttagtagcactgaactagaactccttatttgagccaagaaagtggaattgtctgtgatgctgtaggtgagatttgatataaatttcctacaggtggactgctacttgacacctccaaaaccttagtccagactttagactcaatgtggggtgggagtgggggcgggagggtgtctctgggattgtctccataccactcaacctgagtcatcttctattatggagaggtgggggaaaatataagatactggccagttgaaaggcatacaaagagaagaattgtttaaaagcagctgaagtttatagctgacttagctgtagagtgcttagcattatatgtgtgatggatggcctgacttccaaccattaaggaaccaaaaaataagaaagaagaaaaggaagctaagaagtcccaaagagcagagtaaaagcctgagggctggggctgggctgcaggttcaatccccaacccagaccctcctagaattctcctgggaccaggcactgcctagcggtgatcccagctgtgtttgttccaattgcattccaatttagggcctttctgaaaccaacaggaagtaagactcacactgggagttgaggactgactgctcttccagaggtcctgagttcaattcccaggaaccacatggtggctcacaaccatctgtaataggatctgatgccctcttctgatgcatcagaaaacagctacagtgtattcacacatatataagtaaataaatcttaaaaaacaaaaacaaaccaggaagtaagactcaggcagttaggtcaagtgagtcctggctgccctgagcagcagggtgactccaccctcccgcagttcctgaagaaccttgtctctgggctaagtcttcagacagcgagggggaagaacagaagcctccctgcttgctgctggtaggacaggctctgctgggaaattgcctgtacacctctggcagatgagaacctgaattgaagctgccttctgtgtagcttgagtcagagggtaaatggtatgtcccagtgttacttcactatataagatgtggtgtggctggtcccaagaaacccactaaggcatcttacattatagagatcagctttcctctcctgtctactgtagttagactgctgatgcaccagctcccgtgctgcctaccctctcgggggtcatgttctgtgctgccgcacagtgggagagtgggctttcttctccagaacaaactgaccaaactagtgttctgggttcagctctacagtggagatgtgattgagatggggttttaatttttgtatgtggtgggggtggaaatcgaagggccttgtacattctgggaaattactctatcactgagctacattttatcccccaaagtgtttatactttaaacaagatttttcccttacagtccttcatggtttcctggcccctggacatgtgccttcatttatctgtttctgtgatgtcgttaggggccacaaccagtgctgaggtggccccagatagcagaaagccaaacggattctacctgtccttgctctctccatctatagcatgtaaaaccaggagcaatgatggcttcaggatgtatgggtttggtgacaggaccaaaatcaagttccaagccagaaggaccatccccatccccaccccacccaccaaagagccttggccttttcaagggccctgtatctatgctggcctgtctttcaggatgaggctgtagagcgggagacacccgatctttctcaagctgagactgagcagaaaatcaaggactacaatggccagatcaacagcaacctcttcatgagcctggtgagttggctgttcaggaatgtgggagaacagaagcccagctctgggccagatgtccagagagtcagagcaaagtattctggggtgtacccaagcagctatctgtgcagacctggctttaccctgcccctggacgactcaacctaactcttccatctccagtagaacttcctgacatggcatggttctccttttcctttctttcttttcagaataaggatggctcctacacaggcttcatcaaggttcagctgaaactagtgcgtcctgtttcagtgccttccagcaagaaaccaccttccttacaggatgcccggagaggtacggggcggagcacagccgtgaagcgccgcacctctttttacttgcctaaggatgctattaagcatctgcatgttctatcacgaacacgggcacgtgaggtcattgaggccctgcttcgaaaattcatggtcgtagatgatcctcgcaagtttgcactctttgagcgaactgaacggcatggccaaggtaggtttccagtctcagcactccctgtgtaagggttatagatcacatacctgtgtattaaggggctgaggcatctgagtctgtctttgtttattttcccccgcccaacctccagtatacctccggaagctgtcggatgacgagcagcccttgaagctgcggcttcttgcagggcccagtgaaaaagccctgagctttgtcctgaaggaaaatgactcgggagaggtgaacgtgagtccgtagtccttcttacttactttcttactttcttatcactaacaaagctagtgggggtgtagccatggtgaggatttcagggagaaaccgggnnnnnnnnnnnnnnnnnnnncacagcctgtccaagaatacacaggtcctctaatggaagtttaggcttccaggactctttgttttgttttgttttttgaaacagggtttctctgtatagccctggctgttctggaactcactttgtagaccagaatggcctcgaactcagaaatcctgcctgcctttgcctcccaagtgctaggattaaaggcgtgcgctacctctgccaaacagcttctgggactcttaagccaaggtctagagcctatcccaagaaactataggaagaagctgaatctagtggttcatgttataatcactgtactggggaggctgaaactggaggattgttacgagtttgagatcagtctggactaccaaaacaaacaaacaaaaacaaaaaacacacaagctaggaagaattgtcttcaggctttgttgtttcctggtgttgaaaatgagaacttgactaactcatagtgagccaagaccagttcagagctccatatatatgggctcagagatggctccacagtgcagaggatccacattctgtttgaagcactcatatcaagtggctcccactcacctgcaactccagcgccaaaggatttgtcttcctctgctggcatcagagggtgcctggagttatgtgcctgtgaccccacgcgcatgcgcaagcacacaactaggacaataggaaagatggctcagtggttaaaaacatgtattgttcatgcagaggacctggatttggttcttagacgcatgtaaaagcttacagttgcccataattgcagaccatacacacaatgtgcatacctgcgtgcaagcaacacacttatacacataaaacagattttttttaaagactttgtgtatgaatgttttgcctgcatgtatatatgtgtacacgtgcccacagaagtaagaagaaggtgttggctctcctagaacagagttacagatgatggaacccaccatgttggtctaggaattgaactctggtcctcttcaagagcaaccaatgctcttaaccactgaactatctttcgagcccctgaaacaaaccttaaaacaaaaagaaaaagaaaagagctttgcaggtataacctgaaaaacataaaggcctcttggaagcattgagacggtctgccagctaggacagatggcacaggcctataatctcatctacttgggaagctaaagcaggaggattgcctcaagttcaagactaggctggcctgtatagcaagatcctatctcacaaacaaacaaaccactcttcctagcaaggcctagggacagtggcttatactctcaactacttggaatgctaaagtgggaggatcactagttcaaagccttcctgggctacagagtgacttaaagggcaatctacgctaacttaatgagatcctgtctcaaaagtaaaaaggcttgggactgtagttcagtggtaaagtgttgagcaagcttagccctttgttcatgtcttagttaggtcttctattgctttgatgaaacactatgaccaaaaccaagttggtggggaaaaggtttatttatttggattacagttccatatgataatccatcattgaaggaagtcagggcaggaactcaaacaggacaggaacctgaaggcaggagctgaagtggaagccatggtgggcgctgcttactggcttgctcagcctgctttcttatagaactcatgaccaccagcccaggggtggcaccatacacaatgggctaggccctcccctatcagtcactcattaagaaaatgccttaaagctatagcttgtggaggcattgttttcaattaatagagaattaatattccctattttcagataactttaacttgtgtcaagttagccgaaaactagatagcacagtgcaatttccagtaatgtaaaaagaaagaaaaaaaaggacaatgactttttacatcggggttagttgtggcttagtggtaagaatagacgctcagcatgcacagagctcggcagcaaaaaaaagaaaagaaaaagaatagggtgggtacaagggctgtatgggaatgtagcttggtaaaaggtaatttgctaacatttatgagaccctaggtttgaatcagagcccattatattgagggagagaatatgagactatgcgggagaatacacctaacaacagatagagatatttcactacaaggagactgttttgtaggatctgttttctatacagactgctcatgaggatcctagcacagaccatttagtgaaaagcctaacaccaaggctagcattgtgataaatacttgtaatctcagcgttccggaagcagaagcaggagaatcacaagtttgagactagcctgggctacatagcaagttaaaggccaacctttgatatgtagaaagactatgactcaaaaaaacaacaaaaaaaaataggggacttaaagagttggcttagcagggctggagagatgggtcaacgattaagagtaccggctgctcttctgaaggacccgggttcaatacctggggttcagttcccaatacccacatggcagctcacaactgtctgtaattccagttccaggggatctgatgccctcacagtcttacatgcaggcagaataccaatgcacataaataaattataaaaccattaaacaacaacaaaaggagttggcttagtggttaagagtacatgttgttcttacagaggacatgggtttgatgcctagcacccagatggcagctcacaaccatctgtaactcttaattctgggggatctgataccttcttctgacctctatgtggaaacatgcatacacataagataataatgaaatgaaaaggaggtaatgtcaggagcgcagacctgctcatgggagaaccatcatggaccagtcttggaggagggtctgccaacttagctattcattgctgcagcccgtgtatctctcctctgccctttccagtgggatgccttcagcatgcctgaactgcacaatttcctacgaatcctgcagcgggaagaagaggaacaccttcgccagatcctgcagaagtattctcgttgtcgccagaagatccaggaggctctgcacgcctgtcctttggggtgaccttgggtctccatggatgacaggaggagaacaggcagtgcaaagagcgtgccgtgtgagtgtgacagggcctgtggggcctgaggagtgcgtgtgcatggaggtcctcctctgctgaccgggatgagcccagagaacagggaaagagccagccgtctacctgtggatatagtggggcggggctttgcatccctctgcccgtatgtactgggtcatactctgcgtagctgctcaagtcacagggtcgcagctgtgagaatcttagagactctacagacagaacaaggttatattttcacgggtaagagaccttacctatggaggaagattgttttgagtcatgaatgggtctcaggatagccctatcagagccaagggtagctgctcagaataatacaagcaattaaggtagagtctggggttccctcttaccgtgccttctgacttccaaacaaacaccctggggtcagagagggctggccagtacaacaactacagtggctcagtcagtgcctcctctaagggaaaggttgctggaccagaccctcttcttgtttgccaaagccagagtctccctcagatatttttgatggaagtgtatgaatgtatgtaatgttttgtggcctcaactgaatgcctcctgtggggaagggatgggggtgtgacagtcatcatcagggcctgatgcctgagagaattggctgaataaagatgtaagaatttttctggttttggactctatagatgtgggcccccagtcggggtaacacctaatgaaagactgccaacaaagattgacacatccagagtgcaccctctccaaggtcgcagtgggaccaatatgttcaggaaatgtatgcctgtggattcaggtgtctttcaaccctccagggctcaggtcatgaagagacaagaataagctacagttactacacaggaaacttttttctccaggccaactcagagaaaccatagcagtaaccccttctccaaaaaactactcgtgggtcccacacttcacatgctaccaggggaaagctggtaataattattttcctgaagaatgttctctggtgaacttacaacacttagtttaagttccttcagacctcaaatatactcttaagaaattgatcaaaaaagttttaaaaagaagtttggctccctgtgcggttggtcactcctttaatcccagtattcgggagacaggcatttgagcgtcagccatttatacatggcaagtgccaggccagctaaggctacatagtgagaccctgtctccaaaagaaaaaagaaaacaaaaacattaagcaagatccgtagtttctttacaggcaaatgtgacaactgcaaagacacagttgtgaaaacagccaaccttagcctcagacaggcctaaggtcccttaggggtggaggggtgaccctaattgactattgctactgggccggagttttgggcgtgtcagggacgtagagacaactataccgggtccgaccttaaagtcaacaacaacacattacctccgcctttctggaagggagctgtcccagctgacccttgggacccataggcttctgggacctggaggcagcgcatccctgtggtggtcagcctctgagagtggccattggttctacaccacagactgacgagacctttagccactcagaggaggcaccgtgcaggacgcgcggaagcggaagtgaggtttccgtggagacagcagagcctgcggaaggcggcggcggcggcacctgcgagtggaagctggggcagggcatggtcgcgcccgccgcgctgtgagagcggagcggccgctgggtccgccatgcgcccgcggcgctgacatgggcgccagcggctccaaagctcggggcctctggccctttgcctccactccggggggcggcggcccagaggcggcaggctccgagcagtctctggtgcggtctcgagcccgagcagtgcctcccttcgtattcacgcgccgcgggtaagggcatgggtatctgcctttgggaggacatccgggaatgagaaacgcccccctacatttgaatcagacgactgtcatattttgggtcccagtcaaagcaaggagaagggaaaaccaagcggcgttcagctcttgaccgcccagatggtctttttagagaattgcctgaggttcgtctcttagggagcagctccataattcagctaagacggcatctaagagtcttaaaacctccctttcatccaactcagcctgcaaattaaaggcatttatgtcccttctgttcttctaagccttagaagaaatctaagggaagatgaccttctgtttaggtgtcttgccttcctcactgtgaagttggacctccgagaatagtgtctggaaaagcagagaaaggcgtcagtgttgaaggtggggccacaacaaaaaaagtgccctcaaccagttgggttctctagatctggaacactaacctaaccttcttttttcccaggtgctcacacaaaatggcctggacctagtgagctcctagggactggcattccctgtgatggaaatttgaccgtaaataccagagagacccaacagtgtcgattagacagtgccagccactggggaatgacttggagtgcagccttctgggctcagacatccaccatcttggtctttggccctggaccagcagtgtctttagaagtgagaccagtatgcccaggccactaccccacccactccataaataagccctaggtgaagggcctgctactagaatcatgacctttgtgaaacagaccagtggtgaggactaactttagttgcctagagagggtgctctgatgtgacatcctgttggtatgacagggcaacagtggccttgtcacactgcctgcttccctccgggcaccaagcaaagagttcttccacggagattaccgttgtgcgtcttctcttggggttcagcgtacttccctgtggtctgtggcccttgccaaggccagggatgaggctccaatccagcctgttccccttctctccacagctccatgttctacgatgaagatggagatctggctcacgaattctatgaggagacaatcgtcaccaagaatgggcagaagcgagccaagctgaggcgggtacataagaatctgattcctcaggtgagggtccgagcagtgatcataaagcctacatcagtatgtcaacggagatacagatggggctttctgggggaagagctgggaagaacagagaggctcttagcatagaggcccagagctgatcttcactagcctctgtttccatggcagggcatcgtgaagctggatcctccccgaatccacgtggatttccccgtgatcctctatgaagtatgaacctgtgtgtggcatggcagacacgagcacccactgccccagcaagaaactcccaggatcaaggtgtagcttccattcaggagtccaggctggtgccacaaccttgaataaactaaactccgttggcccagaaccttcagttgtaagaggggttgtccctcagtgttaactggtattggcggatgtctgaacaataagaggttggtggctggtgagggctaaggacagaattaccagcccgtctcccccagccgcttgtgggagaagcatgacaggagacacgtgccggtcaggaatgcctggttcctggttacctgcctgacctgctttcttccaagcttgcctagggcccagccctcctagaagctacagcactttacaagcagagtctgccttcttccagcccctgggctgtaggggctctacccaagtgggaacttccttttccctcactccccttcccccctagtcagagcatttcagccgtttgctacctcgattcctcctgtatcggacagactggagatacataccagcctcacccttcctgcctacctaccacatgctcccgctcttaagctggacactttgctggctgttcaataagaatgaggaccagtgtgggaggcttctcctttcacccagggctggactgatctctcttgatttcaaccagttgccctcaagttgagagggtacaggccggggtcaggacaggctactgacgcctgtacctgtggggacttgccccaaaccacatattcgtcgtctcccttgtctttgcaccagtcccacaaatccccagttgtaggggagaggcagtccaccacctagtggtaagaaacgactggggctggtgccagtagctatgaggagcccatccccccccttctccttacagtatctttaccccttcagggtctgttaagagaaagtactggagctccttggtaaggatagaaaggaggggaaaatacataagaggcataattaaaatgtgaaggtttgtaaatagtctagactatgataatgttggggcagagtctgatttctatacagagatggctttaaaaaaaatacttccttgtggaagctctgtgcttctagagtgtgggaaatggcttgggacgagtgatccccagcacaggaaggctgttgtgttatttgttcaatttcaataaaagttatttgtagaccctgcacacgagagtggcgtccagtgagactttaacatccagtttctagactgctgatccggtaaggctagcaaacccttgcctgaacattgcctgtagcaataccagccgtggccaacaggtggctgtgtccaagaactgtctccagccctctcaagacgcagagggccactcacctgtccattctgtctgggaatttggaaacagaaggtcgtgtgggatcctagggagattgccctagtctgaggtgtgagtgtagccacacacacagttgtgagatggttctggtcccaacaataccagattatgtgaagtgaggttacagcctaaaccccacagatcaaggcctacctatacttgaacaacagacacttcccaccatggccttggcctccttccaggctctgaagtccacactcacctgacttcccaaggcagccatcagaaaggagagcacaggcttctgctgcagcctctattgtagggctcggcccaacacctcctcagctctctgccgccaatggacattctgcctacgtttctcaaggtcggctatgagcaggttctctgctcgcctagcctttggccataataaactcaagacgtttttaaaaagcaaaagcaaaacaaacaaacaaaaaaaaaaaccaattgggaagcaggagtttatcaactcagggcagttggccttcaagttgctcaaagctggaactggtcaagtcttagcctgttcaacatagatttgcggttctgtagaccaactgtcatccctgtaaaaagccaggagttaggttcctgtccaggagccaaggctccccatatcaggcagtatcctatctcaccaccaccatcctgctcgggaaactccctgtcctggacctgcctagctaaccccaaagctatgaacaataggagagtcagggcagtgtttccctactccatccggctgggctaggctcacttccttcctgctggcagcctaaggaagtgtccctgccctggacagtctcgcctggcctttgttttcccagtagtccccacccttggagcttcctagatttttgtcccttgtgaagccaacacaatggtgaccacagcctaggctatacacccagctctcctgctttctattggcagagggactccctagcactggggaggtgagccccttggaccaggtgaggggttgtcagtttaggtagatttgaggtcaggcaaatttgcctggacctccaaagaggtcttccaggaattcctattgtaagtttcctctcccatagggacacaattctccccccaccccatatcacacagccacaggcatcaacacattgtcatattgtctttgtcacaggttggatacttccgctctcaatggaaaaaaaaaactgactcagctactggaagagcccaccacccccaccccacccgttttcccctcgtgcaggatggtttcttctttggcacctgctctaggggaccattcgctcaaccacccagcaaattgactcccatgaatacagccagccacttgggccccctcacaccctactggatttgaggatgatgcaaaacttggagaaagatgagcccttggttcctaggcccatatccttcccatcacctggcacaactcatgcagaccttcctgggaggaagggtgcaaagggcagccagccaccaagggaaacagggtcaaggggctctcctccccgcccccctggccctttccgcctggagggcagcaggaagtgaggagaaagagcagggatgggaggcgggagggagtgggtgggaaggaatggggtttatcaaatccccagcagactgcccagagggcagcagctggcgcaaggaacctggctggagagactctactcaggtgagcgcagagtagtacataaagctagtccgcactgccataaatgcgtgtactcctgcggcgctccctagcttccaagcttgcggtagggaaaggggctggcggccagaagcggactttcggagatttgagtcgtgcattggagagcagatctaagaggcgagggtacaggtctaaacctagtcctcactggaaggggattgcaaggcagaaaggttcagaatatggagtcggggtactagggagacactgaagcctcctttctacgaagtcaggcccgaaactttggcaaattgctctttatttggagttgagtgggtacccctatggacaaccatcccaccttcacctcgtcgcagagactggtctggggagaatccagtaaattggcaagccctggcgtggatccggtgaaagtggctagatcactttcccctttggcccgactgaacttcaatccctttggcaaggcagcgacccacccccctggttaccaggacaaccactacgtctgctttgccaaaggagggctcagaagctgtactaggccccctcctctagacgagcaaaaggcggggtttccttctgaccgcagacagactagtggagggaacctgggctcagcgaaggcgggtcattaatgttccaagaggttctggatccactcgtgtcaaaatctcttacactagacaaagggcccactttgctagagtccatattcagacaggtgggattgaatccgcagctacccccagtcaaggcttcagctataagcttttatttcaaatgccattaccaccactacaccctcattccgctcgcgcccgccccatccaatgttctatccctttaagaggccagctgcaaagagtggattgttccactgacgacagattgtgggggtaatatctcaggctggttagctctggtggctaaaaccagcgggaatccccattccaggaggtattcaatctcagatacataactatgttcctctacagaagatctaagggtcctcgaactcgaaacgcagcactggcaaaaaggaagagaaacacaccctccctacgaggccgtaaattctgccatccacccacctccgaggcaggattcttaaagggcccgcgggcctcggggcggagccaacagaggctcgagctggggcagtgcttgggcgaagggccggatcgggcttggttggtaccaggatggcggcggccctggcgtgggtcctggtggcgcctggttcgaggtgagggcgggcgtcgcaagcctggtgactctcttcctgtgagatgggctctgaatctctaggggcgccctcataagtgacccaggaaccccacccccacccggctgaactctggccccacgtgcggggcgggggcggggtcccgcacaaagaccggagtggaatactctttacccgggaccccttgtgctgggaggtgagggtgtgggccggtcgcgaagtgctcacacagattcttggtggctgtggtgggaagggcaggtcggcgagcaccgcggtgggaagtccgctgcccctttgtccccggggcgcctcctcctatcctaagagtgtcggtgcccgagactaagtcctgacgttcttgctcttctgcttggcgcacattgcacagatagcagttcctctgcagtgtacctaacagcttcccagcttctgtatgcgttgtgccccaaatgctgtctcttctcagaatcaattctgagttcgtaatgagggtgggggacatggggtgttcagagtgttttaaaactatttactgtatggtatacaggcatgtaagtgactctagcagtgagtcggtagcctaatcagtccctttttcagaaaggatatggacctaaaggagattcttgcccaaccacgggcagctccctgctctagaaagagctctgtggtttcggtaaattccctaaggtcttttgcctacccatcagcatcctgctatctcccaaacctgttacagcctcggccatctgagcaggagcatggtgtgccgcacagtatgggtttggggagtttatgtgggatgaaggtgcgtacacatctctggaatttgctagactgacttgttctctctcacactttcttcagttcctgagctgctaccaggcaggtaacacttcctgtagcccccagcatgcgggcaggactaggtcccatcatcacactggccctagtgctggaggtagcatgggccggggagcttaagcccacagcgccgcccatcttcactggccgaccctttgtggtagcatggaacgtgcccacacaagaatgtgccccacgccacaaagtgccactggaccttagggccttcgatgtgaaggctacaccgaatgagggttttttcaaccagaatatcaccaccttctactacgaccgtctaggcctgtatccacgttttgatgcagccgggacatctgtgcatggcggtgtgcctcagaacggcagcctctgtgcacacctgcccatgctgaaggaatctgtggaacgctacatccagacccaggagcctggggggctggcagtcattgactgggaggaatggcggcctgtatgggttcgaaactggcaggagaaagatgtttaccgacagtcttcacgccagctggtggccagtcggcaccctgactggccatcagacagagtaatgaagcaggcccagtacgagtttgagttcgccgctcggcagttcatgttgaacactctccgttacgtcaaggcagtcagaccccagcacctgtggggcttctacctctttcctgactgctacaatcacgattatgtacagaactgggagagctacacgggccgctgtcccgatgtggaggtggcacggaacgaccagctggcctggctctgggctgagagcacggctctctttccctctgtgtacctggacgagacactggcgtcctccgtacacagccgcaactttgtcagtttccgtgttcgggaggcccttcgagtggctcacacccaccatgccaaccacgccctccccgtgtacgtctttacgcgtcccacatacacccgaggactcacggggctgagccaggtacgtgttctcccttcctctgggagccactgcatgcttgtgttatcggggaccagaagtactattccatatctgttttagtcttgtggaagggtgatgtcacccccattctgtagataagaccgaggcccagagatgctgagaggtagccaggagcctgtagcaagtccgtgaaaagtgcacagaactaaaccaggcatcctgactttggggtcagaatgtgtaacctttgactttgtgggctcatgcgtgggctcttggccttggagactaaggtccaaggtgaggatagaaatgggcagagcggcctctgcctgtctagaactgtcctaaggtcagcaggttagagcaggtctgttctgagtctcctgcgacaccgtctggtgccagtcttgctcaggaaccatccctccccacacaggtggaccttatctctaccatcggtgagagtgccgccctgggctcagctggcgtcatcttctggggcgactcggaagacgcttcaagtatggtaagggagacccacctggccttccagggctgatgaagagtgtatactttggcttctgccccccacctgggtgtacacactgagtatagcttatctcctaagcatagcagctttgtccctggacccaagagggaagaagggcacccccaccctgttcccaggaagaggaaatgctatcttgaacagctggagttccgcccttcctcatccacacagctgggctccagtctgtctcaaccccgcttctcactagggacaggggactgactataaaggctcgggaactctgtgtatatgtttacatacatatgcaaataaatatgccagggatgtgcctcagtagagtgcttgcctagtctagggttcaaactccaccactaccaaaagaaagaggcgctatcaccacagtttccgtcggggcttgggcaaaggtagctaacatcagacactcactccttaaccttggccttttccaggagacctgccaatacctcaagaattacctaactcagctgctggttccctacgtagtcaacgtgtcctgggccacccagtattgcagttggacccagtgccatggccatgggcgatgtgtgcgccgcaaccccagcgccaataccttcctgcacctcaatgccagcagcttccgcctagtgcctggccatacccccagtgaaccccagcttcgacccgaggggcagctcagcgaagccgacctcaactacctgcagaagcactttcgctgccagtgctatctgggctggggtggcgagcagtgccaacggaactataagggggcagctggaaatgccagcagagcctgggctggatcccacctcaccagcctgctgggtttggtagctgtggctctcacctggaccttatgagggatctctccccctggatatcagtccagctggcctctggtgcaaggatctccttggcatgaggggcctgttaggggggagacaaaagtctggagtaggcagtgctcccaggatgcttagcagagcacccataccatctgtcacccccctgttctaagggggagagaaacatcccctgagatgccctcatcttgccagagaagatggagaatcaagctaggccagagaaggcctgactctactccctgctcctggatagtttataattttggggtctcttttgtaaattaaatataaaacaactcctgtgcttcttgtctttttctgcttcgaggttagtgtgtgagagtgctcagggctacccaggaggtggagctcagctctttgaatccacatgctggaacttctcagcagtgtgttcactggggcctagggaagaagggctactgagtctgcacttgtgctggggcagggctcactagaataaaattcatactctaccctaacatcaactccactttatcttgatagaaatagagtggggcccaccattgtatgactgatagaactagctcttttatctgccacctgccccagtatcccaagcagggtcagcactagcttccttacctcaaccacacatagaaaaggggacatgatcttccctgatgttcctacaatagagcagcatttcttttccttttttttttttttttttttttttggttttttgttttttgagacagggtttctctgtatagccctggctgtcctgaaactcactctgtaaaccaggctggcctcgaactcagaaatccaccagcctctgcctcccaagtgctggaatcaaaggcatgcgccaccactgcctggcacagttgagcatttctgttccctgctcccaagggcagtggacctgttcctctccctgtctggttcatacccttcccttgaggctggcaggtaaggaggctggcaggggattaagatgtcagtcttgagctgtcagtctgtcactatgagtgtgaggtggtgctgttgggtactatccagatctggggagcagggtcaccctcaaagatcagctttggagctagaatgtgtgtgtgtgtgtgtgtgtgtgtatcagtgctttatcagtgtttatcagtgataaagcacttgcttggcatgtgcaaggccctgggattgatcactagcactatcttgaaaaattaaattaacctaacaagaatgttgagacaagagtctcactgtacagccctagctgccttagcactcagtatgtgtagatgaatctggtcttgaattcagagatccacctgcctctgcttcccattcactggaattacaggcctgtgtacaccagacttaataatttaaaacctgaagaagagggctggagagatggttcagcagttgagaacactgactgctcttccagaggtcctgagttcaattcccagcaaccacatggtggctcacgaccatctgtaacagggtctggtgccctcttcaggagcgtctgaagaatgcaatggtggtgtactcatgcataaaataagtaagtctttaaaaaaaaaatctgaccagtcgtggtggcgcacacctttaatcccaacacttgggaggcagaggcaggcnnnnnnnnnnnnnnnnnnnntctcaaaaaactaattaattaattaattaattaattaattaattaattaaatctgaagaagaccactcaaaaaaccaaccaaaaagataaataaaaataaaagaggaggaggaggaggaggaggagaaggagaaggagaaggagaaggagaaggggaagggtaaggggaaggggaagaggaagaagaagaagaagaagaagaagaagaagaagaagaagaagaagaagaagaagaagaagaagaagaagacagactaaaagcaatggagcttggcaaaggacggcaaagacaagggagacctcttgtcttcctcacacctgtgactcattctgttgtaaccttttctattcatccatgttctctatggtacctgtcaaccttctatgaacattgaccccccccaatatgtatggatacacacacaactgttagcccaagggtgggcatggaggacagaagaaacatctgcactttccccatgcctgtaatctgtcctacaagttgtgacctatgtccatctagctttgaacacactcttggggcaaatcctgtccaccacttcacatttcttcccctgaaaccccagggactatgtagctacttcctctaacttaaaaacattccctccaagaaggttaaacaaggcacataaaactcagctgccaagtgatggtggcagcggcacaggcctttgatcctaccactctggaggcagaggcaggcgaatctctgagtttgaggccagcctggttcctgagttccaggacagagaaaccctgcctcaaacaaactccttagaaagctaaggaaacttccctaagctctggagattcaagaagttaataatttgggtgagcaaaatggctcagagggtaaaggcatgtgagacctgatgacctaagctcaatgcccagagtcggggtgacagaggagaaaactactgacttcacaggccttccattgacctgtgtgtatgactgtgattatatgtcacctctgtgccagaagaagatgtcagcatctctggaactagttgcaagccacttggcacgggtgctgagaactgagctccagtcctctggaagagcagctaaattctcttgataattaaaaaaataaataaaaaatatacatgcacacataatattaaaaaattataagattcacaaggcccctctccaaaactaaaaagtaataaataattgctggagaggcgctacctacaagctggcaagctgtaccaaagctacaacttttgtcaactgttgttctggcctagggtcgaccttttggtgatgcagctgtctttgagtgtcccatgcttctgtaagcagctccctatgttcctccggtaatgtggccccgaaacctcattgatttaccaagctagacttagaatcaattctctcacctgtggtcacctgtggtgtctggaaatgaatagaagattgttcacggaaaaagtcacgtgacaccacagtctctgagggctaggggaaaggtcaggttaggaaggtggggtagatcaaaggcactaagcacacactgccagggaggccacgcctatatggtagccccaaggtgaatgcctaaggggttcggtcattcagaatcagacacaactgcaggcccagacaactgctttattctgggcggggccatgcctttcccttctactttcctaacttggcaggcaagcccggacctgagcaaccagatcatctcagtaagcagcctgtgattcagtgaacttgtaactcacaactgcatgaacacacacgttacttatgcgtgtactcactaatacacccctgctcatttccacggccatgcagatccagggtctcacgatcaccaaacagcaaggtctcgtacatcatcccaggaactgagtcctcacacttgcaggtataaatacctgggaatttgggcacgagcccagttaccaactagagcgtcacaaagatgcaat

SEQ ID NO: 1463 - DNA, 1482 bp, Mus musculus
ccggggggcggcggcccagaggcggcaggctccgagcagtctctggtgcggtctcgagcccgagcagtgcctcccttcgtattcacgcgccgcggctccatgttctacgatgaagatggagatctggctcacgaattctatgaggagacaatcgtcaccaagaatgggcagaagcgagccaagctgaggcgggtacataagaatctgattcctcagggcatcgtgaagctggatcctccccgaatccacgtggatttccccgtgatcctctatgaagtatgaacctgtgtgtggcatggcagacacgagcacccactgccccagcaagaaactcccaggatcaaggtgtagcttccattcaggagtccaggctggtgccacaaccttgaataaactaaactccgttggcccagaaccttcagttgtaagaggggttgtccctcagtgttaactggtattggcggatgtctgaacaataagaggttggtggctggtgagggctaaggacagaattaccagcccgtctcccccagccgcttgtgggagaagcatgacaggagacacgtgccggtcaggaatgcctggttcctggttacctgcctgacctgctttcttccaagcttgcctagggcccagccctcctagaagctacagcactttacaagcagagtctgccttcttccagcccctgggctgtaggggctctacccaagtgggaacttccttttcctcactccccttcccccctagtcagagcatttcagccgtttgctacctcgattcctcctgtatcggacagactggagatacataccagcctcacccttcctgcctacctaccacatgctcccgctcttaagctggacactttgctggctgttcaataagaatgaggaccagtgtgggaggcttctcctttcacccagggctggactgatctctcttgatttcaaccagttgccctcaagttgagagggtacaggccggggtcaggacaggctactgacgcctgtacctgtggggacttgccccaaaccacatattcgtcgtctcccttgtctttgcaccagtcccacaaatccccagttgtaggggagaggcagtccaccacctagtggtaagaaacgactggggctggtgccagtagctatgaggagcccatccccccccttctccttacagtatctttaccccttcagggtctgttaagagaaagtactggagctccttggtaaggatagaaaggaggggaaaatacttaagaggcataattaaaatgtgaaggtttgtaaatagtctagactatgataatgttggggcagagtctgatttctatacagagatggctttaaaaaaatacttccttgtggaagctctgtgcttctagagtgtgggaaatggcttgggacgagtgatccccagcacaggaaggctgttgtgttatttgttcaatttcaataaaagttatttgtagaccctgac

SEQ ID NO: 1464 - DNA, 333 bp, Mus musculus
atgggcgccagcggctccaaagctcggggcctctggccctttgcctccactccggggggcggcggcccagaggcggcaggctccgagcagtctctggtgcggtctcgagcccgagcagtgcctcccttcgtattcacgcgccgcggctccatgttctacgatgaagatggagatctggctcacgaattctatgaggagacaatcgtcaccaagaatgggcagaagcgagccaagctgaggcgggtacataagaatctgattcctcagggcatcgtgaagctggatcctccccgaatccacgtggatttccccgtgatcctctatgaagtatga

SEQ ID NO: 1465 - DNA, 23328 bp, Homo sapiens
agatccaactgttgagcaggcctctctgcctgtggccttccggccggtttccagacgcccaggtggccaacattagagtccgcgtagcagtgtgaggtaacccactgagataggtcgggcctgcggagcctggcgagcagcggccctctccctggggcttcccttcaatctccgggacatttccccgacctggagctcctccgcctcaccgccaggcctctctgcagattgcaagttcacctgccactaccgctgccgcgcgctcgtctgcctggactgttgcgggccccgggacctgggctgggaacccgcggtggagcgggacacgaacgtggtgagcgcggggccgagggcgtatgggaagggcgaggatgggcaggccacagtgcaggcattctcgagggctgcctgggtgccgcgcgcaaggagcgttctaattgccgatttcccggcggcacagagaggctaattctgcgcgggggctgggaggggagcctggattgccggctccgcaagtactccacccgctgcaagcggacccgggcccaggctgacccaggctccgcgcacgcgcacttcccgcaccttcccgccctcgcctccggccagaggccactcttgtgcgcttgcccggacgctggcacccgcccccgttccctgtggtaggtggggtctgtgagtggagctccggagcgatgaggtcattcctgggggcgaagcgtgcgtgtccccgccccggcgttcctgccccaatgagacaagagctagatcccggcgatctacgtttcagtcttaacggttgcggcgcggctctggcccgggcgcacgcgcacactgacacgcgtacacgcacgcacgcgaccggggcggtggttggcggctacggacgcgcaggactgggggacgggcgggtacggctatgggcgaggcggaggcgccttctttcgaaatgacctggagcagcacgacgagcagtggctactgcagccaagaggactcggactcggagctcgagcagtacttcaccgcgcgaacctcgctagctcgcaggccgcgccgggaccaggtgggagccagggggtgccggcgggcgggaggggaagcggtcgctggagctccgccctccccggtccgttgccgcgtcctgggtcggtgggcagccccaccctcctggctacgtggctccccgcgggtcctggccggggacctgcccgcggaaccgtgcgtaagaccccgattccaccgcctagatgctgggtgccggggcccccttggtttctgtcacagacaggttgaacacggaaaaagcagctgtatggcttgtggtagacctgagccgggcattatccagctatgactaaagccgaccgagcagtttggactagcacctcgatttccgcgttcgaatgctcctgctccctccttggggagactaggggaggatgtggagagggaagagtcctcgccaggaattgagaagtatgtttaggaaaacttgagaggcagagagagatcctgctcctccatctgcactcctgtatggagccagctgagccctcacctcttccctgttctggcctgtcaccagctgctggaatgtggaagattctgttcccttcctctagggtggatctggagaaagatttgggaatagataggaaagaagtcttgttttggaccataagcattcaggagcactttacccacaggaagggggaaagctagattataaaatgcctaaagaggtggaaaaagagatccaggttactaacccaggactgtaaggtgtctcggaacctcctaggtatccccattatcggagaactgtgtgccagatgccattggtgtgaccaccaggctcagagaaccaggcctaggcaccaggaaaaagaaacagggactgtgaagctcagtatgcctggcagaaatggggcggaaatccttatttaagtaaagaaagtggagttgtgagtgatgcttcagataaaattttacaaaattccttacaaaatgggtggtgctcagcacgccaaaatcttagcccagagcttgggtgcaagggttgagttgagtgtagacccctgggcttgtcttcatgtcagtcagtcctgagccattttccactgtggaaaggtgggaaaaccacaagacactaaccaattgaaaaggagggctagccacggaggtgcacacctgtaatcccagctacttgggagggtgaggcagaaggatcacttgaacctgggaggcagaggttgcagtgagccaagatcgtgccactgcactccagcctgagtgacagagtgagactctgtctcaaaaatagaaaaggaagccaagtacggtggctcacacctctaatgccaatgctttgggaggccaaggcaggtggatcatttgcaatcaggaattcgaggtcagcctggccaacatggtgaaaccctatctctactaaacatacaaaaattagccgggcatggtggtgtgtgactgtagtcccagctacttgggagactgaatcacttcaaccgggaggcaaaggttgcagtgagccaagatcgtgccactgcactccaacctgggtgacagggtgaggctctgtctcaaaaaaaagaaagaaggctgggcttggtgactcatgcctgtaatctcagcattttgggaggccaaggcaggcagatcacttgaggccaagagttcgagacctgccaggccaacatagcaaaaccccgtctgtactgaaaatacaaaaaaattatctggccatggtggtgtgtgcctgtaatcccagctactggggaggctgaggcaggagtatcacttgaacccagaagacagaggttgcagtgagtcgagactgggccactgcattccagcctggatgagagagcaagactctgtctcaaaaaaaaaaaaaaaaaaaaagaaagaataggaggctgagaagtcccaagttatatgttaaaaaaaaagaaaaaaacatcagttttaggccaggtgcagtggctcacacctttaatcccagcactttggaaagccgaggtgggtggatcatgaggtcaggagttcaagaccagcctggccaaaatggtgaaaccccgtctcgactaaaaatacaaaaaattagccagttgtggtggcaggcacctgtaatcccagctacttgggaggctgaagcagagaattgcttgaacccaggaggcagagattgcaatgagccaagatcgcaccactgcactccagcctggaaaacagagcgagactctgtctcaaaaaaaaaaccatcagtttttatggacagtggtagagtggagggtgggtccctatggtgcagaagggaaattccatggtcctgctgtgcatccgactgggatggctgttgaaatcctcttccagcaggcagctttggaaacagaaaaagaaactcttcctcctttagaatcctggaagggctgtgcagtgcctctaatccaagtctgttttctgagtgaagatagggaggttcatcaccagaagggaaggggctggaaatgaggtcactgcatcccagcccagggctcctgggtcatccaggaagggaagaaggagcaagctttctcattgttaggtaggagctcagagccatcacaagaacaagttagcaccatccctgtgccctccctgttctgcaaacaaaatgatcttccttcttgccctggcactagagtctgtctggcatttctcctgcccctagtactcctcccatctgggtacttcttcccgttggtgtactgaacaaacacatccactgctttattcacagcctccagccctcattttccagggcccacaccatttgtttttactaacccgacaaggttgcccactgtccccagtaaggtttgtactggggtttttactccagtgctcttctccatccaggagacctttggatacttggggaagaaaatgagcttaaattcccacccctccccctttacctttttcctgtaaggccctggccttagttcttagccccacatccttgctggctgcagaatagcagcgggttctgggtaaggagcattctgctaaaacgctccaccctgctccctcatctgtcctctccatttgtccccatcagatggtttaagtgcttaaggggactccagggcggagtcagggagaaccctggctctcctgggctaggcacaagatcattctacaggaaaccttgtgggaattcttctgggacaaattattggtcagcgctgagcttagctgtgtctgtgacactcgcattctaactagggcctatctgacgtcaacaggaagtaaggctgatgcagtggggccaagggagtctgggagaagaaagtcggttcagagccctggctgccctgtcccacactccacccttccggcaagaatccagtccctagatgaggtggggagtgagtggtcgagttaaaaatctctgggtcgggtacgatggttcacgcctgtaatcccagcactttgggaggtgaaggcaggcggatcacttgaggtcaggagttcaagaccaacctggccaatgtggtgaaatcccatctctactaaaaatacaaaaattagccgggtgttgttgtggcacgcgcctgtagtcccagctactcgggagtctgaggcaggagaatcgcttgaacccaggaggcagaacttgcagtgagccaagatccagccactgcactacagcctgggcgacagagtgaggcttcgtctcaaaaaaaaaaaaaatctttgggccaaatctccagacagcacaggcaggtgcagaaacccaccaggaagctgcctgtgtacctctggcagattggagcctggcctaaagctgccttttatgcagcttgggtcaaggttaaacatcatgtcacagtgatttttctcactatgtgtgagacatggagaactggctccaagtactactctgtccactggtggctggactactgatgtgcaccactctccactcctctcaccctgcagtgggtcatggccccgtgccggggcagaggagaaaaatgggctgccttctccaggacaaaccctcactccaactcaactagggtgctgtgatcagaatgtgcaattgaggtgtgattttactgattttttttttttttgagaccgagtttcgctcttgttgcccaggctggagtgcgatggcacgatctcagttcactgcaacctccacctcccgagtttgagcaattctcctgcctcagcctcctaagtagctgggattacaggcatgtgccaccacgcctggctaattttgtatttttagtagagacggggtttctccatgttggtcaggctggtctcaaactcctgacctcaggtgatccacccgcctcggcctcccaaagtgctagaattacaggcgtgagccaacgtgcccagcctgtttttgttttttgtgttttgaagcagggtctcactcagttccccaggctggagtgcagtgacacgataatagcttactgtagctgcaatctcccgggctcaaacgatcctcccacctcagcctcctgaacagttgggactacaggcacaccaccacacctggctaatttttttttttctttttttagtagagatgaggtcttgctatgttgcccaagctggtctcaaactcctgaggatcaagtgatcctcctaccttagcctcccaaaatgctgggattgcagatgtgagccaccacacccagcctgattttactttaaatgagagtccctcttcagagtccctcagctgttcctggcccctggccatgtgccttcagttgcccctgcttctgtggtatccttaaggctacattcagtgctgaggccctaggcaggcagcagagagaagccaaatgattctgtctttcccttatccacccagagcatgcaaaaccaggagcagtggtgggttcagggtgggcaccagctatgtatatgtacatcagggacagggggccaaaggcagtcagtttccaaagactgccccagaggccatttttcagagaagccctgggttcctcaagggccctgtgtccatgctggcccatcttgcaggacgagcctgtggagtgggagacacctgacctttctcaagctgagattgagcagaagatcaaggagtacaatgcccagatcaacagcaacctcttcatgagcttggtgagttgactgctcaggaagggggcgtggggaggagcaggtacccagctatgtgcctgatactcagagggtcacaactgaggttatcttgggtgggcgcaagcagtaatttgtgcatacccagcctagccccaagtagactgacatctcacctggaacctattatcaaggtttggtttctctatttctttagaacaaggacggttcttacacaggcttcatcaaggttcagctgaagctggtgcgccctgtctctgtgccctccagcaagaagccaccctccttgcaggatgcccggcggggcccaggacggggcacaagtgtcaggcgccgcacttccttttacctgcccaaggatgctgtcaagcacctgcatgtgctgtcacgcacaagggcacgtgaagtcattgaggccctgctgcgaaagttcttggtggtggatgacccccgcaagtttgcactctttgagcgcgctgagcgtcacggccaaggtgggcttcccaccccaccctgccctatgtgagggtatatacgcatgcacctgagcatgcaggggctgagcagctggccctgtctctgatcattacttccccttcacagtgtacttgcggaagctgttggatgatgagcagcccctgcggctgcggctcctggcagggcccagtgacaaggccctgagctttgtcctgaaggaaaatgactctggggaggtgaacgtgagtacatagttcttagtttcttggttgtcactagacaggactgatgggctgtagctacagtaaggcttggaggaggaattgtgctggaagacaagccctgcaaaacagttccaggagtgtataggcattgtaactaaagcaaaggcttccagaccactcatgccaaagcctagggttgtcccaagaagccaggaagaattgccttggtgctttgatctttcctggtgtggaaaatcttctggagatgcaggagtccatctaatgacatgaggaggcccccttcagactttttacctggaagctttctggctccaaggtattaggcctgtggagtgaaattagactcagaatatgcctgacctgtccacaggtaattggggaacatctgacttggttgtctcagtaaggtgaccgttttgtagggcccatcttccatacaaactgctgtcagggatcctaccagagatcattcagccaagagcctgacatcagaaagcccagtcctagcttgtgtgaacatgaggtgctagtcttctctggggagggtctgctggcttggccatcccttctgcagcctgtacactccccttttgccccttgcagtgggacgccttcagcatgcctgaactacataacttcctacgtatcctgcagcgggaggaggaggagcacctccgccagatcctgcagaagtactcctattgccgccagaagatccaagaggccctgcacgcctgcccccttgggtgacctcttgtacccccaggtggaaggcagacagcaggcagcgccaagtgcgtgccgtgtgagtgtgacagggccagtggggcctgtggaatgagtgtgcatggaggccctcctgtgctgggggaatgagcccagagaacagcgaagtagcttgctccctgtgtccacctgtgggtgtagccaggtatggctctgcacccctctgccctcattactgggccttagtgggccagggctgccctgagaagctgctccaggcctgcagcaggagtggtgcagacagaagtctcctcaatttttgtctcagaagtgaaaatcttggagaccctgcaaacagaacagggtcatgtttgcaggggtgacggccctcatctatgaggaaaggttttggatcttgaatgtggtctcaggatatccttatcagagctaagggtgggtgctcagaataaggcaggcattgaggaagagtcttggtttctctctacagtgccaactcctcacacaccctgaggtcagggagtgctggctcacagtacagcatgtgccttaatgcttcatatgaggaggatgtccctgggccagggtctgtgtgaatgtgggcactggcccaggttcataccttatttgctaatcaaagccagggtctctccctcaggtgttttttatgaagtgcgtgaatgtatgtaatgtgtggtggcctcagctgaatgcctcctgtggggaaaggggttggggtgacagtcatcatcagggcctggggcctgagagaattggctcaataaagatttcaagatcctcctgctgttggaatcttttatacatataaagtttttgtagagacatgagtctctctgtgttgcccaggatcctcccaacttggcctcccaaagtgttgggattacaggtgtgagccaccctgcccagcctggactctttattattataggcgcagagctgcagttgcccctcatggtgccagaagttgccaagggtgatggacaggctcccaggtgtcttgcaaagtcaccatggaccaatttgtgaagatgtagtatgcatacatacttggtcatcactcagctccctggggctcaggttgtggtggagacaaaaatggactgcagttagaacttagggaaactggctgggcatagtggctcacacctgtaatcccaacactttggttgggctaggtgggcagatcacttgaggccaggagttcgaggccagcctggccagcatggcgaaaccccatctctaccaaaaatacaaaaaaaatttagctgggcgtggtggtgggcgcttgtagtcccagctactcagaaggctgaggcaggagaatcgcttgaacccggcaggcagaggttgcagtgagtggagatcacaccactgcactccgatagagcaagactccaactcaaaaaaaaaaaaacggccgggcgcagtggctcaggcctgtaatcccagcactttgggaggccaaggcgggtggatcacctgaggtccggagttcaagactgcctgaccaacatggtgaaaccccgtctctactagaaatacaaaaaaattagccggcatggtggcagatgcctgtaatcccaagtactcgggaggctgaggcaggagaatcgcttgaaccctggaggcagaggctgcagtgagccgagatcgtgccactgcacattatcctgggcgacaagagtgaaactccatctcaaaaaaaaaaaaaaacaaaaccatcccttcaacacacacacaccacgctctgggagaaggtgtggcataactccttcaccaaatacagagctgccaccgtggaccagacactgctcgtgataccgagggtatagctgttaacaattcttgctttcattaagcatggactctgctgggtttgaaaacactgaattcgaagttcttcagaactgaatgtaactatgtgaatctggccagttccttaattttctttcaacttggttagttcacataagcgtggcaatcgcaaaaatacagctgtgaaaatagaagccagatgggcacccggcggtctggccttaggccctgaagtgcaggtttgaggattggtgcttgcgaagtcctgctaggcctgaactcaggtgttgggggacgtcagagccgccaaatacacccaaaagaccgggaggactcacggccaccactttcctcggtgggagctgtcccagctggtcagatcgcgcttgctgggacctgggatctcgcaacgcatgctgggatgcccagcatctaagggcgcccattggtcccgcccccacgacttgagcaacagccaatcagaggtggcagcgtgcggaagcggaagtgaggtttccgtggagacagccgagcctgcggaaggcggcggcggcggcacctgcgatcagcggctggggcaggttatggtagtgcggactgcggtgtgagcagagcggccacggggcccgccatgcgccggcggccctgacatgggcgccagcgggtccaaagctcggggcctgtggcccttcgcctcggcggccggaggcggcggctcagaggcagcaggagctgagcaagctttggtgcggcctcggggccgagctgtgccccccttcgtattcacgcgccgcgggtaagggcatgggttccaccctggcggggggaacaggcgggcggccaggcgtcccgcgccacgggggaacttccaccgctgtaccccactacagccaagccaggacgacccccatattttgagcctcattggagctgggggtggagaaagccgggcagtggtctcctggcggcctggccactctgaaagtctccctagggaagagtgggcctgaggcttgtcactggtcggaccttccgcacggtaaagctaagctagggcctccataagacctccataagatctcttcctttcatcccttccggctcagcctgcatactgaagggtcctagcctccctttcccccccagttattccaaggggataataaccctctgtttaggctgcttttcctgacagtagtggggctgaacctttgagcgtagtggctgggaaagcagggataggcctcagtattgggggtgaggctgaggaaaaaagaccctcacccagttatgttctccagatccagagcgctgacctacccacccaacccccagcccagtctcccagaggcccgcacaagagtaccagattggcttggctctagtgggctcctggagatgggcgctccctgtgctagagatttggctgtagacaccaggaagacccaacagtggcaattcaccagccacctggggtgtggggtcaggggagacgcagccttcattcctttgtgcttcttcctagcttaggcttctgctatttcagtctttgacactgggccagcagcatcttctggagtgagaccaacatgcccaggccaccaccctgcccactctagaagtcctgggtgaaggcaaagtcctgatattagaatggctgcccttgctgaacaaatcaaggatgagaactggccttggtggctgcctggatggtgtgctctggtgtgggctctcttcttgggggtctgacatagtagcactgcccacccatcacctcacttcccactttcttctagtagaccccaaaccccaggcaaaggattctccaggcaggccaggcaccgtggctcacgcctgtaatcctaacactttgggagatgaagacgagtggattgcctgagttcaggagttcgagaccagccagagcaacatggcaaaaccccgtctctactaaaatacaaaaaattagcagggtgtggtggtgcatgtctgtagtcccagctacttgggaggctgaggcaggagaattgcttgaacccaggaggcagaggttgcagcaagctgagatcgcgccactgcacctccagcctgggcaacagagtgagattctgtctcgaaaaattttttttaaaaaaaggattctccaggcatattatcctcttttcttcccacttggggttgggaagaccacagacttccccgtgacctgtgacatttgccatgcccaggtgtggggctccagcccagcctgtttccttctccctctacacagctctatgttctatgatgaggatggggatctggctcacgagttctatgaggagacaatcgtcaccaagaacgggcagaagcgggccaagctgaggcgagtgcataagaatctgattcctcaggtgaggggctgggcagcggtcacagagcctacactaagcgtgtggaggtggacccagatgggatctgttgtcatggtgggggcttttgcggggggatctgggaggaacaaggaagcttcctgaagtagaggccctgagctgacccttactagcctctgtttccatggcagggcatcgtgaagctggatcacccccgcatccacgtggatttccctgtgatcctctatgaggtgtgaccctgggaggtggcagacagaagcaccccctgccccggcaagaaactcccaggctcaatcaaggtgtggcttccattgaggagcccaggctggggccacaaccctgaataaactctgttggcccataaccttcagctgtgagcgggtcggtcccacagtattggttgggtgttggtttgtgtgtggacaagaggtggttggtgggtggtgaaggctaatggcagagttagcaccccactctcccaagccacccctgcaagcagcacagcagggcatataccagtcaggaatgcccgttacctggttccttgcctggtctgctttcttccaagtttgcctggggcctagccctgctagaggctacagcactttacaagcaaggtatgctttcttccagcccctaggctgtgggcactgtatacaagtaggaacttcctttccttcacttcccttttaacccctagtcagagcatttcagccgtttgctacctcgattcctcctgtgttggacagaggctgggggcagtgccagcctgattcttccgacctacctgccatttgttcccgccttcagatggatggacagtttgctggctattgataggagtggggactgggtgggggcttctccctctacccagggctgggctgatccccctactgcaactaactgttgccccccaaccccgaacccccagttgaggagttgagagagtgcaggctggggtcaggacaggctgcggatgcttgtgcctatggggagttactccaacccacctattctgtctaatctccatggctttgcaccaaatcctccacccctccaattgggaggggactgttcaccaccttgtggtaagggacaacaccctaaggctggtgccagtagttatgagtagcctaccaccccctcccttacagtaacccccaccccttcaggatcagtcaagggaaagcactagaacccctgggtagggaaagaaaggagggaaaaaccataaaaggaatacttataatgtgaaggtttgtaaatagtccatgatgatgtcgtggcagagtctgatttctatatagaggtgactttttttttaagtactgtgcaagctctgtgcttctataatgtgggaaatggcttggggaggatggcccctagcttaggaagactgttgtgttatttgttcaatttcaataaaatgatttgtagatcctgcacatgagagtggcatcctgtgggggctctgacacccagtgtctagactaccacctgggttcaataggtaggcctggcacaggactctggcaggccccctatgaccagcaaagcccaagagtaagtctgagcccagcctgtggccatcccaactgtggccagcaggtggctgtgtgttcacacagacctcactgcaggccccctgcagggtgggagggcactcatttatctgttgtgatccatgtggtggtgacccttggaatcagaaggccctgggatacttcactaaggattggccccacctgcctgatctaaggtgagagagtgtgacccaagatagttctggaatatctgtcttagctgtagcatcgccagctgatcctaagtggggtcatggcctgacccccatggacctcaaaggcccagctttaatggacagcagccagataggtgtccccacgcctttggcctactgccaggctcagcaacccaaactcatgtgcctcctctgaggcctgcctgcggacaccatgggagaatgagctcaggctgctgtttcagcaagcaaggctcggcccactagtattgcccctgctgtctgttgcccccatcttctcatcacctgcagcctgcccactgtggtcattctgcctgcacttctcaggggctgctataaggcagattctctactaggcttaggctttgactatcagtccaactcccagttaaagaggggagatttcagggacaggcttctgagtgtagggagctggtctgccagtctttcggaggtttgaacttgtcaaggctagggcaggatcaccatatccagcctggacttgcagttctgtggggtgcctccccatacccccataagatgccaaacatgaggccctgtcatcctccatggtccccctctactggctgttcaaggcccagggctctcccatgccagatagcatcctgtctcctaccaccactgtcccagcctgagggaactccctgtgctgggcctacccagctgaccccatcgctggaaacaatgggggtcaggcaacacttccccactctctcccgccgggctgtgctcacttccttcctgctggctgcctgaggaagtgtccctgccctgggacagtctggcctagcctttgtttccccgggggtccccacccatggagctttcaaggcttctggcccctgtgaagccagcacagtggtacagggacactgcaccttcccctaccatgtcttggactccttggtcctcagggccagactcctgggtattcacctacccctcacacagccttctgttgggggagaggctcctgggcattgggccattgggttgttgaggggttggctctgggtgatttgagggtaggtagatttgcacccctggagaggtctgctggaaccttgctgcagtcctccctagggccagccacaggaacacccctcccagaggagtatacccctttcctcatccatgttgtaaggagccccctactctgtatagtggactctgaaatccatccaggaatgaactccagcaggaaagcactctgcagaaccctcccagtccatcccctcctccccaacccacacagtcacactcactaacacattgtcctgtcacacaggatgcggaagctctcagtggaaaaaaacggactcagctactggaagtccccccgaccctccccccaaggctagttcccttcttgggcacctgctctgggggaccatcagctgaacgacccccaagtattttgactcccaaaagcaccaccacctgaccccatcctctcacaccctactggatttgaggatgggccccaatcctagggaaggagtgaagaggttccctagtgttggaagctgtgggtgtgggggagattggcacctgatcctgagcccatagccttcctgtcacctggcgcagctggcggggccagatcctactcgggaagggtggggagggcagccagccagcagggcattctggagggaaacagggtcaaggcgatctcctcccccacgcctgttcctggccctttcctctcagggggcagcaggaagtgaggagaaagggctgggatgggaggcgggagcggatgggagggaatggggtttatcaagtcctcggcgagctgcccaacgggcagcagctggcgcaagtagcctagctggagaggctcaccccaggaaggagggaggccaccgacctactgggccgacggactcccacacaggtgagcccagagcagacggctggtctgcacccccacagatgcgctcgcagttgcactccctccctctcctggcgcccgggagggttaggggctggtggtgcagacgcgggcccttttgggagttgagtctcgcacaagggagcggacctaggaagagccgaggtggtttcgcacggggctcgccagggtctaagcctgccccccaccgggagaggcctgtggagcgtagggggcgctggatacgggatggaggccctgggagacccctcttgctggctttctcggaggtccagccagaaactgctgcaaggaatggaggcctcctcggggttgagagggagccgggctcccaaaggacctcagagactgggcagaaaaggacgggatctcagggatgactgtcccgccctgatgcgagtcagggagaggggcggccaacctcctagacccctctgagcttccctgaccccaaccctgcggccacgccgcgacccagagccgggctgccaggataacgactgcctcggcccttcctgggccggctaagaagcggtgcttggccccttccctcagtctggcagggggcggggcctccctttagacggcggaccagagaagggggcccctgattcgtgggaggcggggcactactctccaggagaccagaggtcgcctcaggtcaaagtccctttttccacacaaaggggacccacggctggcgtctacgttagggggtgcagagccagatctggtgctgccccctgccaacctcggagtaccacagcacctcctgatggccgaacggggcaacgcctcctcctattcccccccccccccttcccgtccccctgccttgtccctcacactgtctctttaaagggctggcggcgccgcggagctgggaggactgaaccaccggcctcgggctgcaggggaaacatttcaggctgactggcgctcgtggctgagactcccatagaaagcccggctcagaggggcattagggtcctaaatgggcggccacgtccctctgcagaggacctggggctcttcgagcccgaaacgaggcaccggcaccgagaaaggtggaccacaccttcccgccccgtccgcaagtccaatcccgggcccacctccgcactggagtcttaaagggccagcgtgcctgggggcggagccagcagaggcgctgagccgggccgcgcctgggcgaacggccggagcgggctgggctgggcccgggatggcggtggccctggcgccggtcccggtggcgccccgcgcgaggtgagggcgggcggtgcaaacctggcggctctctccccttgggctggggtctgaatccccgggggtgctcgcggagaggcgtcccagaaaccccacccccacccgaccgggcgcaggccccacgtgtggggcgggggcggggtcccgcacaaagacccggcggagcgcgctctagccctgagcggccgggcgggggaggcgagcgcgcgcattcccggtggcggtggagggaagggccgggcggccggcgccgccgtgggaggtccgctgcccctttgtccctacggggcctcctccaagccgggagagtgtcagcgctcgagagaaagtccggagagcctcactcttctgccgggcgagtgttacacggatagaagcctcccggcagcgttccttccagtttcgtagcctcttgacgagctgttccctgctttacccaaatgctgtcgtttctctggatcaagggttcttcacggtgtacagggtgggcatcagctgttcagggttctctgaaaccatgtactggatggtatgcaggcatatatgtgactctggtgagcccaaattatctagttcttagaagggtcacagacctaatagagatttgtgccgagccacaggctacctgctccagaaaagagccctgtgcttctggcagtgagttcccagggtgccttgtctgccctgcagtggcctgtggtctctcaaacctattacagccatgagcacagtgcccccacacagcatgggctttgggagcatagatgggcttgaggtgggcacttccagtattccctagactgacttgttctccccaacccttcttccagttcctgagctggtgccaggcaggtgacacctcctgcagcccccagcatgcgggcaggcccaggccccaccgttacattggccctggtgctggcggtggcatgggccatggagctcaagcccacagcaccacccatcttcactggccggccctttgtggtagcgtgggacgtgcccacacaggactgtggcccacgcctcaaggtgccactggacctgaatgcctttgatgtgcaggcctcacctaatgagggttttgtgaaccagaatattaccatcttctaccgcgaccgtctaggcctgtatccacgcttcgattctgccggaaggtctgtgcatggtggtgtgccacagaatgtcagcctttgggcacaccggaagatgctgcagaaacgtgtggagcactacattcggacacaggagtctgcggggctggcggtcatcgactgggaggactggcgacctgtgtgggtgcgcaactggcaggacaaagatgtgtatcgccggttatcacgccagctagtggccagtcgtcaccctgactggcctccagaccgcatagtcaaacaggcacaatatgagtttgagttcgcagcacagcagttcatgctggagacactgcgttatgtcaaggcagtgcggccccggcacctctggggcttctacctctttcctgactgctacaatcatgattatgtgcagaactgggagagctacacaggccgctgccctgatgttgaggtggcccgcaatgaccagctggcctggctgtgggctgagagcacggccctcttcccgtctgtctacctggacgagacacttgcttcctcccgccatggccgcaactttgtgagcttccgtgttcaggaggcccttcgtgtggctcgcacccaccatgccaaccatgcactcccagtctacgtcttcacacgacccacctacagccgcaggctcacggggcttagtgaggtatgtgtctccagggccctgccttttttctccttccttgaggatccactgcacatttgggttatcaggggccactataggactatacctgtagtttattggctgctccacatcccctcaaatcattctgtctataacctgaaagggtgacatcattatccccatttttcagatgagaacaattgaggcacagcgatgctgagaagtttgcccaaagcttcccagcaaatccagagcagagctgggactggggcccaggccttctaactttggaatccatcctgatagctgcacctaggctcaagtgtgcccttggcttgggaaactgagccccaaaagtggggtggaaatggacttaaatgtttaaaaaggaagcaaaacaaatgagcctctgcctggacgtgaaatgggggttgagctgggagttcagcaggttgaatcaggctggggtctgccctccttgtctgttcctgtcaccctgtggtctcagtcttccccagtgaccatcccttttcctgcatagatggacctcatctctaccattggcgagagtgcggccctgggcgcagctggtgtcatcctctggggtgacgcggggtacaccacaagcacggtaagcgagacccagcctgccagagctcagtctatgggacagacagagagttagggcctttggctaccaacctcaggtgggcaatcctagtctggtccccttgtctgtctcccacccgaggcatccctggtggcaacaggaggaggtcaccccggccctgctctcaggaaagaggaaatgctgtcctgaacagctgttgagttccgcccttccccatctgcccaactgggttccggtctgtacccccacccacttctcagcaggagcagggactgtgtggctcaggtgcagattgaatgtatgaatgtgtgcagttaaaataaggtatagtcatcacagtgtggacacagtttccatctgggcctgtgggctgaggcagctgaccctgacctgtggtccttgtcttctgcctccaggagacctgccagtacctcaaagattacctgacacggctgctggtcccctacgtggtcaatgtgtcctgggccacccaatattgcagccgggcccagtgccatggccatgggcgctgtgtgcgccgcaaccccagtgccagtaccttcctgcatctcagcaccaacagtttccgcctagtgcctggccatgcacctggtgaaccccagctgcgacctgtgggggagctcagttgggccgacattgaccacctgcagacacacttccgctgccagtgctacttgggctggagtggtgagcaatgccagtgggaccataggcaggcagctggaggtgccagcgaggcctgggctgggtcccacctcaccagtctgctggctctggcagccctggcctttacctggaccttgtaggggtctcctgcctagctgcctagcaagctggcctctaccacaagggctctcttaggcatgtaggaccctgcagggggtggacaaactggagtctggagtgggcagagcccccaggaagcccaggagggcatccataccagctcgcacccccctgttctaagggggaggggaagtccctgggaggccccttctctccctgccagaggggaaggagggtacagctgggctggggaggacctgaccctactcccttgccctagatagtttattattattattattttggggtctcttttgtaaattaaacataaaacaattgcttctctgcttggattttgtacctgggctaaagtgtatgcgagattccagaatttcccatggggtttgagctcagctctgtctctatgaaaccctctgctggggacttctcgtgtaagatgtattcaccaagacttgggggcccagagctgcccactctggagctgttctgctggggcaggagccaccccagtgggagtggagggacccacattccatcccaacaccaaggacgttgctttctccgtattggttgcaagggagtcaggccccgccttgtgtgagggacagggctcattgtgtttctgccacttgcccctgtcctcccagctggaccagtgccagcctccttgccaacccaagggagaaacgtttgatcttccctgctgttcccacaggcaagggtgtctcctccagtccctgctcccaagggcagtggacaccagccacatacacctctcatcagggtcacagccctccctcggatctggtggtgggaggtgggcaggggattgggatctgaatcgtgaggttcagtccctgtcccattctagagatgcctgatggggctgggaggtggcatcttgggcctgggagcaggaacatcttctaaggtctgctccgtcctggctgtgggagagtatggctagtctctggctgtccctgaggaaagaaggagcagctggagttgtcagaccagctctgagctgcttcactagccctgcctctgacgggagtgcattctgcctctcccctcagccagcaaccccacacctggggtcccgcccatgtccgtgatgactcaccacgcagccctgcttcaggaggctctggctctggggagacagactcaagaagccgttgagtggtgagggcagccagcagcaggggagcaggggtggtgcccttggagatgcttcccacattgggttctaaaaggtgagggcggcagctcgatgctcaggaacaaatcctgggcagaggctggaggaagttggaggtggtgaaggtgaacagttcagggctggggtgtggcttagtggctgctgtgggcagaggcaggaggggcagccctagagcagcaccaggcctgacttcacctaatactgacttactcattcagtaaacgctgagcacacagtgtgcctgtgctgggctaggtgctggggatgcatcgatgatgcatctatgaaccacaccaacaaagacccccgtccttgtgggagtgacaaaatagaggtagatgcacactagatgcaaagaccgagatgccagatgggagaaacaagcccggccaagccagtgccaacccaggctgtaaagatatccttccctcacctctttcgccggtgatgggtagagaatggagaggagagagtgaggtggtaacactggaaaggtgacgtggtaaattcacacagtgaaggaggaggtgcacatacaagtggaggggtcccaggtgctcatggccatggtggggggaggccaggctggagagaagattcaggtgttggtcaataaaatgatgggccgggtgcggtggctcacccctgtaatcccagcactttgggaggccaaggcaggtggatcacttgaggccaggagtttgagaccagcctggccaacatgctgaaaccctgtctctactaaaaatacaaaaattagctgggcatccgggcctggtggttcacgcctctaatcccagcactttgggaggccgaggcggacagatcacaaggtcaggaattagagaccagcctgaccaacgtggtgaaccccatctctactgaaaataaaaaattagccgggtatggtggtgcctgcttgtaatcccagctactcagaaggctgaggcaggagaatcgcttgaacccgggaggtggaggttgcagtgagccaagatcacaccactgcgctccagcctgggcgacagagtgagactctgtctcaaaaaaaaaaaaaaaaattagctgggtttgttggtgcacacctgtagtcctagctgcttgggcagctgaaacacaagaatcacttgaccccaggaggttgcagtgagcggagaatgggccactgaactccagcctgggtgacagagcaagactctgtctcaaaaaaaaagttgccacaataagatgatggcacttagcaaaaggacagcaggaaaggagaaaggagctgtggcctgtcccccatacctgtgacttcctgcacctgtgacctcccccacacagatgtgacccatgcatacctctgagctaccccacccacacccaacacacagaggtgatccagaccacaccactgtgacctttcccacctagctatgacccctacatacctgtaacccctcccatgtgtgaccccatacagctgttaccgtctccaaataactgactcctccgcaactgtgacctctcctgcatagctgtgaccagtacccatcgagctgtgaccccctccatataaacctttatgaacctcacatttcttcccccggaggacctaaaagatggtcctagggaaagtgcaactcagggagagccagcactgtcctgtggggaaagcggggagtgggtaggaataaggtaatggggagtgatgcggctcagagatctgaagtgttgaacaaccggagacagcaggcgggactggaccatcaagctgatggaccccagacatatgcgcacacacacaccatttgagccaatcctactggaccagcccagtaggagcaggcctgtgggcagggccctggggtggaggaggatttcaggcaccctcagcttcttcctatggttccaccattagagcttctcccttggactgaggccagctggagaatgctggcctggtggttacctggattgggccaactgcagcactaggtttctgggggcacca

SEQ ID NO: 1466 - DNA, 1691 bp, Homo sapiens
tgcggccgcgtttccgtggagacagccgagcctgcggaaggcggcggcggcggcacctgcgatcagcggctggggcaggttatggtagtgcggactgcggtgtgagcagagcggccacggggcccgccatgcgccggcggccctgacatgggcgccagcgggtccaaagctcggggcctgtggcccttcgcctcggcggccggaggcggcggctcagaggcagcaggagctgagcaagctttggtgcggcctcggggccgagctgtgccccccttcgtattcacgcgccgcggctctatgttctatgatgaggatggggatctggctcacgagttctatgaggagacaatcgtcaccaagaacgggcagaagcgggccaagctgaggcgagtgcataagaatctgattcctcagggcatcgtgaagctggatcacccccgcatccacgtggatttccctgtgatcctctatgaggtgtgaccctgggaggtggcagacagaagcaccccctgccccggcaagaaactcccaggctcaatcaaggtgtggcttccattgaggagcccaggctggggccacaaccctgaataaactctgttggcccataaccttcagctgtgagcgggtcggtcccacagtattggttgggtgttggtttgtgtgtggacaagaggtggttggtgggtggtgaaggctaatggcagagttagcaccccactctcccaagccacccctgcaagcagcatagcagggcatataccagtcaggaatgcccgttacctggttccttgcctggtctgctttcttccaagtttgcctggggcctagccctgctagaggctacagcactttacaagcaaggtatgctttcttccagcccctaggctgtgggcactgtatacaagtaggaacttcctttccttcacttcccttttaacccctagtcagagcatttcagccgtttgctacctcgattcctcctgtgttggacagaggctgggggcagtgccagcctgattcttccgacctacctgccatttgttcccgccttcagatggatggacagtttgctggctattgataggagtggggactgggtgggggcttctccctctacccagggctgggctgatccccctactgcaactaactgttgccccccaaccccgaacccccagttgaggagttgagagagtgcaggctggggtcaggacaggctgcggatgcttgtgcctatggggagttactccaacccacctattctgtctaatctccatggctttgcaccaaatcctccacccctccaattgggaggggactgttcaccaccttgtggtaagggacaacaccctaaggctggtgccagtagttatgagtagcctaccaccccctcccttacagtaacccccaccccttcaggatcagtcaagggaaagcactagaacccctgggtagggaaagaaaggagggaaaaaccataaaaggaatacttataatgtgaaggtttgtaaatagtccatgatgatgtcgtggcagagtctgatttctatatagaggtgactttttttttaagtactgtgcaagctctgtgcttctataatgtgggaaatggcttggggaggatggcccctagcttaggaagactgttgtgttatttgttcaatttcaataaaatgatttgtagatcctgc

SEQ ID NO: 1467 - DNA, 333 bp, Homo sapiens
atgggcgccagcgggtccaaagctcggggcctgtggcccttcgcctcggcggccggaggcggcggctcagaggcagcaggagctgagcaagctttggtgcggcctcggggccgagctgtgccccccttcgtattcacgcgccgcggctctatgttctatgatgaggatggggatctggctcacgagttctatgaggagacaatcgtcaccaagaacgggcagaagcgggccaagctgaggcgagtgcataagaatctgattcctcagggcatcgtgaagctggatcacccccgcatccacgtggatttccctgtgatcctctatgaggtgtga

SEQ ID NO: 1468 - DNA, 24800 bp, Mus musculus
  misc_feature (7621)..(7653): n = a, g, c, or t.
  misc_feature (10948)..(10967): n = a, g, c, or t.
agcggtatcgagacaaaactacgcaggcgccaagctccctcgtttccatggcgacgacgactcaagcgcttcaacggcttggcaactgccctgtcccaagactttggtcctaccgctggactctgtagtcctaagtgtttcagttttccctattcgggttgcttcccaaaaccaaaggaatcttagcccctggcatgggtgacctggaactgctgctgcctggggaggctgaggtgctggtgcggggcctgcgcagcttccagcttcgggagatgggctctgaagggtgaggcagccgccacaggtggagtcactggtcttttagtggaggagcttggaactgacattggagaaggggttgccagtgtggaggggcctccaggtgggtaggcaaagctctctgagatagaagcgtatggcccccgtgcccctctggccccaggacaggatcatggtagtcttcagtaggatccaaccccaccctcactcccgttgcacatctggtcacccaatgtacatacatcccttcgggggcaggtggaataagcagcatgagagcctggagaagctgaacatgcaagccatccttgatgcaactatcagccaggctgagcccatccaggaactgctaatcaaccatgggaaggtacgtccaggtcccaggcaggattcctgccttctattgtacctcttggggacactaggcagcacctgttcttccttcaggcctggtacacctaagtgggaaagaaaaatatgtttgttttattttgagataaggtgttgatctgtagcccagatggccattagcctaactgtgtctgcctcccaagtgccggggctgcaggcatgcctcgctgtacctggctggctacatttcctattgtaccctcagtggatgcgagagtggatggagccatggatcctaggctccagggggagtgctcaagtgctgacatgagcctgaattgactgtaaggccaaagagatcctctctaaggaggaagtgaggctttccaaatggggaaggtagcacactaggagaaagtagaagccgggaaagatgcctggctggaggctgggccaagggcggccctagttctcctgcaagagaaaggcagagctgggtagcagggattggtctaggaacagggctcagtaaagggctgaagtaagagtaaggccaggtgacaaagaccagaataaggacaggaagagcagagctgccctaaagtggggtatccctggacggagggtggggtaaggtgcaagagggcaatggcagtaaaggccattcagaggaaacacaagagagttggagacttaagacaggctaaagctgggacaggaaagctgagggaccaaggcaggtccatttcacccctgcttctcccccgtcctccgcagatcccaacgctggtggaggagctgattgcggtggagatgtggaaacagaaggttttccctgtgctgtgccggctggaggacttcaagccccagaataccttccccatatacatggtggtgagctgggccctcagagtcctcagccgagaaagatagccagtccctgtctctccctctcagcccagccccgtcctcttcgacaggtacaccatgaggcctccatcatcaatctcctagagacagtgttcttccacaaggtgagacactactctgcaggcctgagcctggtgggctatgtcggccggggagggcatcgaaccccagaaatatcccctccctgaacccccccaggaggtgtgtgagtcagctgatgacaaggtcttggacctagtagactactgccaccgcaagctgatactgctagtggcccggaaaggcggtggtgacctgtctgaagaagaacagttccaggacagtacccctatgcaagtaagctacggtttcctggacttagcaaaatctcgatgtgagttctctccagcctccacaggcagggtgaatgctatgtgcctgtacccctacccccctctcccgcaccatcaggagctgcagaagcaggcggagatgatggaatttgagatctccctgaaagccctctccgtgcttcgctacatcacagactgcgtggataggtgggccaccctccaaggcccgggggcgagcacacaacaaggggctgtgtgtcctggcccatggcctctgctgaccacccttctaccctacctctagcctttccctgagcacactgaaccgcatgctcaggactcacaacttgccctgcctcttggtggaactgctggagcacagtccctggagccggcgggtaggaggtaaggctccccctcccatttgcctaagatgtaactggctgcttccagaacacccttcaggatcagtgtgaagggtacagggtacacatttaggattctgggatacctcacccgagatgggactagagtttgactctgaggcagacaagtcctgtgaaccatttgttgaagactccaccttgttctgacgtctggtggcccaggctttctaaccttgccaggcagtggtggacagtcctccggaccacacactctcaaagataacacaacacccaccggcatccagtgggctccttctcctcccccaggcaagctgcagcattttgagagtggccgatggcagacggtggccccctcagagcagcaaaagctgaataaactggatgggcaagtatggatcgccctgtacaatctactgctcagccctgaggcccgagcccgttactgccttacaagctttgccaagggacagctgcttaaggtggagaactcaatgaccccgcccagccccactgcccccctgcccagacccaccccccaggacatcctggcctgtccctgtcccctttcacaacttgggcttcaggcatcgacaggggagctggtaagatgcaaaccctccaaggacgctcagcccaacttcaggacttcctgtctcttggccctctggctaggaacagtttctcaatgtccttccctggatctcttgcagcttcaggccttcctcactgacacactactcgaccagttgcccaatcttgccgatctgaagggtttcctggcccacctgtccctggctgaaacccagccccctaagaaggacctagtgttagaacaggtaaggccctagaacatgcttgggagtgcttgggacggtggtccacttttccggctccttcctccctgtctccattacacttttttagatcccagaaatctgggatcgcctggagagagagaacaaagggaaatggcaggctatcgccaagcaccagcttcagcacgtattcagcctctcggagaaggatcttcgtcaacaagcacagaggtaaagtccactgagtggctgaagtcacgtgcataggaccaaggagggaaggtcacctagtgcttctgtgcacctacctgccaggtccgtccattcagctcttctcgactcctcccccaggtgggctgaaacctacaggctggatgtcctagaggcagtagctccggagaggccccgctgcggctactgcaacgcagaggcctccaagcgctgctccagatgccagaatgtgtggtattgctgcaggtgaggcgatcctgggaccttagttgcccccctaagctccaaccctgggttctcctacaagccctgtcattgtcatgcaacccaccccgctgcagggagtgtcaagtcaagcactgggagaagcacggaaagacatgtgttctagcagcccaaggtgacagagccaagtgaaggccgtagctgccgagggccgacagaagagcgcacccagactgtgactgagcttcagggactcgtggctcgcccctgtcagacctcaatttccctggtgagcacagctgagtcaagtagagctgcaaaccaccacactcttcacttcctgccccacccagcgaatacgcagaggaccaggccacagcatcagcaaactggcagacagggttggggggtgtaagcaagggccggatgtggagaccctcttcctttcgcacaataaagcagactcatgaaacgcaacagtgtggcgctgtacagtcatccttggggtcgggggagaagactggacggaaagattgggaaggggctctttgaaagggcccacccctgtgccgtgccccgcccacaagtccacacggtcggctcgcctaggtttccagcgcgtcctcctcggctctttcccgccgccctgcctggatcctgggggcggtgccgaagtcgcggcccgccctgcggcctcgcccgctcggtactcactagctgctagtccgctacagcaccggcctgaccgggccatgtcggcggagccagaactcattgaactacgcgagctggcaccgtccgggcgcatcggtccaggccgtacccggctggagcgtgccaacgctctgcgcatcgccccgggtacaacacgcaatccgtcacagcagcacgtcccgggtcgtggccaccgtttccagcctgcagggcccaccacgcacacgtggtgcgacctctgtggagacttcatctggggcgtcgtgcgcaagggcctacagtgcgcgcgtgagtaagcggccccacacagccagcgactacggaaagggaggcagcaccatagttgcgggtcaagcggcagtggagggctggtcagttgtgatgatcctgcagaccagatctcctggccttgctccatcagggagagtgcttgagaaaatggtttatcacttgtcacgctctgtccgtgccagttgggcagagttagttgtctgtgaataagaaggtgcttcaagtttgtctttaaagtgcttgtgccctttcttgaaaagcctttgtgcctgctgagctctgagcctacattccgaggcccgcctcttcccaacgattggctcactgtgttccccctctagattcctgggtgacgtctcccacattaatagggggccagaaaaagttagaaccttagttaggctccttgttagtaggaattctattgaaacttcagtcaaggttgttttgagtcaaggatgcagaggctaaaacatggagtccagccacacacacaatgagtggtccttctgacctaggaattaccagcaaacagaaccacgcaggacaatttataccttccagtctcctcgcgcctacttctcctctcagacttgttgactccgttgttgaaagtggaccttaggcatcctggtttttctgttttggtttggttttttggttgttttgttgtgttttaagacagggtttcactctgcagccctggcttgcctagaactctctatgcagaccaggctgtgacaagcaacccacctgcccctgcctcccaagttctgatgtatagttttgagttgagaatcggtgctttgggccatataggaacttaaaaatggcactgtaggcctgtgtgtgcctccagatcatctcatttactatacaagtatgtcacaaactcagctagtgtagcagtttgtgacagaatgccacatgagagcaagagctgcggcatctcagcattcacaaggagaaagaaagctgctctggggttcttgtctaggaagcaagacagtttgggagataaggaagaaaccaaaggcaaatggagggtttgcttcagattgggcttacagtgataacttgttgagataggaaccctggggtggagtgaagtggggaaaaaatgacattttggccatattcattagaaatcttcattagacattaatgtgaaggcactgcacataggatttggtctgaagaggccgatcagtgctgcctgggatctggatcaggtgagtgtagacagagctgggacagtacccaggtgagaaacctggacatcaactatgagacctgggcctttatagaactaaggagaggctgctggcaagagccgcagaggagtgagaaggaagcctggccagtgggtgctgcccctgggagtcaggaggagcaagcaggaactgaaggatttaacaatccagataatgggtacagaagtcaaaacgttagacatgtccactggacattgtggctcgtggacaataatcctaacactggagctgttggaggcaggaggatcaccaagttcaaggttaccatttggggctaacctgaactctatgagattctttctcaaaaaccaaaatagacttgtgtaaacaagtggagactaataggtttttttcggccgaagaagtaagccaattcaagcggaattgagagtatgaaaggaggtttattgggggcggcaggttcaccgatcccaaggaaggaggctagggaagtcgccatgcagacagggtaagagggaggatgtgtacgcaaggagaaagaaatgcagagacagaaaaagagacagaggaggggaacgaggacaaaatgtctggattatataggtaagagcctttgggggaggggaagcccagttctggtatgccagctatatcctgcaagaggtgtgggctaagggatgctcggggaatctggaggccaggtctgctttgatgcgttacatatgcacctctgcagctcgtctgaaacccaacaacaggggcagaggacaaatacaggaagtcgtaaattaaatgcctttgttttcaagttaatggcaaagctaagtaatagctcggcacaagtgttaagcatgcttggatccctaaccgcctgaggcctcccagcaagtgtccagaggtgcctaaccgaggcctctgggatcgggatagcagtgggcggtaaccggctggagaaaaggccagtgagccccaaaacctgttaacagaggctccctcattcagtgggtcacttcgccgagctcccccgcctcacggccagccctttctgcagactgcaagttcacctgccattaccgttgtcgcgcgctcgtctgcttggactgctgcgggccccgagacctgggctgggactctgcactagagcgggatacgaacgtggtgagcgcggggtcgggggagggcgggccgggagggaagccgggactcggcggaggtgtgcagggttaatccctacgccgtgcataatgaacaccccagtgatcaatttcccggcatcagagatgctagtttcgctggcgggtttgtcaggcgaaggcgctccctggctgggagcacgcgcacctctcacaccccgcttccggccctaagggcagcggcggtgcacatgcgcacacgccccggcccgctgggaggcgggacctgagaggcggagccgagtggagatgcctctgcgatgaggtcatccgtcgagctgtagcgtcgtggccccgcccctcgacgtcttcaccccctcacccacctcgacaccagagctaaagtcgggctgtctaggtttcagtcctaacggttgccgcgcggcgctggcctccgcgcaagcgcgacctgacacgctcacacgcacgcacgcacgcacgcgcccgaggcggtggttagaggctctccacgcagtggactagggatcgggcgggtaaggcgatgggcgaggctgaaacaccttccttcgaaatgacctggagcagcacaaccagcagtggctactgcagccaggaggactcggactcggagctcgagcagtacttcacggcgcgtannnnnnnnnnnnnnnnnnnnnnnnnnnnnnnnncccgagtagaagcccagttccagcgcgatggtactgaggacccagggctacccctgcccttgcagtcacagaccggttgagccagggggaatcaactctgaagcttgaagggtggaccacaggcgggcgtttttcacccatgactaaagccagcctcgcaatccaaaccggcgtcttgatttcgcatttgggcgctcccactccctccctgggggaaatgaggaagtggaggaggagtccaccgggaagtgagaagttagtttgggaggggactctggccgtgccgtatgcggtcttggatcagccagcaaagtgcccagccgttgctcgaccaactctttgacaccagctgctggactcgatctttctttcctccatggtggaactgtgcagagggatttggggaattcaggaagagggccttaaaagactattaaaaaaaaaaaagtgtggtaccagggcagctgaacctctttaaaaagtctagatgtgcccaaattatccgactttctgggaatatcatagttgtggccaccaagctcggataacttgttctggagcgggaatccctcggaacagcacagaggccagcgaatcaggaaagtgaggacggagactgaggttagaaaacttagtagcactgaactagaactccttatttgagccaagaaagtggaattgtctgtgatgctgtaggtgagatttgatataaatttcctacaggtggactgctacttgacacctccaaaaccttagtccagactttagactcaatgtggggtgggagtgggggcgggagggtgtctctgggattgtctccataccactcaacctgagtcatcttctattatggagaggtgggggaaaatataagatactggccagttgaaaggcatacaaagagaagaattgtttaaaagcagctgaagtttatagctgacttagctgtagagtgcttagcattatatgtgtgatggatggcctgacttccaaccattaaggaaccaaaaaataagaaagaagaaaaggaagctaagaagtcccaaagagcagagtaaaagcctgagggctggggctgggctgcaggttcaatccccaacccagaccctcctagaattctcctgggaccaggcactgcctagcggtgatcccagctgtgtttgttccaattgcattccaatttagggcctttctgaaaccaacaggaagtaagactcacactgggagttgaggactgactgctcttccagaggtcctgagttcaattcccaggaaccacatggtggctcacaaccatctgtaataggatctgatgccctcttctgatgcatcagaaaacagctacagtgtattcacacatatataagtaaataaatcttaaaaaacaaaaacaaaccaggaagtaagactcaggcagttaggtcaagtgagtcctggctgccctgagcagcagggtgactccaccctcccgcagttcctgaagaaccttgtctctgggctaagtcttcagacagcgagggggaagaacagaagcctccctgcttgctgctggtaggacaggctctgctgggaaattgcctgtacacctctggcagatgagaacctgaattgaagctgccttctgtgtagcttgagtcagagggtaaatggtatgtcccagtgttacttcactatataagatgtggtgtggctggtcccaagaaacccactaaggcatcttacattatagagatcagctttcctctcctgtctactgtagttagactgctgatgcaccagctcccgtgctgcctaccctctcgggggtcatgttctgtgctgccgcacagtgggagagtgggctttcttctccagaacaaactgaccaaactagtgttctgggttcagctctacagtggagatgtgattgagatggggttttaatttttgtatgtggtgggggtggaaatcgaagggccttgtacattctgggaaattactctatcactgagctacattttatcccccaaagtgtttatactttaaacaagatttttcccttacagtccttcatggtttcctggcccctggacatgtgccttcatttatctgtttctgtgatgtcgttaggggccacaaccagtgctgaggtggccccagatagcagaaagccaaacggattctacctgtccttgctctctccatctatagcatgtaaaaccaggagcaatgatggcttcaggatgtatgggtttggtgacaggaccaaaatcaagttccaagccagaaggaccatccccatccccaccccacccaccaaagagccttggccttttcaagggccctgtatctatgctggcctgtctttcaggatgaggctgtagagcgggagacacccgatctttctcaagctgagactgagcagaaaatcaaggactacaatggccagatcaacagcaacctcttcatgagcctggtgagttggctgttcaggaatgtgggagaacagaagcccagctctgggccagatgtccagagagtcagagcaaagtattctggggtgtacccaagcagctatctgtgcagacctggctttaccctgcccctggacgactcaacctaactcttccatctccagtagaacttcctgacatggcatggttctccttttcctttctttcttttcagaataaggatggctcctacacaggcttcatcaaggttcagctgaaactagtgcgtcctgtttcagtgccttccagcaagaaaccaccttccttacaggatgcccggagaggtacggggcggagcacagccgtgaagcgccgcacctctttttacttgcctaaggatgctattaagcatctgcatgttctatcacgaacacgggcacgtgaggtcattgaggccctgcttcgaaaattcatggtcgtagatgatcctcgcaagtttgcactctttgagcgaactgaacggcatggccaaggtaggtttccagtctcagcactccctgtgtaagggttatagatcacatacctgtgtattaaggggctgaggcatctgagtctgtctttgtttattttcccccgcccaacctccagtatacctccggaagctgtcggatgacgagcagcccttgaagctgcggcttcttgcagggcccagtgaaaaagccctgagctttgtcctgaaggaaaatgactcgggagaggtgaacgtgagtccgtagtccttcttacttactttcttactttcttatcactaacaaagctagtgggggtgtagccatggtgaggatttcagggagaaaccgggnnnnnnnnnnnnnnnnnnnncacagcctgtccaagaatacacaggtcctctaatggaagtttaggcttccaggactctttgttttgttttgttttttgaaacagggtttctctgtatagccctggctgttctggaactcactttgtagaccagaatggcctcgaactcagaaatcctgcctgcctttgcctcccaagtgctaggattaaaggcgtgcgctacctctgccaaacagcttctgggactcttaagccaaggtctagagcctatcccaagaaactataggaagaagctgaatctagtggttcatgttataatcactgtactggggaggctgaaactggaggattgttacgagtttgagatcagtctggactaccaaaacaaacaaacaaaaacaaaaaacacacaagctaggaagaattgtcttcaggctttgttgtttcctggtgttgaaaatgagaacttgactaactcatagtgagccaagaccagttcagagctccatatatatgggctcagagatggctccacagtgcagaggatccacattctgtttgaagcactcatatcaagtggctcccactcacctgcaactccagcgccaaaggatttgtcttcctctgctggcatcagagggtgcctggagttatgtgcctgtgaccccacgcgcatgcgcaagcacacaactaggacaataggaaagatggctcagtggttaaaaacatgtattgttcatgcagaggacctggatttggttcttagacgcatgtaaaagcttacagttgcccataattgcagaccatacacacaatgtgcatacctgcgtgcaagcaacacacttatacacataaaacagattttttttaaagactttgtgtatgaatgttttgcctgcatgtatatatgtgtacacgtgcccacagaagtaagaagaaggtgttggctctcctagaacagagttacagatgatggaacccaccatgttggtctaggaattgaactctggtcctcttcaagagcaaccaatgctcttaaccactgaactatctttcgagcccctgaaacaaaccttaaaacaaaaagaaaaagaaaagagctttgcaggtataacctgaaaaacataaaggcctcttggaagcattgagacggtctgccagctaggacagatggcacaggcctataatctcatctacttgggaagctaaagcaggaggattgcctcaagttcaagactaggctggcctgtatagcaagatcctatctcacaaacaaacaaaccactcttcctagcaaggcctagggacagtggcttatactctcaactacttggaatgctaaagtgggaggatcactagttcaaagccttcctgggctacagagtgacttaaagggcaatctacgctaacttaatgagatcctgtctcaaaagtaaaaaggcttgggactgtagttcagtggtaaagtgttgagcaagcttagccctttgttcatgtcttagttaggtcttctattgctttgatgaaacactatgaccaaaaccaagttggtggggaaaaggtttatttatttggattacagttccatatgataatccatcattgaaggaagtcagggcaggaactcaaacaggacaggaacctgaaggcaggagctgaagtggaagccatggtgggcgctgcttactggcttgctcagcctgctttcttatagaactcatgaccaccagcccaggggtggcaccatacacaatgggctaggccctcccctatcagtcactcattaagaaaatgccttaaagctatagcttgtggaggcattgttttcaattaatagagaattaatattccctattttcagataactttaacttgtgtcaagttagccgaaaactagatagcacagtgcaatttccagtaatgtaaaaagaaagaaaaaaaaggacaatgactttttacatcggggttagttgtggcttagtggtaagaatagacgctcagcatgcacagagctcggcagcaaaaaaaagaaaagaaaaagaatagggtgggtacaagggctgtatgggaatgtagcttggtaaaaggtaatttgctaacatttatgagaccctaggtttgaatcagagcccattatattgagggagagaatatgagactatgcgggagaatacacctaacaacagatagagatatttcactacaaggagactgttttgtaggatctgttttctatacagactgctcatgaggatcctagcacagaccatttagtgaaaagcctaacaccaaggctagcattgtgataaatacttgtaatctcagcgttccggaagcagaagcaggagaatcacaagtttgagactagcctgggctacatagcaagttaaaggccaacctttgatatgtagaaagactatgactcaaaaaaacaacaaaaaaaaataggggacttaaagagttggcttagcagggctggagagatgggtcaacgattaagagtaccggctgctcttctgaaggacccgggttcaatacctggggttcagttcccaatacccacatggcagctcacaactgtctgtaattccagttccaggggatctgatgccctcacagtcttacatgcaggcagaataccaatgcacataaataaattataaaaccattaaacaacaacaaaaggagttggcttagtggttaagagtacatgttgttcttacagaggacatgggtttgatgcctagcacccagatggcagctcacaaccatctgtaactcttaattctgggggatctgataccttcttctgacctctatgtggaaacatgcatacacataagataataatgaaatgaaaaggaggtaatgtcaggagcgcagacctgctcatgggagaaccatcatggaccagtcttggaggagggtctgccaacttagctattcattgctgcagcccgtgtatctctcctctgccctttccagtgggatgccttcagcatgcctgaactgcacaatttcctacgaatcctgcagcgggaagaagaggaacaccttcgccagatcctgcagaagtattctcgttgtcgccagaagatccaggaggctctgcacgcctgtcctttggggtgaccttgggtctccatggatgacaggaggagaacaggcagtgcaaagagcgtgccgtgtgagtgtgacagggcctgtggggcctgaggagtgcgtgtgcatggaggtcctcctctgctgaccgggatgagcccagagaacagggaaagagccagccgtctacctgtggatatagtggggcggggctttgcatccctctgcccgtatgtactgggtcatactctgcgtagctgctcaagtcacagggtcgcagctgtgagaatcttagagactctacagacagaacaaggttatattttcacgggtaagagaccttacctatggaggaagattgttttgagtcatgaatgggtctcaggatagccctatcagagccaagggtagctgctcagaataatacaagcaattaaggtagagtctggggttccctcttaccgtgccttctgacttccaaacaaacaccctggggtcagagagggctggccagtacaacaactacagtggctcagtcagtgcctcctctaagggaaaggttgctggaccagaccctcttcttgtttgccaaagccagagtctccctcagatatttttgatggaagtgtatgaatgtatgtaatgttttgtggcctcaactgaatgcctcctgtggggaagggatgggggtgtgacagtcatcatcagggcctgatgcctgagagaattggctgaataaagatgtaagaatttttctggttttggactctatagatgtgggcccccagtcggggtaacacctaatgaaagactgccaacaaagattgacacatccagagtgcaccctctccaaggtcgcagtgggaccaatatgttcaggaaatgtatgcctgtggattcaggtgtctttcaaccctccagggctcaggtcatgaagagacaagaataagctacagttactacacaggaaacttttttctccaggccaactcagagaaaccatagcagtaaccccttctccaaaaaactactcgtgggtcccacacttcacatgctaccaggggaaagctggtaataattattttcctgaagaatgttctctggtgaacttacaacacttagtttaagttccttcagacctcaaatatactcttaagaaattgatcaaaaaagttttaaaaagaagtttggctccctgtgcggttggtcactcctttaatcccagtattcgggagacaggcatttgagcgtcagccatttatacatggcaagtgccaggccagctaaggctacatagtgagaccctgtctccaaaagaaaaaagaaaacaaaaacattaagcaagatccgtagtttctttacaggcaaatgtgacaactgcaaagacacagttgtgaaaacagccaaccttagcctcagacaggcctaaggtcccttaggggtggaggggtgaccctaattgactattgctactgggccggagttttgggcgtgtcagggacgtagagacaactataccgggtccgaccttaaagtcaacaacaacacattacctccgcctttctggaagggagctgtcccagctgacccttgggacccataggcttctgggacctggaggcagcgcatccctgtggtggtcagcctctgagagtggccattggttctacaccacagactgacgagacctttagccactcagaggaggcaccgtgcaggacgcgcggaagcggaagtgaggtttccgtggagacagcagagcctgcggaaggcggcggcggcggcacctgcgagtggaagctggggcagggcatggtcgcgcccgccgcgctgtgagagcggagcggccgctgggtccgccatgcgcccgcggcgctgacatgggcgccagcggctccaaagctcggggcctctggccctttgcctccactccggggggcggcggcccagaggcggcaggctccgagcagtctctggtgcggtctcgagcccgagcagtgcctcccttcgtattcacgcgccgcgggtaagggcatgggtatctgcctttgggaggacatccgggaatgagaaacgcccccctacatttgaatcagacgactgtcatattttgggtcccagtcaaagcaaggagaagggaaaaccaagcggcgttcagctcttgaccgcccagatggtctttttagagaattgcctgaggttcgtctcttagggagcagctccataattcagctaagacggcatctaagagtcttaaaacctccctttcatccaactcagcctgcaaattaaaggcatttatgtcccttctgttcttctaagccttagaagaaatctaagggaagatgaccttctgtttaggtgtcttgccttcctcactgtgaagttggacctccgagaatagtgtctggaaaagcagagaaaggcgtcagtgttgaaggtggggccacaacaaaaaaagtgccctcaaccagttgggttctctagatctggaacactaacctaaccttcttttttcccaggtgctcacacaaaatggcctggacctagtgagctcctagggactggcattccctgtgatggaaatttgaccgtaaataccagagagacccaacagtgtcgattagacagtgccagccactggggaatgacttggagtgcagccttctgggctcagacatccaccatcttggtctttggccctggaccagcagtgtctttagaagtgagaccagtatgcccaggccactaccccacccactccataaataagccctaggtgaagggcctgctactagaatcatgacctttgtgaaacagaccagtggtgaggactaactttagttgcctagagagggtgctctgatgtgacatcctgttggtatgacagggcaacagtggccttgtcacactgcctgcttccctccgggcaccaagcaaagagttcttccacggagattaccgttgtgcgtcttctcttggggttcagcgtacttccctgtggtctgtggcccttgccaaggccagggatgaggctccaatccagcctgttccccttctctccacagctccatgttctacgatgaagatggagatctggctcacgaattctatgaggagacaatcgtcaccaagaatgggcagaagcgagccaagctgaggcgggtacataagaatctgattcctcaggtgagggtccgagcagtgatcataaagcctacatcagtatgtcaacggagatacagatggggctttctgggggaagagctgggaagaacagagaggctcttagcatagaggcccagagctgatcttcactagcctctgtttccatggcagggcatcgtgaagctggatcctccccgaatccacgtggatttccccgtgatcctctatgaagtatgaacctgtgtgtggcatggcagacacgagcacccactgccccagcaagaaactcccaggatcaaggtgtagcttccattcaggagtccaggctggtgccacaaccttgaataaactaaactccgttggcccagaaccttcagttgtaagaggggttgtccctcagtgttaactggtattggcggatgtctgaacaataagaggttggtggctggtgagggctaaggacagaattaccagcccgtctcccccagccgcttgtgggagaagcatgacaggagacacgtgccggtcaggaatgcctggttcctggttacctgcctgacctgctttcttccaagcttgcctagggcccagccctcctagaagctacagcactttacaagcagagtctgccttcttccagcccctgggctgtaggggctctacccaagtgggaacttccttttccctcactccccttcccccctagtcagagcatttcagccgtttgctacctcgattcctcctgtatcggacagactggagatacataccagcctcacccttcctgcctacctaccacatgctcccgctcttaagctggacactttgctggctgttcaataagaatgaggaccagtgtgggaggcttctcctttcacccagggctggactgatctctcttgatttcaaccagttgccctcaagttgagagggtacaggccggggtcaggacaggctactgacgcctgtacctgtggggacttgccccaaaccacatattcgtcgtctcccttgtctttgcaccagtcccacaaatccccagttgtaggggagaggcagtccaccacctagtggtaagaaacgactggggctggtgccagtagctatgaggagcccatccccccccttctccttacagtatctttaccccttcagggtctgttaagagaaagtactggagctccttggtaaggatagaaaggaggggaaaatacataagaggcataattaaaatgtgaaggtttgtaaatagtctagactatgataatgttggggcagagtctgatttctatacagagatggctttaaaaaaaatacttccttgtggaagctctgtgcttctagagtgtgggaaatggcttgggacgagtgatccccagcacaggaaggctgttgtgttatttgttcaatttcaataaaagttatttgtagaccctgcacacgagagtggcgtccagtgagactttaacatccagtttctagactgctgatccggtaaggctagcaaacccttgcctgaacattgcctgtagcaataccagccgtggccaacaggtggctgtgtccaagaactgtctccagccctctcaagacgcagagggccactcacctgtccattctgtctgggaatttggaaacagaaggtcgtgtgggatcctagggagattgccctagtctgaggtgtgagtgtagccacacacacagttgtgagatggttctggtcccaacaataccagattatgtgaagtgaggttacagcctaaaccccacagatcaaggcctacctatacttgaacaacagacacttcccaccatggccttggcctccttccaggctctgaagtccacactcacctgacttcccaaggcagccatcagaaaggagagcacaggcttctgctgcagcctctattgtagggctcggcccaacacctcctcagctctctgccgccaatggacattctgcctacgtttctcaaggtcggctatgagcaggttctctgctcgcctagcctttggccataataaactcaagacgtttttaaaaagcaaaagcaaaacaaacaaacaaaaaaaaaaaccaattgggaagcaggagtttatcaactcagggcagttggccttcaagttgctcaaagctggaactggtcaagtcttagcctgttcaacatagatttgcggttctgtagaccaactgtcatccctgtaaaaagccaggagttaggttcctgtccaggagccaaggctccccatatcaggcagtatcctatctcaccaccaccatcctgctcgggaaactccctgtcctggacctgcctagctaaccccaaagctatgaacaataggagagtcagggcagtgtttccctactccatccggctgggctaggctcacttccttcctgctggcagcctaaggaagtgtccctgccctggacagtctcgcctggcctttgttttcccagtagtccccacccttggagcttcctagatttttgtcccttgtgaagccaacacaatggtgaccacagcctaggctatacacccagctctcctgctttctattggcagagggactccctagcactggggaggtgagccccttggaccaggtgaggggttgtcagtttaggtagatttgaggtcaggcaaatttgcctggacctccaaagaggtcttccaggaattcctattgtaagtttcctctcccatagggacacaattctccccccaccccatatcacacagccacaggcatcaacacattgtcatattgtctttgtcacaggttggatacttccgctctcaatggaaaaaaaaaactgactcagctactggaagagcccaccacccccaccccacccgttttcccctcgtgcaggatggtttcttctttggcacctgctctaggggaccattcgctcaaccacccagcaaattgactcccatgaatacagccagccacttgggccccctcacaccctactggatttgaggatgatgcaaaacttggagaaagatgagcccttggttcctaggcccatatccttcccatcacctggcacaactcatgcagaccttcctgggaggaagggtgcaaagggcagccagccaccaagggaaacagggtcaaggggctctcctccccgcccccctggccctttccgcctggagggcagcaggaagtgaggagaaagagcagggatgggaggcgggagggagtgggtgggaaggaatggggtttatcaaatccccagcagactgcccagagggcagcagctggcgcaaggaacctggctggagagactctactcaggtgagcgcagagtagtacataaagctagtccgcactgccataaatgcgtgtactcctgcggcgctccctagcttccaagcttgcggtagggaaaggggctggcggccagaagcggactttcggagatttgagtcgtgcattggagagcagatctaagaggcgagggtacaggtctaaacctagtcctcactggaaggggattgcaaggcagaaaggttcagaatatggagtcggggtactagggagacactgaagcctcctttctacgaagtcaggcccgaaactttggcaaattgctctttatttggagttgagtgggtacccctatggacaaccatcccaccttcacctcgtcgcagagactggtctggggagaatccagtaaattggcaagccctggcgtggatccggtgaaagtggctagatcactttcccctttggcccgactgaacttcaatccctttggcaaggcagcgacccacccccctggttaccaggacaaccactacgtctgctttgccaaaggagggctcagaagctgtactaggccccctcctctagacgagcaaaaggcggggtttccttctgaccgcagacagactagtggagggaacctgggctcagcgaaggcgggtcattaatgttccaagaggttctggatccactcgtgtcaaaatctcttacactagacaaagggcccactttgctagagtccatattcagacaggtgggattgaatccgcagctacccccagtcaaggcttcagctataagcttttatttcaaatgccattaccaccactacaccctcattccgctcgcgcccgccccatccaatgttctatccctttaagaggccagctgcaaagagtggattgttccactgacgacagattgtgggggtaatatctcaggctggttagctctggtggctaaaaccagcgggaatccccattccaggaggtattcaatctcagatacataactatgttcctctacagaagatctaagggtcctcgaactcgaaacgcagcactggcaaaaaggaagagaaacacaccctccctacgaggccgtaaattctgccatccacccacctccgaggcaggattcttaaagggcccgcgggcctcggggcggagccaacagaggctcgagctggggcagtgcttgggcgaagggccggatcgggcttggttggtaccaggatggcggcggccctggcgtgggtcctggtggcgcctggttcgaggtgagggcgggcgtcgcaagcctggtgactctcttcctgtgagatgggctctgaatctctaggggcgccctcataagtgacccaggaaccccacccccacccggctgaactctggccccacgtgcggggcgggggcggggtcccgcacaaagaccggagtggaatactctttacccgggaccccttgtgctgggaggtgagggtgtgggccggtcgcgaagtgctcacacagattcttggtggctgtggtgggaagggcaggtcggcgagcaccgcggtgggaagtccgctgcccctttgtccccggggcgcctcctcctatcctaagagtgtcggtgcccgagactaagtcctgacgttcttgctcttctgcttggcgcacattgcacagatagcagttcctctgcagtgtacctaacagcttcccagcttctgtatgcgttgtgccccaaatgctgtctcttctcagaatcaattctgagttcgtaatgagggtgggggacatggggtgttcagagtgttttaaaactatttactgtatggtatacaggcatgtaagtgactctagcagtgagtcggtagcctaatcagtccctttttcagaaaggatatggacctaaaggagattcttgcccaaccacgggcagctccctgctctagaaagagctctgtggtttcggtaaattccctaaggtcttttgcctacccatcagcatcctgctatctcccaaacctgttacagcctcggccatctgagcaggagcatggtgtgccgcacagtatgggtttggggagtttatgtgggatgaaggtgcgtacacatctctggaatttgctagactgacttgttctctctcacactttcttcagttcctgagctgctaccaggcaggtaacacttcctgtagcccccagcatgcgggcaggactaggtcccatcatcacactggccctagtgctggaggtagcatgggccggggagcttaagcccacagcgccgcccatcttcactggccgaccctttgtggtagcatggaacgtgcccacacaagaatgtgccccacgccacaaagtgccactggaccttagggccttcgatgtgaaggctacaccgaatgagggttttttcaaccagaatatcaccaccttctactacgaccgtctaggcctgtatccacgttttgatgcagccgggacatctgtgcatggcggtgtgcctcagaacggcagcctctgtgcacacctgcccatgctgaaggaatctgtggaacgctacatccagacccaggagcctggggggctggcagtcattgactgggaggaatggcggcctgtatgggttcgaaactggcaggagaaagatgtttaccgacagtcttcacgccagctggtggccagtcggcaccctgactggccatcagacagagtaatgaagcaggcccagtacgagtttgagttcgccgctcggcagttcatgttgaacactctccgttacgtcaaggcagtcagaccccagcacctgtggggcttctacctctttcctgactgctacaatcacgattatgtacagaactgggagagctacacgggccgctgtcccgatgtggaggtggcacggaacgaccagctggcctggctctgggctgagagcacggctctctttccctctgtgtacctggacgagacactggcgtcctccgtacacagccgcaactttgtcagtttccgtgttcgggaggcccttcgagtggctcacacccaccatgccaaccacgccctccccgtgtacgtctttacgcgtcccacatacacccgaggactcacggggctgagccaggtacgtgttctcccttcctctgggagccactgcatgcttgtgttatcggggaccagaagtactattccatatctgttttagtcttgtggaagggtgatgtcacccccattctgtagataagaccgaggcccagagatgctgagaggtagccaggagcctgtagcaagtccgtgaaaagtgcacagaactaaaccaggcatcctgactttggggtcagaatgtgtaacctttgactttgtgggctcatgcgtgggctcttggccttggagactaaggtccaaggtgaggatagaaatgggcagagcggcctctgcctgtctagaactgtcctaaggtcagcaggttagagcaggtctgttctgagtctcctgcgacaccgtctggtgccagtcttgctcaggaaccatccctccccacacaggtggaccttatctctaccatcggtgagagtgccgccctgggctcagctggcgtcatcttctggggcgactcggaagacgcttcaagtatggtaagggagacccacctggccttccagggctgatgaagagtgtatactttggcttctgccccccacctgggtgtacacactgagtatagcttatctcctaagcatagcagctttgtccctggacccaagagggaagaagggcacccccaccctgttcccaggaagaggaaatgctatcttgaacagctggagttccgcccttcctcatccacacagctgggctccagtctgtctcaaccccgcttctcactagggacaggggactgactataaaggctcgggaactctgtgtatatgtttacatacatatgcaaataaatatgccagggatgtgcctcagtagagtgcttgcctagtctagggttcaaactccaccactaccaaaagaaagaggcgctatcaccacagtttccgtcggggcttgggcaaaggtagctaacatcagacactcactccttaaccttggccttttccaggagacctgccaatacctcaagaattacctaactcagctgctggttccctacgtagtcaacgtgtcctgggccacccagtattgcagttggacccagtgccatggccatgggcgatgtgtgcgccgcaaccccagcgccaataccttcctgcacctcaatgccagcagcttccgcctagtgcctggccataccc

SEQ ID NO: 1469 - DNA, 1564 bp, Mus musculus
ggcacgagggggatcgggcgggtaaggcgatgggcgaggctgaaacaccttccttcgaaatgacctggagcagcacaaccagcagtggctactgcagccaggaggactcggactcggagctcgagcagtacttcacggcgcgtacctcgctggttcgcagaccgcgtcgggaccaggatgaggctgtagagcgggagacacccgatctttctcaagctgagactgagcagaaaatcaaggactacaatggccagatcaacagcaacctcttcatgagcctgaataaggatggctcctacacaggcttcatcaaggttcagctgaaactagtgcgtcctgtttcagtgccttccagcaagaaaccaccttccttacaggatgcccggagaggtacggggcggagcacagccgtgaagcgccgcacctctttttacttgcctaaggatgctattaagcatctgcatgttctatcacgaacacgggcacgtgaggtcattgaggccctgcttcgaaaattcatggtcgtagatgatcctcgcaagtttgcactctttgagcgaactgaacggcatggccaagtatacctccggaagctgtcggatgacgagcagcccttgaagctgcggcttcttgcagggcccagtgaaaaagccctgagctttgtcctgaaggaaaatgactcgggagaggtgaactgggatgccttcagcatgcctgaactgcacaatttcctacgaatcctgcagcgggaagaagaggaacaccttcgccagatcctgcagaagtattctcgttgtcgccagaagatccaggaggctctgcacgcctgtcctttggggtgaccttgggtctccatggatgacaggaggagaacaggcagtgcaaagagcgtgccgtgtgagtgtgacagggcctgtggggcctgaggagtgcgtgtgcatggaggtcctcctctgctgaccgggatgagcccagagaacagggaaagagccagccgtctacctgtggatatagtggggcggggctttgcatccctctgcccgtatgtactgggtcatactctgcgtagctgctcaagtcacagggtcgcagctgtgagaatcttagagactctacagacagaacaaggttatattttcacgggtaagagaccttacctatggaggaagattgttttgagtcatgaatgggtctcaggatagccctatcagagccaagggtagctgctcagaataatacaagcaattaaggtagagtctggggttccctcttaccgtgccttctgacttccaaacaaacaccctggggtcagagagggctggccagtacaacaactacagtggctcagtcagtgcctcctctaagggaaaggttgctggaccagaccctcttcttgtttgccaaagccagagtctccctcagatatttttgatggaagtgtatgaatgtatgtaatgttttgtggcctcaactgaatgcctcctgtggggaagggatgggggtgtgacagtcatcatcagggcctgatgcctgagagaattggctgaataaagatgtaagaatt

SEQ ID NO: 1470 - DNA, 813 bp, Mus musculus
atgggcgaggctgaaacaccttccttcgaaatgacctggagcagcacaaccagcagtggctactgcagccaggaggactcggactcggagctcgagcagtacttcacggcgcgtacctcgctggttcgcagaccgcgtcgggaccaggatgaggctgtagagcgggagacacccgatctttctcaagctgagactgagcagaaaatcaaggactacaatggccagatcaacagcaacctcttcatgagcctgaataaggatggctcctacacaggcttcatcaaggttcagctgaaactagtgcgtcctgtttcagtgccttccagcaagaaaccaccttccttacaggatgcccggagaggtacggggcggagcacagccgtgaagcgccgcacctctttttacttgcctaaggatgctattaagcatctgcatgttctatcacgaacacgggcacgtgaggtcattgaggccctgcttcgaaaattcatggtcgtagatgatcctcgcaagtttgcactctttgagcgaactgaacggcatggccaagtatacctccggaagctgtcggatgacgagcagcccttgaagctgcggcttcttgcagggcccagtgaaaaagccctgagctttgtcctgaaggaaaatgactcgggagaggtgaactgggatgccttcagcatgcctgaactgcacaatttcctacgaatcctgcagcgggaagaagaggaacaccttcgccagatcctgcagaagtattctcgttgtcgccagaagatccaggaggctctgcacgcctgtcctttggggtga

SEQ ID NO: 1471 - DNA, 27589 bp, Homo sapiens
acaaataaaagtgccggttaattacaaaaaaaaaaaaaaaaaaaaaaaaaaatcgtcctgatgcggtgactcacctgtagccccagctactcaggaggctgaagtggggggatcatttgaggccacgagttggaggctacatttagctgtgatcccatcactgcaccccagcctgggtgacagagcaagaccccatctcaataataataataataataaataaacctagaaagaagcagatgtagccaggcgcggtggctcatgcctataatcccagcactttgggaggctgaagcgggcagatcacctgaggtcagatgttcaaaaacagcctggccaacatagtgaaaccccatctccactaaaaaaaaatacaaaaaattagccaggtgtggtggtgcacacctgtaatcccagctactcaggaagctgaggcaggagaatcacttgaacctgggaggcagaggttgcagtgagccaagatcatgccactgcactccagcctaggtgacaggagactcaatttcaaaaaaagatgtgatcaagagtgagttgggttggaggcagggactgctctggattaaatggccaagaaaggccatgctgaggtgtaaactgagccctgaaggaaaagtattccaggcaaagtgcaaaactctgaggcaaaaacctctttggaatgtatgagggaggttcagggaagcaaggaggagaggaaagaatccaagtcccgaggtacaggagaggacaagaagtagatcttgcagagctgctagtaagcggcatcccacctaacattttgagggccagaagtagccacagagcccctctcacgcaagggagtaatgtctatatgctttttttttttttttgagacggtctccctttgttgtccaggctggagtgcggtggtgcaatcttgcctcactgcaaactccacctcctgtgctcaagcgattctcctgcctcagtctcccatgtagctgggactacaggtgtgtgctaccacacctgtctaatttttgtacttttagtagagacagggtttcaccatgttgcccaggctggtctcaaactcctgacctcaagtgatccgcctgcctcggcctcccaaagtgctgagattacaggtgtcagccaccgcgcccggcctgatatacacttttaaggctccgggctgtccatgaggatcaagcgtggaagtaggtctacagaaaaggctgccgcagttcacccatgacaggtgatgacagtctggacatagggaggatggagagaagtcgtgcgccctggcagtatttcaggagccaactagtggagccgggacgcgagaaatagaggaaccaagaagccataaggaggaggaagagcagcgggtaggtcaagatgccacagccgcaggaggggctgttggggtcggggttacccccatccctgtgcaggcggacttggcgtctgaggacagagtccagaccacaaggatctggagctcaggagagactcgtgggccacagcccgagaaagcgctgggaatccaaatactatggcgattggcagtcgcgtaggcgaggcgggctagagacccgcccggatttaggcgcgagccacctccaggggcggggcccaggccgcactgcgcaggcgcggctaacccgtttccatggctgcgagaactgacgctccccaaccgtcccgcaactgtcctgtcccagactttggcaccgtcggggtccgtcgtccccgaatgtgacagcatccccaccccggctgctgcccaggatccgccggaccccggcctcgatatgggagacctggaactgctgctgcccggggaagctgaagtgctggtgcggggtctgcgcagcttcccgctacgcgagatgggctccgaagggtgaggcacccgggtcaggcggagtcccggagtcattgtccttgagtcggggagctggggcctgactcgggggaggggctgcccagtgtggaggggctcccaaatgggggagcagagcgttccgagacaggagtattactgctcctgagccccctgtgtcccctcaggatcaggttaggcttcagtaggatccagcccccatccccactcctaatgcacacacgtggacgcacatgcacttaccctctgaggcaggtggaaccagcagcatgagaacctggagaagctgaacatgcaagccatcctcgatgccacagtcagccagggcgagcccattcaggagctgctggtcacccatgggaaggtaccccgaggtcacaggcagggttcctgccttcccccatacctcacctactctacccctccggagtcccctgtgtgcccttcccctctggcctggtacacctgttctccctgaaggacaaagaggaatgtgttacatgtttcattttgtatccctattggacaggactctggcacaccaggctgggtgcagggcatgagttgattagggagaaagctgtaggtcctagaacagcttaggcttcaaggggaaggcccaaatgctaaaggcatctgtgaattgactgtaaggctggtggtggggaaggggtggggaggggttggggagggcgggagggaggggagataacctaactggaggtggaacttcggcatggaaggaagcagccttcccaacatgaaagggggaagttagaaaccagggagatgcctggctggaacatggaccagggagtgtcaccagcagatgacctgagatatcaattgaccaaaaaaaaaaaaaagccgggcatggtagctcatgcctgttatcccagcattttgggaggccaagacgggtggatcatctgaggtcaggagttcaaggccagcctggccaacatggtgaaaccccacctctactaaaaatacaaaaatttgcagagcatggtggtgcacacctgtaatcccagctactcgggaggctgaggcaggagaatcgcttgaacctgggaggcagaggttacagagagccaagatcatgccactgcactccagcctgggtgacaagagtgaaactccgtctcaaaaaaaaaaaaaaaaaaaagaaaggtcctttgcaaaagaaagatggaactcatactaggggataggataggaacagggcactgtgaagggtcctgagtaggagtgaggccaaggcacacaagagctttggaggaccacagacagggactagagggagggcatgaggagaagggctggcttgaaagggatgcctgaatgggcgggcagaggataagggtgcaggtgcaggcagggcaaggcagtctgggaactgggcaggagccagtcacataagcatgagggacatccacagaggtgttgggagcagctggtaatgaaggtccaaggtgcaagagagaagtcaggaaggatactcatgggtctggaatagtttaggggcccagcagtgtttggggatatcagggttgagctgagccggggatgggagggttgccaggcaaaggtaggcccatctcatccctgtcctttaccctacccttcaaaggtcccaacactggtggaggagctgatcgcagtggagatgtggaagcagaaggtgttccctgtgttctgcagggtggaggacttcaagccccagaacaccttccccatctacatggtggtgagctgggcccctggttcatacctcttctcactccttcagagggctctggaccggggaggagagctggtagcccctatcccttcctcaggccctgtccttctctttatctgacaggtgcaccacgaggcctccatcatcaacctcttggagacagtgttcttccacaaggtgagggactatctctgcccatgggccacagttccgggtcagggcctggcaggaagggagattgtgtctgtgtggggaaggcatcagacacagaaagtttccctcctccttttcccaggaggtgtgtgagtcagcagaagacactgtcttggacttggtagactattgccaccgcaaactgaccctgctggtggcccagagtggctgtggtggcccccctgagggggagggatcccaggacagcaaccccatgcaggtgggttgaggttacctagggttgtgaaagcctaggtctgggttccccaaggcctgcgcaggtgagggtggcccagcgtgaacactgtgtgacctcccaggagctgcagaagcaggcagagctgatggaatttgagattgcactgaaggccctctcagtactacgctacatcacagactgtgtggacaggtgagcagtccgactgggcctgggcctactgtggagggctggaagaccgggcctgtagcctgcctctactcacctccttcacaacgtccctgcccctagcctctctctcagcaccttgagccgtatgcttagcacacacaacctgccctgcctcctggtggaactgctggagcatagtccctggagccggcgggaaggaggtagggtcctcccccaccagcctaagccccaggctactgcttcagggtatctttttgatagaggggggcagcttgcacacacgaagacaaaccctgtccccaagcccactgaggataccaggatgcctcagccaaggttggcctagacctgagctctgcagcaggccaggcccatgtgtccactactgaggctcaccctgctctggggtcagcagccctatagcctgggcaagtcctgcagcccaggttctcccattcccaggcagtggtcagtctcccagcccccacagctggctcacttgaagagaattcaacgtctgcacccagtgtgctggttcctctccccaggcaagctgcagcagttcgagggcagccgttggcatactgtggccccctcagagcagcaaaagctgagcaagttggacgggcaagtgtggatcgccctgtacaacctgctgctaagccctgaggctcaggcgcgctactgcctcacaagttttgccaagggacggctactcaaggtcagactccctccgcaccagcccccacagccccagtaccgccctccccatcctaccccgactgcgtccctgctgtttatctttgcccacccacctcaaccccagtgctcttttcagtccttgggcctcaggtgacacaccagctagtgggacatgggcccccacaggcattctcagcccaacccagccccttccttttccttggccccctggccagcacctgcatcacactggcctccactggacacccttgcagcttcgggccttcctcacagacacactgctggaccagctgcccaacctggcccacttgcagagtttcctggcccatctgaccctaactgaaacccagcctcctaagaaggacctggtgttggaacaggtaggcactggaaagttagctgctcaggaccactgtcccactttaccagcaccttcctgccactctccacttctctctcctagatcccagaaatctgggagcggctggagcgagaaaacagaggcaagtggcaggcaattgccaagcaccagctccagcatgtgttcagcccctcagagcaggacctgcggctgcaggcgcgaaggtaaggcctgtggaaatggcagggagggtggaggggatgcaggaggcatggatgtgggtggggtgcccccaccttccagggccagtcagaccttcctgactttcccccaggtgggctgagacctacaggctggatgtgctagaggcagtggctccagagcggccccgctgtgcttactgcagtgcagaggcttctaagcgctgctcacgatgccagaatgagtggtattgctgcaggtgagggtatcctagaaccttggacctctaagccctactcccacatcccccacatgcattgccatcctcaatacccacctgcctgcagggagtgccaagtcaagcactgggaaaagcatggaaagacttgtgtcctggcagcccagggtgacagagccaaatgagggctgcagttgctgagggccgaccacccatgccaagggaatccacccagaatgcacccctgaacctcaagatcacggtccagcctctgccggagccccagtctccgcagtggagagcagagcgggcggtaaagctgctgaccgatctccctcctcctcaccccaagtgaaggctcgagacttcctgccccacccagtgggtaggccaagtgtgttgcttcagcaaaccggaccaggagggccagggccggatgtggggaccctcttcctctagcacagtaaagctggcctccagaaacacgggtatctccgcgtggtgctttgcggtcgccgtcgttgtggccgtccggggtggggtgtgaggaggggacgaaggagggaaggaagggcaaggcggggggggctctgcgagagcgcgcccagccccgccttcgggccccacagtccctgcacccaggtttccattgcgcggctctcctcagctccttcccgccgcccagtctggatcctgggggaggcgctgaagtcggggcccgccctgtggccccgcccggcccgcgcttgctagcgcccaaagccagcgaagcacgggcccaaccgggccatgtcgggggagcctgagctcattgagctgcgggagctggcacccgctgggcgcgctgggaagggccgcacccggctggagcgtgccaacgcgctgcgcatcgcgcggggcaccgcgtgcaaccccacacggcagctggtccctggccgtggccaccgcttccagcccgcggggcccgccacgcacacgtggtgcgacctctgtggcgacttcatctggggcgtcgtgcgcaaaggcctgcagtgcgcgcgtgagtagtggccccgcgcgcctacgagagcggaaggggcagccaaggggcagcgcagtcgccgcgggtcaagtcgcggcagagggggtcggcggggacagctcccgaggactaggtccgttactttcgccccatcgctgaagagtgcgcgaaaatggtttatcccttgtcgcactccactcgtatctgggccacagatgagcagaggtggctgcttatatgtaaaaatacgctgattttaagtttcttatctttaaaatgccttggcccttcttgagaaagggtttgtgcctactgtcctcggagtccatcttcccaggcttgcctcttctcaaacactcatgaccccctccagaacctttagggtgaagggaaattaccacctatgggagggagcctggaaaaatttagaacctttggtgggccccctgcaagcaggagttttgttgagtctttatttagcaaacacccttttctgacccagtgaatcagatgctaaaatatgcacgcagccacacacccagcagtccttctgcacccctgggaatcgccagcaagcaaaggttgctctcccctgggtagacaccagctggaatcaccaggggtgcttttacagtcctccccgctagcctggatcccaccgcagacctgttgaatcaactgctgggagtggaccctaggcatcagtaaattttaaaaactccccaaattattgtaacatggagtctgggttgagcatcactgctctggcctatttaggaacttgtggatggatagtgtcccaggtctgtgtgtgcatggagaccctctcatccggtacaagaggacatcacaaattcagctggggggagcacaaagttgtgacagaatgcaaagaatgaacaaggggccgagcgcggtggctcatgcctgtaatcccagcacttcggaaggcggaggcgggtggatcacctgaggtcaggagttcaagaccagcctggccaacatggtgaaacctcatgtctactaaaaaataaaaaaaaatgagccaggcgtagtggcgggtgcctgtaatcccagctactcgggaggctgaggtgggagaattgcttgaacacaggaggcggaggttgcagtgagccgagatcgtgccactgccctccagccttggcgacagagtgagactctgtctcaaaaaaaaaaaaaaaaaaaaaaagaccaaggctgggacattgcagcgttctcaaagagaaataaagtagccatggagataagaagcaggatgatttgggcatgtttatcagaggtagagacaagggagaaatcaaagataagtttgggcttttgtctccagtaactgggagcctagtggccatttttgctgcaaagaggaagctgggcaagtgtagcagtgaggctgaagaaaagggaattaaattttggccatgttcacttgaaacgtcttttagacatcctagtgaaggtactggcacggaggatctagtctgagggtttaggtcagtgtttcagccgtggatctggggcagatgaatgtagacagaccaggccagtgatcaggactgagcccagacttcatcgtgagatatggaagttgagtcagaatctgcaaaggagctgagcaggagctgcagggggtaggaggaaaactgggagagtgtagcccctgggagtcaaagggagcaagcttcaaatgatgctgagggggtgagaatggagaatggaacactggattccatttggtagtacacagatcgctgaggaccctgtcccgggcagtttcctggaggaagaggcaagcctggctggagtgggtagaggggagagtgaaggcgaaggattagagtgtatagagaccagtgtcttggtctgaggggagtagagacaggtgacaaccacagggcagacgtaggttaaaggtgtttagtttttccttcaagtaaatgggcagatgtattccatatacgttcccagtgaagggccgggtgcggtggctcaagcctgtagtcccagcactttggaaggccgaggcgggtggatcacctgagatcaggagtttgagaccagcctggctaacatggtgaaaccccgtctctactaaaaatacaaaaattagctgggcatggtggcgggcgcctgtaatcctaggtactcaggaggctgaggcagaagaatcgcttgaacccaggaggcggaggttgcggtgagccgaaatcgcgccattgcactccagcctgggtgacaaaagcaagacgcagttttttgttgttgtttttttaattgccaatgaggaaaggggaagttctgtgctaggcgatagagatccaactgttgagcaggcctctctgcctgtggccttccggccggtttccagacgcccaggtggccaacattagagtccgcgtagcagtgtgaggtaacccactgagataggtcgggcctgcggagcctggcgagcagcggccctctccctggggcttcccttcaatctccgggacatttccccgacctggagctcctccgcctcaccgccaggcctctctgcagattgcaagttcacctgccactaccgctgccgcgcgctcgtctgcctggactgttgcgggccccgggacctgggctgggaacccgcggtggagcgggacacgaacgtggtgagcgcggggccgagggcgtatgggaagggcgaggatgggcaggccacagtgcaggcattctcgagggctgcctgggtgccgcgcgcaaggagcgttctaattgccgatttcccggcggcacagagaggctaattctgcgcgggggctgggaggggagcctggattgccggctccgcaagtactccacccgctgcaagcggacccgggcccaggctgacccaggctccgcgcacgcgcacttcccgcaccttcccgccctcgcctccggccagaggccactcttgtgcgcttgcccggacgctggcacccgcccccgttccctgtggtaggtggggtctgtgagtggagctccggagcgatgaggtcattcctgggggcgaagcgtgcgtgtccccgccccggcgttcctgccccaatgagacaagagctagatcccggcgatctacgtttcagtcttaacggttgcggcgcggctctggcccgggcgcacgcgcacactgacacgcgtacacgcacgcacgcgaccggggcggtggttggcggctacggacgcgcaggactgggggacgggcgggtacggctatgggcgaggcggaggcgccttctttcgaaatgacctggagcagcacgacgagcagtggctactgcagccaagaggactcggactcggagctcgagcagtacttcaccgcgcgaacctcgctagctcgcaggccgcgccgggaccaggtgggagccagggggtgccggcgggcgggaggggaagcggtcgctggagctccgccctccccggtccgttgccgcgtcctgggtcggtgggcagccccaccctcctggctacgtggctccccgcgggtcctggccggggacctgcccgcggaaccgtgcgtaagaccccgattccaccgcctagatgctgggtgccggggcccccttggtttctgtcacagacaggttgaacacggaaaaagcagctgtatggcttgtggtagacctgagccgggcattatccagctatgactaaagccgaccgagcagtttggactagcacctcgatttccgcgttcgaatgctcctgctccctccttggggagactaggggaggatgtggagagggaagagtcctcgccaggaattgagaagtatgtttaggaaaacttgagaggcagagagagatcctgctcctccatctgcactcctgtatggagccagctgagccctcacctcttccctgttctggcctgtcaccagctgctggaatgtggaagattctgttcccttcctctagggtggatctggagaaagatttgggaatagataggaaagaagtcttgttttggaccataagcattcaggagcactttacccacaggaagggggaaagctagattataaaatgcctaaagaggtggaaaaagagatccaggttactaacccaggactgtaaggtgtctcggaacctcctaggtatccccattatcggagaactgtgtgccagatgccattggtgtgaccaccaggctcagagaaccaggcctaggcaccaggaaaaagaaacagggactgtgaagctcagtatgcctggcagaaatggggcggaaatccttatttaagtaaagaaagtggagttgtgagtgatgcttcagataaaattttacaaaattccttacaaaatgggtggtgctcagcacgccaaaatcttagcccagagcttgggtgcaagggttgagttgagtgtagacccctgggcttgtcttcatgtcagtcagtcctgagccattttccactgtggaaaggtgggaaaaccacaagacactaaccaattgaaaaggagggctagccacggaggtgcacacctgtaatcccagctacttgggagggtgaggcagaaggatcacttgaacctgggaggcagaggttgcagtgagccaagatcgtgccactgcactccagcctgagtgacagagtgagactctgtctcaaaaatagaaaaggaagccaagtacggtggctcacacctctaatgccaatgctttgggaggccaaggcaggtggatcatttgcaatcaggaattcgaggtcagcctggccaacatggtgaaaccctatctctactaaacatacaaaaattagccgggcatggtggtgtgtgactgtagtcccagctacttgggagactgaatcacttcaaccgggaggcaaaggttgcagtgagccaagatcgtgccactgcactccaacctgggtgacagggtgaggctctgtctcaaaaaaaagaaagaaggctgggcttggtgactcatgcctgtaatctcagcattttgggaggccaaggcaggcagatcacttgaggccaagagttcgagacctgccaggccaacatagcaaaaccccgtctgtactgaaaatacaaaaaaattatctggccatggtggtgtgtgcctgtaatcccagctactggggaggctgaggcaggagtatcacttgaacccagaagacagaggttgcagtgagtcgagactgggccactgcattccagcctggatgagagagcaagactctgtctcaaaaaaaaaaaaaaaaaaaaagaaagaataggaggctgagaagtcccaagttatatgttaaaaaaaaagaaaaaaacatcagttttaggccaggtgcagtggctcacacctttaatcccagcactttggaaagccgaggtgggtggatcatgaggtcaggagttcaagaccagcctggccaaaatggtgaaaccccgtctcgactaaaaatacaaaaaattagccagttgtggtggcaggcacctgtaatcccagctacttgggaggctgaagcagagaattgcttgaacccaggaggcagagattgcaatgagccaagatcgcaccactgcactccagcctggaaaacagagcgagactctgtctcaaaaaaaaaaccatcagtttttatggacagtggtagagtggagggtgggtccctatggtgcagaagggaaattccatggtcctgctgtgcatccgactgggatggctgttgaaatcctcttccagcaggcagctttggaaacagaaaaagaaactcttcctcctttagaatcctggaagggctgtgcagtgcctctaatccaagtctgttttctgagtgaagatagggaggttcatcaccagaagggaaggggctggaaatgaggtcactgcatcccagcccagggctcctgggtcatccaggaagggaagaaggagcaagctttctcattgttaggtaggagctcagagccatcacaagaacaagttagcaccatccctgtgccctccctgttctgcaaacaaaatgatcttccttcttgccctggcactagagtctgtctggcatttctcctgcccctagtactcctcccatctgggtacttcttcccgttggtgtactgaacaaacacatccactgctttattcacagcctccagccctcattttccagggcccacaccatttgtttttactaacccgacaaggttgcccactgtccccagtaaggtttgtactggggtttttactccagtgctcttctccatccaggagacctttggatacttggggaagaaaatgagcttaaattcccacccctccccctttacctttttcctgtaaggccctggccttagttcttagccccacatccttgctggctgcagaatagcagcgggttctgggtaaggagcattctgctaaaacgctccaccctgctccctcatctgtcctctccatttgtccccatcagatggtttaagtgcttaaggggactccagggcggagtcagggagaaccctggctctcctgggctaggcacaagatcattctacaggaaaccttgtgggaattcttctgggacaaattattggtcagcgctgagcttagctgtgtctgtgacactcgcattctaactagggcctatctgacgtcaacaggaagtaaggctgatgcagtggggccaagggagtctgggagaagaaagtcggttcagagccctggctgccctgtcccacactccacccttccggcaagaatccagtccctagatgaggtggggagtgagtggtcgagttaaaaatctctgggtcgggtacgatggttcacgcctgtaatcccagcactttgggaggtgaaggcaggcggatcacttgaggtcaggagttcaagaccaacctggccaatgtggtgaaatcccatctctactaaaaatacaaaaattagccgggtgttgttgtggcacgcgcctgtagtcccagctactcgggagtctgaggcaggagaatcgcttgaacccaggaggcagaacttgcagtgagccaagatccagccactgcactacagcctgggcgacagagtgaggcttcgtctcaaaaaaaaaaaaaatctttgggccaaatctccagacagcacaggcaggtgcagaaacccaccaggaagctgcctgtgtacctctggcagattggagcctggcctaaagctgccttttatgcagcttgggtcaaggttaaacatcatgtcacagtgatttttctcactatgtgtgagacatggagaactggctccaagtactactctgtccactggtggctggactactgatgtgcaccactctccactcctctcaccctgcagtgggtcatggccccgtgccggggcagaggagaaaaatgggctgccttctccaggacaaaccctcactccaactcaactagggtgctgtgatcagaatgtgcaattgaggtgtgattttactgattttttttttttttgagaccgagtttcgctcttgttgcccaggctggagtgcgatggcacgatctcagttcactgcaacctccacctcccgagtttgagcaattctcctgcctcagcctcctaagtagctgggattacaggcatgtgccaccacgcctggctaattttgtatttttagtagagacggggtttctccatgttggtcaggctggtctcaaactcctgacctcaggtgatccacccgcctcggcctcccaaagtgctagaattacaggcgtgagccaacgtgcccagcctgtttttgttttttgtgttttgaagcagggtctcactcagttccccaggctggagtgcagtgacacgataatagcttactgtagctgcaatctcccgggctcaaacgatcctcccacctcagcctcctgaacagttgggactacaggcacaccaccacacctggctaatttttttttttctttttttagtagagatgaggtcttgctatgttgcccaagctggtctcaaactcctgaggatcaagtgatcctcctaccttagcctcccaaaatgctgggattgcagatgtgagccaccacacccagcctgattttactttaaatgagagtccctcttcagagtccctcagctgttcctggcccctggccatgtgccttcagttgcccctgcttctgtggtatccttaaggctacattcagtgctgaggccctaggcaggcagcagagagaagccaaatgattctgtctttcccttatccacccagagcatgcaaaaccaggagcagtggtgggttcagggtgggcaccagctatgtatatgtacatcagggacagggggccaaaggcagtcagtttccaaagactgccccagaggccatttttcagagaagccctgggttcctcaagggccctgtgtccatgctggcccatcttgcaggacgagcctgtggagtgggagacacctgacctttctcaagctgagattgagcagaagatcaaggagtacaatgcccagatcaacagcaacctcttcatgagcttggtgagttgactgctcaggaagggggcgtggggaggagcaggtacccagctatgtgcctgatactcagagggtcacaactgaggttatcttgggtgggcgcaagcagtaatttgtgcatacccagcctagccccaagtagactgacatctcacctggaacctattatcaaggtttggtttctctatttctttagaacaaggacggttcttacacaggcttcatcaaggttcagctgaagctggtgcgccctgtctctgtgccctccagcaagaagccaccctccttgcaggatgcccggcggggcccaggacggggcacaagtgtcaggcgccgcacttccttttacctgcccaaggatgctgtcaagcacctgcatgtgctgtcacgcacaagggcacgtgaagtcattgaggccctgctgcgaaagttcttggtggtggatgacccccgcaagtttgcactctttgagcgcgctgagcgtcacggccaaggtgggcttcccaccccaccctgccctatgtgagggtatatacgcatgcacctgagcatgcaggggctgagcagctggccctgtctctgatcattacttccccttcacagtgtacttgcggaagctgttggatgatgagcagcccctgcggctgcggctcctggcagggcccagtgacaaggccctgagctttgtcctgaaggaaaatgactctggggaggtgaacgtgagtacatagttcttagtttcttggttgtcactagacaggactgatgggctgtagctacagtaaggcttggaggaggaattgtgctggaagacaagccctgcaaaacagttccaggagtgtataggcattgtaactaaagcaaaggcttccagaccactcatgccaaagcctagggttgtcccaagaagccaggaagaattgccttggtgctttgatctttcctggtgtggaaaatcttctggagatgcaggagtccatctaatgacatgaggaggcccccttcagactttttacctggaagctttctggctccaaggtattaggcctgtggagtgaaattagactcagaatatgcctgacctgtccacaggtaattggggaacatctgacttggttgtctcagtaaggtgaccgttttgtagggcccatcttccatacaaactgctgtcagggatcctaccagagatcattcagccaagagcctgacatcagaaagcccagtcctagcttgtgtgaacatgaggtgctagtcttctctggggagggtctgctggcttggccatcccttctgcagcctgtacactccccttttgccccttgcagtgggacgccttcagcatgcctgaactacataacttcctacgtatcctgcagcgggaggaggaggagcacctccgccagatcctgcagaagtactcctattgccgccagaagatccaagaggccctgcacgcctgcccccttgggtgacctcttgtacccccaggtggaaggcagacagcaggcagcgccaagtgcgtgccgtgtgagtgtgacagggccagtggggcctgtggaatgagtgtgcatggaggccctcctgtgctgggggaatgagcccagagaacagcgaagtagcttgctccctgtgtccacctgtgggtgtagccaggtatggctctgcacccctctgccctcattactgggccttagtgggccagggctgccctgagaagctgctccaggcctgcagcaggagtggtgcagacagaagtctcctcaatttttgtctcagaagtgaaaatcttggagaccctgcaaacagaacagggtcatgtttgcaggggtgacggccctcatctatgaggaaaggttttggatcttgaatgtggtctcaggatatccttatcagagctaagggtgggtgctcagaataaggcaggcattgaggaagagtcttggtttctctctacagtgccaactcctcacacaccctgaggtcagggagtgctggctcacagtacagcatgtgccttaatgcttcatatgaggaggatgtccctgggccagggtctgtgtgaatgtgggcactggcccaggttcataccttatttgctaatcaaagccagggtctctccctcaggtgttttttatgaagtgcgtgaatgtatgtaatgtgtggtggcctcagctgaatgcctcctgtggggaaaggggttggggtgacagtcatcatcagggcctggggcctgagagaattggctcaataaagatttcaagatcctcctgctgttggaatcttttatacatataaagtttttgtagagacatgagtctctctgtgttgcccaggatcctcccaacttggcctcccaaagtgttgggattacaggtgtgagccaccctgcccagcctggactctttattattataggcgcagagctgcagttgcccctcatggtgccagaagttgccaagggtgatggacaggctcccaggtgtcttgcaaagtcaccatggaccaatttgtgaagatgtagtatgcatacatacttggtcatcactcagctccctggggctcaggttgtggtggagacaaaaatggactgcagttagaacttagggaaactggctgggcatagtggctcacacctgtaatcccaacactttggttgggctaggtgggcagatcacttgaggccaggagttcgaggccagcctggccagcatggcgaaaccccatctctaccaaaaatacaaaaaaaatttagctgggcgtggtggtgggcgcttgtagtcccagctactcagaaggctgaggcaggagaatcgcttgaacccggcaggcagaggttgcagtgagtggagatcacaccactgcactccgatagagcaagactccaactcaaaaaaaaaaaaacggccgggcgcagtggctcaggcctgtaatcccagcactttgggaggccaaggcgggtggatcacctgaggtccggagttcaagactgcctgaccaacatggtgaaaccccgtctctactagaaatacaaaaaaattagccggcatggtggcagatgcctgtaatcccaagtactcgggaggctgaggcaggagaatcgcttgaaccctggaggcagaggctgcagtgagccgagatcgtgccactgcacattatcctgggcgacaagagtgaaactccatctcaaaaaaaaaaaaaaacaaaaccatcccttcaacacacacacaccacgctctgggagaaggtgtggcataactccttcaccaaatacagagctgccaccgtggaccagacactgctcgtgataccgagggtatagctgttaacaattcttgctttcattaagcatggactctgctgggtttgaaaacactgaattcgaagttcttcagaactgaatgtaactatgtgaatctggccagttccttaattttctttcaacttggttagttcacataagcgtggcaatcgcaaaaatacagctgtgaaaatagaagccagatgggcacccggcggtctggccttaggccctgaagtgcaggtttgaggattggtgcttgcgaagtcctgctaggcctgaactcaggtgttgggggacgtcagagccgccaaatacacccaaaagaccgggaggactcacggccaccactttcctcggtgggagctgtcccagctggtcagatcgcgcttgctgggacctgggatctcgcaacgcatgctgggatgcccagcatctaagggcgcccattggtcccgcccccacgacttgagcaacagccaatcagaggtggcagcgtgcggaagcggaagtgaggtttccgtggagacagccgagcctgcggaaggcggcggcggcggcacctgcgatcagcggctggggcaggttatggtagtgcggactgcggtgtgagcagagcggccacggggcccgccatgcgccggcggccctgacatgggcgccagcgggtccaaagctcggggcctgtggcccttcgcctcggcggccggaggcggcggctcagaggcagcaggagctgagcaagctttggtgcggcctcggggccgagctgtgccccccttcgtattcacgcgccgcgggtaagggcatgggttccaccctggcggggggaacaggcgggcggccaggcgtcccgcgccacgggggaacttccaccgctgtaccccactacagccaagccaggacgacccccatattttgagcctcattggagctgggggtggagaaagccgggcagtggtctcctggcggcctggccactctgaaagtctccctagggaagagtgggcctgaggcttgtcactggtcggaccttccgcacggtaaagctaagctagggcctccataagacctccataagatctcttcctttcatcccttccggctcagcctgcatactgaagggtcctagcctccctttcccccccagttattccaaggggataataaccctctgtttaggctgcttttcctgacagtagtggggctgaacctttgagcgtagtggctgggaaagcagggataggcctcagtattgggggtgaggctgaggaaaaaagaccctcacccagttatgttctccagatccagagcgctgacctacccacccaacccccagcccagtctcccagaggcccgcacaagagtaccagattggcttggctctagtgggctcctggagatgggcgctccctgtgctagagatttggctgtagacaccaggaagacccaacagtggcaattcaccagccacctggggtgtggggtcaggggagacgcagccttcattcctttgtgcttcttcctagcttaggcttctgctatttcagtctttgacactgggccagcagcatcttctggagtgagaccaacatgcccaggccaccaccctgcccactctagaagtcctgggtgaaggcaaagtcctgatattagaatggctgcccttgctgaacaaatcaaggatgagaactggccttggtggctgcctggatggtgtgctctggtgtgggctctcttcttgggggtctgacatagtagcactgcccacccatcacctcacttcccactttcttctagtagaccccaaaccccaggcaaaggattctccaggcaggccaggcaccgtggctcacgcctgtaatcctaacactttgggagatgaagacgagtggattgcctgagttcaggagttcgagaccagccagagcaacatggcaaaaccccgtctctactaaaatacaaaaaattagcagggtgtggtggtgcatgtctgtagtcccagctacttgggaggctgaggcaggagaattgcttgaacccaggaggcagaggttgcagcaagctgagatcgcgccactgcacctccagcctgggcaacagagtgagattctgtctcgaaaaattttttttaaaaaaaggattctccaggcatattatcctcttttcttcccacttggggttgggaagaccacagacttccccgtgacctgtgacatttgccatgcccaggtgtggggctccagcccagcctgtttccttctccctctacacagctctatgttctatgatgaggatggggatctggctcacgagttctatgaggagacaatcgtcaccaagaacgggcagaagcgggccaagctgaggcgagtgcataagaatctgattcctcaggtgaggggctgggcagcggtcacagagcctacactaagcgtgtggaggtggacccagatgggatctgttgtcatggtgggggcttttgcggggggatctgggaggaacaaggaagcttcctgaagtagaggccctgagctgacccttactagcctctgtttccatggcagggcatcgtgaagctggatcacccccgcatccacgtggatttccctgtgatcctctatgaggtgtgaccctgggaggtggcagacagaagcaccccctgccccggcaagaaactcccaggctcaatcaaggtgtggcttccattgaggagcccaggctggggccacaaccctgaataaactctgttggcccataaccttcagctgtgagcgggtcggtcccacagtattggttgggtgttggtttgtgtgtggacaagaggtggttggtgggtggtgaaggctaatggcagagttagcaccccactctcccaagccacccctgcaagcagcacagcagggcatataccagtcaggaatgcccgttacctggttccttgcctggtctgctttcttccaagtttgcctggggcctagccctgctagaggctacagcactttacaagcaaggtatgctttcttccagcccctaggctgtgggcactgtatacaagtaggaacttcctttccttcacttcccttttaacccctagtcagagcatttcagccgtttgctacctcgattcctcctgtgttggacagaggctgggggcagtgccagcctgattcttccgacctacctgccatttgttcccgccttcagatggatggacagtttgctggctattgataggagtggggactgggtgggggcttctccctctacccagggctgggctgatccccctactgcaactaactgttgccccccaaccccgaacccccagttgaggagttgagagagtgcaggctggggtcaggacaggctgcggatgcttgtgcctatggggagttactccaacccacctattctgtctaatctccatggctttgcaccaaatcctccacccctccaattgggaggggactgttcaccaccttgtggtaagggacaacaccctaaggctggtgccagtagttatgagtagcctaccaccccctcccttacagtaacccccaccccttcaggatcagtcaagggaaagcactagaacccctgggtagggaaagaaaggagggaaaaaccataaaaggaatacttataatgtgaaggtttgtaaatagtccatgatgatgtcgtggcagagtctgatttctatatagaggtgactttttttttaagtactgtgcaagctctgtgcttctataatgtgggaaatggcttggggaggatggcccctagcttaggaagactgttgtgttatttgttcaatttcaataaaatgatttgtagatcctgcacatgagagtggcatcctgtgggggctctgacacccagtgtctagactaccacctgggttcaataggtaggcctggcacaggactctggcaggccccctatgaccagcaaagcccaagagtaagtctgagcccagcctgtggccatcccaactgtggccagcaggtggctgtgtgttcacacagacctcactgcaggccccctgcagggtgggagggcactcatttatctgttgtgatccatgtggtggtgacccttggaatcagaaggccctgggatacttcactaaggattggccccacctgcctgatctaaggtgagagagtgtgacccaagatagttctggaatatctgtcttagctgtagcatcgccagctgatcctaagtggggtcatggcctgacccccatggacctcaaaggcccagctttaatggacagcagccagataggtgtccccacgcctttggcctactgccaggctcagcaacccaaactcatgtgcctcctctgaggcctgcctgcggacaccatgggagaatgagctcaggctgctgtttcagcaagcaaggctcggcccactagtattgcccctgctgtctgttgcccccatcttctcatcacctgcagcctgcccactgtggtcattctgcctgcacttctcaggggctgctataaggcagattctctactaggcttaggctttgactatcagtccaactcccagttaaagaggggagatttcagggacaggcttctgagtgtagggagctggtctgccagtctttcggaggtttgaacttgtcaaggctagggcaggatcaccatatccagcctggacttgcagttctgtggggtgcctccccatacccccataagatgccaaacatgaggccctgtcatcctccatggtccccctctactggctgttcaaggcccagggctctcccatgccagatagcatcctgtctcctaccaccactgtcccagcctgagggaactccctgtgctgggcctacccagctgaccccatcgctggaaacaatgggggtcaggcaacacttccccactctctcccgccgggctgtgctcacttccttcctgctggctgcctgaggaagtgtccctgccctgggacagtctggcctagcctttgtttccccgggggtccccacccatggagctttcaaggcttctggcccctgtgaagccagcacagtggtacagggacactgcaccttcccctaccatgtcttggactccttggtcctcagggccagactcctgggtattcacctacccctcacacagccttctgttgggggagaggctcctgggcattgggccattgggttgttgaggggttggctctgggtgatttgagggtaggtagatttgcacccctggagaggtctgctggaaccttgctgcagtcctccctagggccagccacaggaacacccctcccagaggagtatacccctttcctcatccatgttgtaaggagccccctactctgtatagtggactctgaaatccatccaggaatgaactccagcaggaaagcactctgcagaaccctcccagtccatcccctcctccccaacccacacagtcacactcactaacacattgtcctgtcacacaggatgcggaagctctcagtggaaaaaaacggactcagctactggaagtccccccgaccctccccccaaggctagttcccttcttgggcacctgctctgggggaccatcagctgaacgacccccaagtattttgactcccaaaagcaccaccacctgaccccatcctctcacaccctactggatttgaggatgggccccaatcctagggaaggagtgaagaggttccctagtgttggaagctgtgggtgtgggggagattggcacctgatcctgagcccatagccttcctgtcacctggcgcagctggcggggccagatcctactcgggaagggtggggagggcagccagccagcagggcattctggagggaaacagggtcaaggcgatctcctcccccacgcctgttcctggccctttcctctcagggggcagcaggaagtgaggagaaagggctgggatgggaggcgggagcggatgggagggaatggggtttatcaagtcctcggcgagctgcccaacgggcagcagctggcgcaagtagcctagctggagaggctcaccccaggaaggagggaggccaccgacctactgggccgacggactcccacacaggtgagcccagagcagacggctggtctgcacccccacagatgcgctcgcagttgcactccctccctctcctggcgcccgggagggttaggggctggtggtgcagacgcgggcccttttgggagttgagtctcgcacaagggagcggacctaggaagagccgaggtggtttcgcacggggctcgccagggtctaagcctgccccccaccgggagaggcctgtggagcgtagggggcgctggatacgggatggaggccctgggagacccctcttgctggctttctcggaggtccagccagaaactgctgcaaggaatggaggcctcctcggggttgagagggagccgggctcccaaaggacctcagagactgggcagaaaaggacgggatctcagggatgactgtcccgccctgatgcgagtcagggagaggggcggccaacctcctagacccctctgagcttccctgaccccaaccctgcggccacgccgcgacccagagccgggctgccaggataacgactgcctcggcccttcctgggccggctaagaagcggtgcttggccccttccctcagtctggcagggggcggggcctccctttagacggcggaccagagaagggggcccctgattcgtgggaggcggggcactactctccaggagaccagaggtcgcctcaggtcaaagtccctttttccacacaaaggggacccacggctggcgtctacgttagggggtgcagagccagatctggtgctgccccctgccaacctcggagtaccacagcacctcctgatggccgaacggggcaacgcctcctcctattcccccccccccccttcccgtccccctgccttgtccctcacactgtctctttaaagggctggcggcgccgcggagctgggaggactgaaccaccggcctcgggctgcaggggaaacatttcaggctgactggcgctcgtggctgagactcccatagaaagcccggctcagaggggcattagggtcctaaatgggcggccacgtccctctgcagaggacctggggctcttcgagcccgaaacgaggcaccggcaccgagaaaggtggaccacaccttcccgccccgtccgcaagtccaatcccgggcccacctccgcactggagtcttaaagggccagcgtgcctgggggcggagccagcagaggcgctgagccgggccgcgcctgggcgaacggccggagcgggctgggctgggcccgggatggcggtggccctggcgccggtcccggtggcgccccgcgcgaggtgagggcgggcggtgcaaacctggcggctctctccccttgggctggggtctgaatccccgggggtgctcgcggagaggcgtcccagaaaccccacccccacccgaccgggcgcaggccccacgtgtggggcgggggcggggtcccgcacaaagacccggcggagcgcgctctagccctgagcggccgggcgggggaggcgagcgcgcgcattcccggtggcggtggagggaagggccgggcggccggcgccgccgtgggaggtccgctgcccctttgtccctacggggcctcctccaagccgggagagtgtcagcgctcgagagaaagtccggagagcctcactcttctgccgggcgagtgttacacggatagaagcctcccggcagcgttccttccagtttcgtagcctcttgacgagctgttccctgctttacccaaatgctgtcgtttctctggatcaagggttcttcacggtgtacagggtgggcatcagctgttcagggttctctgaaaccatgtactggatggtatgcaggcatatatgtgactctggtgagcccaaattatctagttcttagaagggtcacagacctaatagagatttgtgccgagccacaggctacctgctccagaaaagagccctgtgcttctggcagtgagttcccagggtgccttgtctgccctgcagtggcctgtggtctctcaaacctattacagccatgagcacagtgcccccacacagcatgggctttgggagcatagatgggcttgaggtgggcacttccagtattccctagactgacttgttctccccaacccttcttccagttcctgagctggtgccaggcaggtgacacctcctgcagcccccagcatgcgggcaggcccaggccccaccgttacattggccctggtgctggcggtggcatgggccatggagctcaagcccacagcaccacccatcttcactggccggccctttgtggtagcgtgggacgtgcccacacaggactgtggcccacgcctcaaggtgccactggacctgaatgcctttgatgtgcaggcctcacctaatgagggttttgtgaaccagaatattaccatcttctaccgcgaccgtctaggcctgtatccacgcttcgattctgccggaaggtctgtgcatggtggtgtgccacagaatgtcagcctttgggcacaccggaagatgctgcagaaacgtgtggagcactacattcggacacaggagtctgcggggctggcggtcatcgactgggaggactggcgacctgtgtgggtgcgcaactggcaggacaaagatgtgtatcgccggttatcacgccagctagtggccagtcgtcaccctgactggcctccagaccgcatagtcaaacaggcacaatatgagtttgagttcgcagcacagcagttcatgctggagacactgcgttatgtcaaggcagtgcggccccggcacctctggggcttctacctctttcctgactgctacaatcatgattatgtgcagaactgggagagctacacaggccgctgccctgatgttgaggtggcccgc

SEQ ID NO: 1472 - DNA, 1680 bp, Homo sapiens
ccggggcggtggttggcggctacggacgcgcaggactgggggacgggcgggtacggctatgggcgaggcggaggcgccttctttcgaaatgacctggagcagcacgacgagcagtggctactgcagccaagaggactcggactcggagctcgagcagtacttcaccgcgcgaacctcgctagctcgcaggccgcgccgggaccaggacgagcctgtggagtgggagacacctgacctttctcaagctgagattgagcagaagatcaaggagtacaatgcccagatcaacagcaacctcttcatgagcttgaacaaggacggttcttacacaggcttcatcaaggttcagctgaagctggtgcgccctgtctctgtgccctccagcaagaagccaccctccttgcaggatgcccggcggggcccaggacggggcacaagtgtcaggcgccgcacttccttttacctgcccaaggatgctgtcaagcacctgcatgtgctgtcacgcacaagggcacgtgaagtcattgaggccctgctgcgaaagttcttggtggtggatgacccccgcaagtttgcactctttgagcgcgctgagcgtcacggccaagtgtacttgcggaagctgttggatgatgagcagcccctgcggctgcggctcctggcagggcccagtgacaaggccctgagctttgtcctgaaggaaaatgactctggggaggtgaactgggacgccttcagcatgcctgaactacataacttcctacgtatcctgcagcgggaggaggaggagcacctccgccagatcctgcagaagtactcctattgccgccagaagatccaagaggccctgcacgcctgcccccttgggtgacctcttgtacccccaggtggaaggcagacagcaggcagcgccaagtgcgtgccgtgtgagtgtgacagggccagtggggcctgtggaatgagtgtgcatggaggccctcctgtgctgggggaatgagcccagagaacagcgaagtagcttgctccctgtgtccacctatgggtgtagccaggtatggctctgcacccctctgccctcattactgggccttagtgggccagggctgccctgagaagctgctccaggcctgcagcaggagtggtgcagacagaagtctcctcaatttttgtctcagaagtgaaaatcttggagaccctgcaaacagaacagggtcatgtttgcaggggtgacggccctcatctatgaggaaaggttttggatcttgaatgtggtctcaggatatccttatcagagctaagggtgggtgctcagaataaggcaggcattgaggaagagtcttggtttctctctacagtgccaactcctcacacaccctgaggtcagggagtgctggctcacagtacagcatgtgccttaatgcttcatatgaggaggatgtccctgggccagggtctgtgtgaatgtgggcactggcccaggttcataccttatttgctaatcaaagccagggtctctccctcaggtgttttttatgaagtgcgtgaatgtatgtaatgtgtggtggcctcagctgaatgcctcctgtggggaaaggggttggggtgacagtcatcatcaggcctggggctgagagaattggctcaataaagatttcaagatccaaaaaaaaaaaaaaaaaa

SEQ ID NO: 1473 - DNA, 813 bp, Homo sapiens
atgggcgaggcggaggcgccttctttcgaaatgacctggagcagcacgacgagcagtggctactgcagccaagaggactcggactcggagctcgagcagtacttcaccgcgcgaacctcgctagctcgcaggccgcgccgggaccaggacgagcctgtggagtgggagacacctgacctttctcaagctgagattgagcagaagatcaaggagtacaatgcccagatcaacagcaacctcttcatgagcttgaacaaggacggttcttacacaggcttcatcaaggttcagctgaagctggtgcgccctgtctctgtgccctccagcaagaagccaccctccttgcaggatgcccggcggggcccaggacggggcacaagtgtcaggcgccgcacttccttttacctgcccaaggatgctgtcaagcacctgcatgtgctgtcacgcacaagggcacgtgaagtcattgaggccctgctgcgaaagttcttggtggtggatgacccccgcaagtttgcactctttgagcgcgctgagcgtcacggccaagtgtacttgcggaagctgttggatgatgagcagcccctgcggctgcggctcctggcagggcccagtgacaaggccctgagctttgtcctgaaggaaaatgactctggggaggtgaactgggacgccttcagcatgcctgaactacataacttcctacgtatcctgcagcgggaggaggaggagcacctccgccagatcctgcagaagtactcctattgccgccagaagatccaagaggccctgcacgcctgcccccttgggtga

SEQ ID NO: 1474 - DNA, 92726 bp, Mus musculus
  misc_feature (122)..(148): n = a, g, c, or t.
  misc_feature (3122)..(3263): n = a, g, c, or t.
  misc_feature (7485)..(8927): n = a, g, c, or t.
  misc_feature (24884)..(25439): n = a, g, c, or t.
  misc_feature (36036)..(36055): n = a, g, c, or t.
  misc_feature (46607)..(46729): n = a, g, c, or t.
  misc_feature (77651)..(77670): n = a, g, c, or t.
  misc_feature (81264)..(81462): n = a, g, c, or t.
  misc_feature (89156)..(89175): n = a, g, c, or t.
  misc_feature (90342)..(90361): n = a, g, c, or t.
  misc_feature (91379)..(91398): n = a, g, c, or t.
  misc_feature (92723)..(92726): n = a, g, c, or t.
cttctgctgccgagccactcaaggggaagcgagcaggctgccagctcccagtcgccagcatctctcggccacttggaagccttctccggccagtgaccagcttgcttggtcgcagccacctnnnnnnnnnnnnnnnnnnnnnnnnnnnctccaggcccggagccccagccggggtctccggccaggctgggccatggtggtccccggagctcgcccccagcccccgccctccgaagtttgcctccctcctcttccggggtgggggaagtgctcctcggggcggtcggtggctggggctctagctcggcgtctggcgcccgccgggcttgggcaggttgctggaggcataatgagtgggatcctggcaccgcccggaaatccagcttttcctaacgcggggcgaccctggaaggacctgcccagcactaagctgccggccagggagaaccggcccgcgtgcaagccagagctaaaatatctgggggaattgtctgcaagctacttccttcccaaaggcagaaactgcccggcagatcacgagacaaagagaatagaaacgctctgaccaggcacgcatgtacagaaatgcattttagtaaccagctttcgcgcacaataacgcaagggtgtgagcggagtggctgtgacatgttgaatgctgtgtgccggcactgtattcaggggaattctgctcctggcgctagtaataccggaaaggtctcacttccaccgttaattcttgaagaagctgcaggctctattgctgtactggtgtgaatttatgctttatttaggggtttcatgattttaggacttaattttcccccttttcttttcctgtctttttcctctttgtcagacagtgtgaaataggaaaggatgaagcagttccgggttttaagtgtagcatgagattgtcatttcagtgagatcgagtttcaagttttaggtggtagggttactcacaaagctggttgacctaggctccttgtgcaagcctctcttaatatttcattagcttgtgttccatgttgggcatttgaaagatagtaaattatgagctaagaaagcttgtagtaggcagatgggtttatttctgcctcagagcagattgattgctaaagtagatatcattaggacttcagggccttctgcacaggtgagccgcccatgcatcgtttgtcactgagcagggaaccagcaccccaagagcccccccccttttttttcattttttttttgacagttgcactcaagcagaccattttctgaagcacacaagttgcttaaactttggaaaacatgtgctttttgcttattacaaagaaaatgatcctggtttttcttgtgcctcttgtggttcaaaggcaggtttaaatgggggaagctccttgcctggcaggagttctgtgccacgccactgctggctgccttcctctaagtgcctgttgcaggccacgccacttttccatagcagtctgtcagcttttacgatttgaagaaagttggatgcagctgataactggctctcagactgttgtgggagtttgcttttaactttcatcttgcaccaagacctgttcctagttgcataacagaactctgccatgtgcacattgttatctgtcattttatttgcatttttatgatagcattctgctttttcacatctgggatgcactgcagtcatgtaaaaagaaggatttcactgcccactgactccatttattgttttctttagctgtgtgtgtgtgtttggtacatttctaatgtatgaagttagtttgggaaaactgagcaattgaacacatagaaatatgcatttttggctgctgatggtgggtggtgtgcatgcatcttttggaactgttaattacacctaacctgatcagtgcaccccctgcccttttgttcttttattaagtatatattaattgtatacaacagtgaggtttttggggggacatttttctacatgcatgtaccatagtttgttcatattcattagccttttcttgtctctttccctctcaggctaatctctcaaaaggctttgaatcttaagttcaagtttactcaacctccacagacctagtacccttaaaaacagtggcttttcctttcaactgtttctgagcccaccatggaacttgaagtttgttgtgttgatggacatttcttctctgccactctgtctcctaagtagtgcagcgaaatgttgtaaaaggcatttactttgagaaaattatccacatacttgttacagtaggaggaattctggtccagcttttattgtgtttacattttttttgacttgcaaaatgtgttttattggataaagagatagcgaatgagtcacctggggaaatagtcccatgggcaagtcgtctgtacaagccaagctaaggtttgcatgtgcgcttttgactttgaatctctcatgaataaggtgtacacacgcagatggattgagctcctatcagtctattaggctcattacacagggcaagcaaagcacaaagccctttccatgacgtagggctttgctagctaaggcaggagatgaagcgtcctggggaagctaggaaaaccagaaagtcacctgtcagtccaaggggctattagttgtatgtgtgagaatgtatcagtttggaggcagtttctcatgcagtccaccctggccttgaactcttaatgtagcagaacttgactttgtactctggagtggttcacctctatctcccaagccctgggattacaaacttgtgccaccaaactcaactgtcaggtttttgggtttttttttttgtttttttttttttttaagacagtgtaaattgcatctttatttatttatttatttatttaaaaaagcatcggttgtgattaacttttaagcactcatattttattgcaatttttaaagtctcctttgactcctctctaatgaaattttttttgtgtgggggggtcatggttttgccaatactcttattgaaatcacttgcctaaagtactggcaattaaggccgtttcttgtacactaagccaaatgaactgaaagatagagggtgtaaaaacttatagcttgtctgtctggctcatgctatcctccccccccnnnnnnnnnnnnnnnnnnnnnnnnnnnnnnnnnnnnnnnnnnnnnnnnnnnnnnnnnnnnnnnnnnnnnnnnnnnnnnnnnnnnnnnnnnnnnnnnnnnnnnnnnnnnnnnnnnnnnnnnnnnnnnnnnnnnnnnnnnnnnnccattttctggagaaacgtgcaccgagtacaagcttactaaagaaaaaaaaatcgtaaaaacagcactttgttctgccactattgtataccttaaagtaaatcaaatatatacccataagcacctgtagtcaaaacagttctcaggttaatgatcacctgggggagaattgaaatcataggcgcctggccaaagggtcaggaggctctgccagtgggtgttgtgaggagttacaggcggggtgtctggccagcagttcagcctttgcccctttccttcttcctggaatgcctctgtagtcctgacaaactgggcttatcccaggaggacccagctgccttcattctctgggggcattgcgtgactgtgttcagtttttcctctttgaggaagacgccatgaaactcaactagatagcagtgtcgggactcccaccttgtgctctgccaccaagtcacaattctgtccccctcccacatacgccccctgacctcccctgggccaccttccaccttgggtctggagagagaattacttgggctaagtccacaggcaggctctatctgactctatttacagcaggagttttattttaggtagcttcaggcttctttttagaactgcttgcagcactgaaaggcagcgcaagagaaaattcctggcacctgtctgtttcggttttaaatctgcattgtgcaaacagcagtgacattcaatgccgatattgctagcagtcctattgttaccaagagcggaacaagagtgctggaactgcagttgactgtcacttcaggcacgccttttagctttgcttgttttctcatctgcaaaatggggccgagaaggacactcgagcggttgtaagggttcacgtcaaattccccagaattgtgcttggcacaccccaagcacagagtcggggtaattgagaagcgtggtgctacatacttttgtgagtgtaattgcctttaaccttcataatgacctgggaaggtataggtctgtttccatcggcctcatatgatgacggagggaggagctatagttacatatctagtcatggaccagggcagccgctgttagctgtaactcataattcacccttccggccatgaatttaaagtactactgttgcttcctcaccagaagaagcactttcggggcctctccctcagttcacacctcccatggctccccttcagtccctctccactgtagtcatgcagggaaccaacacactgccctcttctgggtagtggggatctctttcttagtccataaataacatggctcttagtcctagctctctccatcgtgaccctcacagtctagaagggctgctgggggtgggctggggtaggtctctccactcctcttcttggtgtgctcagggacacccagtgttgtaactgctttgcagtccgtctcttaactgtgtcacctgggtgtgtactcactagccccttagggcttgcaggcaggaattacagcctccacaccctacttacccacactggctacccagcccgaagtgtgtgtggcagcaggcagcacatttggcttaacttgttggtttggaaatcaattgagatattagatgcctgtaacattgggcccatcttttctgtccttctttacctgaggttacttggtgtctccaccactctgtacacaaacataggctgtttgctaggattggggtcatagttcgtaacttccaggattttgaaaggtagacagattttcaactaatgattcttgttttataaaagactgtataagttgaggtgggacgtctgtgcaaggttctgagttatcccattaacggggggggggggggggggggagggaaggattacacatggtggtgtgggctgccccacccagagtcttctttgtcttaactatagatacttttgttgctgccccccactgtctgaccactaattttatcacaggatggcaatgcacaagtagataaatatcatcttgatttttttttaagtgcaatttgaagataaccattatttctgcttcccaatcaggttttccaaatcctgtcctttgtaaaaggtggacagagtaaggcagcagagctggagggcctttcagagagtctgtttgtctctttcccatcaggcctgcaggttagaaggttaaaaaaaaataaagaacctatttttaagccattgcccattaaatagtcagggatttctatttgtcaagcatcagaaacaattttatttgagtagatgagaatttctcagtatgtttgccagagaaagaaaatctactttcagtgagtgggcttgtagacaggttaaaaaactggagcaaaataagtcctctcaagggaatgatggacagttgcttacgattttgcatgaaaacaagttttgtaatttcttcacagaattccgttatgctttttttttttggtgggggaggggagtataccatattctattagcttagcgcttatatcataaaattgtctaggttatctgaaagtaatagtttgttgataatgacatacctgataatcttaactctgtgaatctgggtgggcaggtgtttcattcatctaaagagaatgggaggcatgatttaatgaaaggggaaacatctgtcaaaactccaaattgacttcagaagaggcacacgggcacttccacatgcttcaggctgccgggtgttctggagtcctggggacaatttgaggaagagcttgccagtcctctagatgtgacactcctcatgactctggatagaggctttacttatctccccagggaggagctaagttgttcggaattgtgtaatgggaggctcaggagagtgacacaggcaaagaggccaagagggatacaggtggcaggagctaagtttgtaggacacagaagcgcaggattccagaagcgatttgctcagggtccctttaattcactaatttattggcttcttaggtaaggtttcattttaatgaagtgctttggagaagcacatttgcatggtttaggtgcccggtcctgcacttggcaggcatgctgcccagttattattatggcttctttttgtgcaggtgtgtgggagccagacccactcacccctgtggctgctgtgaaggcagatccacaaaatactcatggggccagtgtaggcaggacactgcattgttgatattgcttctgtgggtaagctgcatcttacacctatgacaatctaaacccaaggagtccagaagtaagttatggtggtgttaaaaggggctggaactgagtttagattttacctcaggtgctgagtgtagtcatgttggagatacttagctctgacttcttgttgagtgagaatgtctgtagtaccctggttatcttgggttgatgtagacacagctcccagtagagtgtcatgtgatagctgtgataacagcctcatttaaatgggtttggcaggctagagaaagtgtgcagggtgtgcaggattgcaggcagagaggaaggcttgccccctcggcccagccaaggtctccctgagtcttgtcaccccaggatcaagtccccacccaaataaatgacttgtctgcgctctctcaatttttactgcacttcacctacactgcgtcattgctcaccttgactgctaaccttaactaaccgtctgcattgatcttcctggccatgtttggggcatctcagaaacagacatgctctccttgcaatccctgagtcataagagatctgggctttctttatgagactaagacccagagtcctgcagaggtctcaagattcttatgatagtggccgtggcagagcattttctgaagcctcaaggtcttctagggcgcgggggggggggggggctggttaaatggctacaatgaaaccactggggagaggggagactttccaggaacttacgttgaatacattggaaggaaaagaatttcaccccctactcccaagcctcggccccctcgaccgcttcctgttgctccgggttcttcaaaaactgaagctgacacggagcagcaaggtcagtatgatgagtggctggttacttaatgaccttttgattcattttcaatttttatttattttttaattgctaagaccttagtcatctttgagctaggatggctaggctttgggctgaagtcattttggcaaattgacctgaacaggtatatagtgtataaaagtttggtcagtcatttcatnnnnnnnnnnnnnnnnnnnnnnnnnnnnnnnnnnnnnnnnnnnnnnnnnnnnnnnnnnnnnnnnnnnnnnnnnnnnnnnnnnnnnnnnnnnnnnnnnnnnnnnnnnnnnnnnnnnnnnnnnnnnnnnnnnnnnnnnnnnnnnnnnnnnnnnnnnnnnnnnnnnnnnnnnnnnnnnnnnnnnnnnnnnnnnnnnnnnnnnnnnnnnnnnnnnnnnnnnnnnnnnnnnnnnnnnnnnnnnnnnnnnnnnnnnnnnnnnnnnnnnnnnnnnnnnnnnnnnnnnnnnnnnnnnnnnnnnnnnnnnnnnnnnnnnnnnnnnnnnnnnnnnnnnnnnnnnnnnnnnnnnnnnnnnnnnnnnnnnnnnnnnnnnnnnnnnnnnnnnnnnnnnnnnnnnnnnnnnnnnnnnnnnnnnnnnnnnnnnnnnnnnnnnnnnnnnnnnnnnnnnnnnnnnnnnnnnnnnnnnnnnnnnnnnnnnnnnnnnnnnnnnnnnnnnnnnnnnnnnnnnnnnnnnnnnnnnnnnnnnnnnnnnnnnnnnnnnnnnnnnnnnnnnnnnnnnnnnnnnnnnnnnnnnnnnnnnnnnnnnnnnnnnnnnnnnnnnnnnnnnnnnnnnnnnnnnnnnnnnnnnnnnnnnnnnnnnnnnnnnnnnnnnnnnnnnnnnnnnnnnnnnnnnnnnnnnnnnnnnnnnnnnnnnnnnnnnnnnnnnnnnnnnnnnnnnnnnnnnnnnnnnnnnnnnnnnnnnnnnnnnnnnnnnnnnnnnnnnnnnnnnnnnnnnnnnnnnnnnnnnnnnnnnnnnnnnnnnnnnnnnnnnnnnnnnnnnnnnnnnnnnnnnnnnnnnnnnnnnnnnnnnnnnnnnnnnnnnnnnnnnnnnnnnnnnnnnnnnnnnnnnnnnnnnnnnnnnnnnnnnnnnnnnnnnnnnnnnnnnnnnnnnnnnnnnnnnnnnnnnnnnnnnnnnnnnnnnnnnnnnnnnnnnnnnnnnnnnnnnnnnnnnnnnnnnnnnnnnnnnnnnnnnnnnnnnnnnnnnnnnnnnnnnnnnnnnnnnnnnnnnnnnnnnnnnnnnnnnnnnnnnnnnnnnnnnnnnnnnnnnnnnnnnnnnnnnnnnnnnnnnnnnnnnnnnnnnnnnnnnnnnnnnnnnnnnnnnnnnnnnnnnnnnnnnnnnnnnnnnnnnnnnnnnnnnnnnnnnnnnnnnnnnnnnnnnnnnnnnnnnnnnnnnnnnnnnnnnnnnnnnnnnnnnnnnnnnnnnnnnnnnnnnnnnnnnnnnnnnnnnnnnnnnnnnnnnnnnnnnnnnnnnnnnnnnnnnnnnnnnnnnnnnnnnnnnnnnnnnnnnnnnnnnnnnnnnnnnnnnnnnnnnnnnnnnnnnnnnnnnnnnnnnnnnnnnnnnnnnnnnnnnnnnnnnnnnnnnnnnnnnnnnnnnnnnnnnnnnnnnnnnnnnnnnnnnnnnnnnnnnnnctcctttctcaggagcccttaccaccattctctccccgtgcctgtcccccctgggcattgaggtcagactggaaattccgctactgcagcttctcctcagcgcccatgctgtgttcacttacacgtggggacttccatttcctgttggtgtatatttcaggtggccctcttgtcttcccaccccaggttcactgcttcctctttgtcttctgatggatggagactgccctgcttctttctatcctatgacatttgcttggtctcatctgtacccaggatcatgccacacattccattctgtctgcagattcctgcaatttgatgtgctctctctctctctctctcatacacacacacacacacacacacacacacacacccgaaccccatggcaatctctgtcagcgtctattgtggcatttacctaatgttttggttccttgtgtactagccttatctccgggacattgccacatactagcacttctacccctgtcccgcccagtgttcttagaaggcagggactgtcttactaattgtggttttgtatactgtgtcaagaattagcacaccggcccgtgtgtgtcgtctgccagattgattaaggacttgttgaatggggggtagaaattcaaatccacacagatggccgagtgtgacgtccattcataaaccttgtttttgctttgctaggtgaagctgagagtggagcgtggcagtaaaatcagacgacagatggacagtgtgacaggaacgtcagagaggattgggcctcgctgcgagagtcagcctggagtcaaggtgttgacaagttgctgagaaggacacgtgggaggacggtggcgcgcggagggagagccctgtcttcagtcaccccgttgatggaggacagatggacagcagccggacggccagtcacctctcttaaacctttggatagtggtcctttgtgctctgctggacacctgttggggattttagcccattctctgaactcactttctcttaaaacgtaaactcggacggcagtgtgcgagccagctcctctgtggcagggcactagagctgcagacatgagtgcagagggctaccagtacagagcactgtacgactacaagaaggagcgagaggaagacattgacctacacctgggggacatactgactgtgaataaaggctccttagtggcacttggattcagtgatggccaggaagcccggcctgaagatattggctggttaaatggctacaatgaaaccactggggagaggggagactttccaggaacttacgttgaatacattggaaggaaaagaatttcaccccctactcccaagcctcggccccctcgaccgcttcctgttgctccgggttcttcaaaaactgaagctgacacggagcagcaaggtcagtatgatgagtggctggttacttaatgaccttttgattcattttcaatttttatttattttttaattgctaagaccttagtcatctttgagctaggatggctaggctttgggctgaagtcattttggcaaattgacctgaacaggtatatagtgtataaaagtttggtcagtcatttcatgcctggaagtttgcttaagtttgtataaattgggagatggtgtctgagagccggttttgtgagtaccactaagctttctaactgcagtggccattgaattaacccctacagacaatccttataattcttcttgctttgggaaagcaaagggtaggtctaatagaagcctatgtgatggcagtgtggtttgtatggaaaaatgtagtcttaaagtgaccacagaactcagcagagaagaaaccattgtttttctaacctagactcggcctctcggcttcctctctaggcttgtagttagcataaaaggaaaggggtttctgttcccacaagggcagtgcagtaccattgtggcagcgatgcctgtagtctgcctggccttcccgagaagaaactcgggttcactgggtacttctcttaaatggaaaccacctccattcaaagtcctcaggctggaggggaggtagcccacacttgggcttgggcttgggcttgggcacagctgtttcttggtacgtttcttctattcagtttcttactgcggagagctttatgttcagcttcggtgttgtctcttctgtcagacgctgttgcttactagtaaatcttgggctgcacagggcgattctggaagggattctgataacacagcatcaggctttcccagatgaaggagcgactacgaataaagaggcgaggatctcaagggtgagagcgtccttttaacactaggcaacggaactgagaacagacctaagctacccccaaagggatatttggagaactttattctatatttaatgataacaaataatgtagattttaaaactgaactaaggaaaaaaatttttttttttgcatgcaaatcaaaaagctttgaatgtgtgcatgtgttctgggcacatgcactaagtagagtgtttctcccatattatagtttagcagactgaagataaacaggtcactttttttctccttcagataacatgttttctgacctgacttctctctctttttttttttttgtcgttgctttgaaagatttacgtacttttattttatgtctatgtgtgtgcgcctggctgtgtatatatgcaccacaggcatgcaggtgcccatatgtcagtagggggcatcggatgcctggaactgaaattacatgaagttgtgagttaccgtgtgggtgctgggtactgcacacaggtcttctgaaagagcagcaagtgctgtaattgtggaactctctctgtctctggccctccagcagcctcagctattgctgcttctgctgctgctgctgctgctgctgctgctgctgctgctgctgctgctgcttcttcttcttcttcttcttcttcttcttcttcttcttcttcttctccttctccttctccttctgcttctgcttcttctccttctgcttctccttctccttctccttctcttctccttccccttctcctcctcctcctccttctccttcttttctgttaaacttagaaacagttaaataggttcatttaagaaaaagaaaaaaaaaatgacttcattgaacccaaaatataaagggttgcagaaccataaaaaaaaaaaatagctcagttaaattagagatgattcataaggtggggttgtgggtgccaggtcataattactgacaaaaaagactttgtgaaattgcttctaaacaaagttgcatgtgatagctgccatccggtgggagtttactcagctgtcatacccagtcaagggacaggtctaacaggcacaggactttcttttttgtaaggtgctgcgtgtttcttgtgttttctttctatcacttttcagcagtgagtttttttttttttttaacagccttttctttttttggtatgtggggaaaagggaaaaataaaaataaaaaaattcagtaggcttcaagaagagacccatgataatgtatgtgcaaatatggggggaaaagggcgcctgaatataagtgagagatttgaaatagctgaaagatcgggaaaccagtggaaggaggggtccccagggggggcactgtcctcgacattcattagatactccaggaacattagcctcatattctcactgaaatatgatgcttgtgacatacgtgtgagatcagcagctcccatgtaggtgcagatgcagctttcttttgcccgagtaagtatttgtttccaaaatgtttgtagtggaaacttgtgtggcagcaagaaaagggagttctttttcttgctttactcctcctaggtaacaatttcttccctccattgattgtgtattcttttgagttctttggttttctgcttctcatccataagactacttactcttcaagccccaagagctgtgtgcattctctctttggggtccctggacaccaggcaccctgttaatgggcagtggtgtaacattggaccagtatgcatggtaaacttgtttcttttatcctgttgattctccataccccgagcatcccttgttttcttcctcatgtttaacaggtgggtttaatcctgggctcacgtcatccctcctcttctgcctcttctgtacccgtgactacagttgggtaccacagctctggcccaaagtagactcttatgagcggttcctccttatgcaatagaatcaacctttttctttctttgtgctgcgtgcatttagaaggaagactatggagtatagttatggcgttggagaaactagcatttgaacagggacaaagcaggcactgttacacagctaagccagtgagtgccaagttcatggtaaatggcaggcaacaacaaaacagtgcagtgcaacctatgtgagcatccgattaagcaactcctctcgggaatcgctctaccaatacattttgcatgcagttgtctagagcaccctaccctgcacattgaataagtttatttcttggatgatcttggactggggggacatcacattcagtaaatacagatgggggggggatgtcctactttgtgctagaaagcaaaagcaggaggtgaaatgacatttttcgttttttcccctcttcctttacggctgtgttctgttctcttagctccagttattcctccctaggtccccagagttgctgatccctctcctcctctcactgaagctggctcatggtgcgctgtgctagaggaggagtctaggttccctgtgagccaactgtgcagcgcagtgctctagtgtgttgtcaagtgagtcaaggcctaggctcctccagttacagtgcatgtggctgaagtgagccacttgctctgtgtgtcacgtgcgggcgcacaggctgaatggctcagccaccatgccttatttgctctttgcttcactcacctgggaggcaccctgtggctttgcccttcagcattgcttgctgggcctccagactgcttgcttatcttcagcctcagcccttgggacaggtcgttctgctgctgggaaaatgggtgaagctgatagggagtagaaggtgtgtcctatcagcaggtgacctggggcacagattttattattggtagtggcctccttacctcctcacccccttttatgactttctctttgcaggagggccacggtgttcaaaaatgaggcttcctgttttatttcacattcttgtaacctaatatcccattcgagcatctttggagacagctttttctttgttttgttggactgtgcaagatgtatcttccacacggagacatacatccatgatctggaccctctgtcttagcagttggataagcacattctgtcgtacacacaaccttcctttgttggaggtctcccatttcctttcctatacaaggaattgaaccactgtacgcaaggaacgtctgtaggggtgagaaagataaatacactcttcttctgcaggagatgtccatggaacacattgtgatcctcccgttgaagttcagctgtagctggctatttaatcttgtgagctgctgaccaagagagtttgtgtaaagcattaaaatctgccaacccgaggggccacttgggcacccaagtttatataaaccttcggcatgccttatgcacccatgaccctgaggactcctgacagccggtcccagctggttttacaatataaaacaaaactcagacattggctcaaactgttctacattttgatccaaatcccttctaaacacaagaagaaaagagcctgtgccctgcgtctgttttcgtggtctccccaggcatgctatctttatatttttttcacaccctagcttttgagtgtccctgcaatgcttgttactcctcgactagaaagccaggctgcaataaatcagtgactgcgccacacagaggtcacagaagctagagagagacctgatcccaaattacactccttggtggggtgccatggtctcaatgcatgagtctctgcaggagacggtagaccaagatgtattcctgtttgtgggaattctgtttgcaaatatgccttttcttaccgttctccacctcctctcctcctttcaagggaagctttgccaggaagctggagggctgtctcaccatctgactttgggtggcattcacctgttctgcattctgtaatcatggctctctgtggagaaatcagaacaaggtgctggacccatgatgggagggttcttaaacctccactctctgcttctaggtagccagaaaaagcttgaatgtttgccttccatgttttcctaggaaacagcatgtatttccgaaagatgactagtgtaatcgactcatcacaattgttgttgtttttgtagttattttagtggccatggtgatagcactgtactgagaatcaaacccaggaccttgtgcatgtgaagcaagtactaggcacctagcccacatatgtagctctttttctgtttggtgtttgagatacaatttcaccatgtaacgaaagggctggcctggaactcactgaagagaccagtgtggtttttgaagtcacagggatctgtcttcctctgccattggagtgccaggattaaaaggagaaaggaattccagagaacaatctgcatatccatttgtaaaaggcaatccagaagaagcgaaagggctgtctctccttcactccctttcagccctcttctgaagcaacctttaggaactgacagagccctctggctactgagtcaaggatgccttgggctatgcggaaatgagacacaccaccttctcctgggcattattcacagggaaaggccagagctttacaggatcgatggccaaggcaggcagcttggtttccttggtttcctttcgttctggatttatttctatctttttattatagataatagttctgtgggtacgtgctagtgacctcgaagttccctgtaggtggagttacagatggctgtgagctgcctgccatgggtcctgggaactgaactctggtcctctgaaagagcagtacatgctcttaatcattgagtcatctctctagctccacattttatttttcccttaagtgaaatgcagtaacccctggctggcgcttggttacccgaggtcaacagagatctgaaaatattactgtacaactaggcatttgtgggagagagaggcagagaccatatttccatgatgtttttttttttttactacggtatattgtgattattgtatgtattaattgtttatacaccatgctcctatcacagatgtgtatgtataggaagaaaatggaatatatagagaaggatactatttgtgtatttaggtgcctactaagggtcttagaactactgtattccagtatattctatgttaaattttttgacatagcattttggggtgtgtgtgtgtgtgtgtgtgtgtgtttgcaaagtgtgtgaatgaccacaggccttacctgttcagtgtgaatgaagctacctcccttcaaacaagttatttaagccaaaatctcatgttttctaccactaatgattgaattaatgttatctccctaagttttctttgtcataaggataaagccctgtggactataactttagtttagagtctttggtaagcttggtgtctagtctggtttctaggtgaatgtatgtatttttgtccaaaagggattagtaaacatgtcttcagtacagccacacttgggaaaataaacattagaaaatttgaaagtcaacaacacatggtgccttgcatctgctaagttgtatcccaaaaggagaaaattttgtacctgtggcaaatttgcatgccaagtgtgcatgtcatttgcatattcgtattttagttagtaacgaacaaacagaaagtaaatgttagctgtgcagctggctgttgtttctaggtctatgtatatttttttgttgctgacagattgccataggaaaagatgtaaaatgggcagaagcccgagatgggggtaggggtggggtcacttggtatggtagctggacgtaggaacaccattgtttcatacgctgtactgaatgctttcatgtcttagtttaatttatactatttaatatcaagacaatcttcaggcttttaataaaacaaatctaaatagagaccaacaagattaagtaaaaattgcttttattccagtaactactatccaattgccctcaatttaacaaaatagtattagaatgctttataaaggttttttgtttgtttgtttgggtttttttggttttgtttatttgtttgtttttggttttgttttgttttggcttttgagacaaagattttctgtgtagcctagctgtcctggaactcactttgccaacttggaactcactttcttgactaggctgaccttgaactcagagatctgcttgcctctgccaccagagtgctgggattagaggagtgagctaccacttacaaagtatttctatttatcattatttatctctgaagtatccttacttatctttattctactactgtagcagtataaacagtgttaaggagcaatcttgtaactaaaagtcaaattcaacgtacattgttaaaatgcaactttgtattagaaagagaaacaagtgacagaacctcccactttctcctggtggcactatgccactgccaccacatcgcctgggcatcattttaaggaatactttctcttcactttgcttagagatagatgttggcaatcttcttgattcatccatcttacctgttctcagctactggcatgcattatgcaaggcctagatcattctgtcctgccacagtttgatgcatattgaagttattgtagaagacttcctgtaatttgttgatcaactctgatatccaggccagaaaggaatattggcatgcttgaaatatcagttctttctgatatgctatttaggcctgaaactgccttgcctctccaaatattccttaaccactttaataccaataaacactaattgtaaaatgaacagttcaatattggctctgtttttgtttcaacctctgaatttttactgctaagaactattagagaactaactcccctagcccccaaggataagttctttcccctctaatagtccagcagcactaccctgaatgcctggatgcggagaaaagagagtttatgtgaaggactgacttaggatctgctcaggagcttctggcaattataggaaccattactaataaagtgtccagttggtactttttttgccaatctataggatacactttcttaagacatagttcaccacggtgtaacaattgctgtccattcattggtgggcacttggcagttgctgactcttcagggttcatgagcaaatgaaatggtgtccgtggaatgccttctcaccctgtgctgcctctggagtcctccttgtcctgaggatttcatggatatctgaattatagtctccaggatcggtaaagaatgatagtcataatgtgttcctttggattctgaggttttgcttattcagacttcacatctgttgaagaggtaacattttcatattaggcaggactgtcctgaagctagttcctgtcttttatggacattatctgggttgaactttctgctcaacaggaaaacgactaatactggtctcagcaaaaaagaagctatcttatttgatttgataaaatgcaattttcaaaattatttaaaggtgcagagaaggtactattttttgatattaggtatatcatgagatgtgaacttttaagctattgtgactgcattcagtgctgctggctttaattctactacagttttaaaaaaatggagtctttcttttgttttctggtgctgggacttgaactgagagccttgtggatgctaagcagacaccccactccactgtgctccaccccaaccctttgatgtctattttaattaaatgcacgaagattgcttcttcactaaacaatccacttgaacttttgctatctcttgctcgtctctgtcctaactttataaccacataggtgggtatttgtgtcactgttaaacttgatatgtatgattatttttaaatataacacttaaactttatgtgctcgtatagtatgcacagatttaaagcaatttccatcaataacaagctttactaggtttttttttttttttggcgttcaaagttcattttctttttcttttaattaggtattttcttcatttacatttccaatgctaccccaaaagtcccccataccctcccctcccactcccctaccccccccccccccactcccacttcttggccctggcgttcccctgtactgaggcatataaagtttgcaagaccaaggggcctttcttcccaatgatggccaactaggccatcttctgctacatatgcagctagagacacgagctctgggggggggggggggggcactggttagttcatattgttgttccacctatagggttgcagacccctttagctccttgagtattttctctagctcccccactgggggccctgtgatctacccaatagctgactatgagcatccacttctgtgtttgctagaccccagcatagcctcacaagagacagctatatcagggtcctttcagcaaaatcttgctagtgtgtgcaatggtgtcagtgtttggaggctgattatgggatggattcccgggtattgcagtctctagatggtccatcctttcgtctcagctccaaactttatctctgtaactccttccatgggtgttttggtcccaattctaagaaggggcacagtgtccacactttggtctttgttcttgagtttcatgtgttttgcaagttgtatcttgtatcttgggtattctaaatttctgggctaatatcccatttatcagtgagtatatatcatgtgagttcttttgtgactgggttacctcactcaggatgatgccctccagatccatccatttgcctaggaatttcataaattcattctttttaatagctgagtagtactccattgtgtaaatgtaccacattttctgtatccattcctctgttgaggggcatctgggttctttccagcttctggctattacaaataaggctgctatgaacataggggagcatgtgtccttcttaccggttggaacatcttctggatatatgcccaggagaggtattgcgggatcctctggtagtactatgaccaattttctgaggaaccgccagactgatttccaaagtggttgtacaagcttgcaatcccaccaacaatggaggagtgttcctctttttccacatcctcaccagcatctgctatcacctgaatttttgatcttagccattctggctggtgtgaggtggaatctcatcctgatgattaaggatgctgaacattttttcaggtgtttctcagccattcggtattcctcaggtgagaattctttgtttagctctgagccccattttttaatggggttatttgattttctggagtcccaccttcttattttaaaggcggccccaaaatgaatatttttgaaagaaacgtatttaaagagcccagaacactgatgtttatctaattccaaggaatgaatatgaaacagatatgtttagaataaatgattactgtcccataccttctcataagtatatttactggaaacgtttttatttttaacttgaaccttacaattctgtagacacgagtgtccgccagcctcctgctgggcgttttatagccatttctcatcagctactcactcatcctttcacagggagcttcttagaacccctttgagatatagcgtaagccagactctgatgccatagcccaggagcctttgctgatttggagagccacgtggagcatggtggcagccacagcgtggatcttggcttactgtcccctctcacgtacgggcagctgacgtcttcatagatacctgttttatctgttaggcattagtcattctattcacccagctgcaaagaacttaccttcatagtatatatatgactcttttctgacttatacatcaaaggcggatggggcttcaaaaggaagaccatgttttgggtatatgcctatgtataccccacccccatactaggatatatgtaccccggtctgatagttcacaagttatagacttataaacataccccacacacccacctctgttatttttgacgatgctaggtgctgcttcacatgcctctgagtttcagcttttcatatttcaggctcatagccttcccattagaatgaaacacagtctgggcctgccctgcttcaaagccaaaatcccgaggatagccagtccaagagctgtgtgttttggcgtgggaagaccggttgcttaaagtctgtacctatgagagctctcacgttgactcaaatgaatccggagccttgttccctgaattatgtcaaggttagcagtcaatgctgctttagaggactgagtaaattgctgaattcctgtgaatgtcaaactctatttctcagcagagtcggccactgccaagtttgtaatgtacacactgtgttctgttccctgaactccaaggatggggtgggggtggggtgggggggggatagagggcttgcatagggcacaggtgaattttatttctagggacttaccatgacaatgtgacactactggtaaagtctctgaagtactgggcaccaggaagacttcttgaatactttgactctcactttttttttccttcttcaatagaaaaaaaaatattatgtaaaaagtttcctgagtttataaagccctaaccggtggctctggcatagcttgttaagagtctccaagaggacctctcttcccaccaccgtcataagaggcaagaacaaaaacgcattcttggtgattccaggaatcagatctaattggaaagcctgcctattgtgaacacagtggatccagttttaaatacacaacagagtgaggtttgacttcttcaaagtagtcaggtagccccacgacccccctgtctctgttttgtcactgggggtgtttctcccctcttctttatctctccaacccatatctttcttcagtgggaggtaatacttcagataataattaagtcatgggtgactgctcaaacctgcaattccagctctcaggagacaaggctcagggattccaagttcaaggccagcctaggttacctgatgagatcctgcccaagaagcgaagaagcaaacacataaatacattccctatattaagcagggaggggtggggcagtggggtcgaagaaaagtgctagaggttgctccgaaagatactagctgagtgaggtttcatgcattctgggctattggtcattcagggcctcagacagccaaactaacatcaggaaaggagtttttcctttcacattagcacaactacattgaaaggagaaccagtttgggcattgcctggcaactgttggtttcagtctgtatctgactttagacttgaacccaggacctaagctggtgtgcaggatgggcaatccgaatgtctgtgagagatcttactcactgataaacaggaaaaccctcccaggcatacaggaaactgttgttttgtacgtccaaggacttgaaaggcaagagaagcttcttgaagtgagtgtttcaagcttgcctgcccagagtggacagaaagcagctgggtgattccgagctgaagagatgaggacggggtaagatggacagggagttattaaagaaactaaatgtgtactagacgtagccagcaaaaaaaggagaatggtcagtgttaaaaataagatctgtactgagcaggatacaagaagaaagagtttgtcgaatccagagaaaaagtctgaatggaaaggagccgggggagagtcagagacgtggtgaaaacttcaggtgtctgtgaacagggactcatttcaagtgacacttggtgacatggctgaagcagcttcagaaagaactgtgtgtgtagacctgaacccgctctccgccgttcccacgtgatgtcaccgtaaagccacctctagatatgttttaggaaaaaaaatagattataagaataatattagagttctttgccaaaataagtaacaaggtgtttgttaccaagcaacaaagttgccttccatctttagcagtctgtgtgggaagctggtgagcttcaacccaggtttgagaagaaatgatggggactagggtgatgagctgactccttatactttctactggctgcatttactcaggacaacacagcaaacctttcatgtcactcgggggtggggctcaaaagttccattttcatccttaagttcacaactagagcatatgctaaaagaaatttgaatttaagaactaattgttacatacatacagagtgcatcttccaaaatcctagagctaccatgatataccaaaagtatatcaatgtggatggaaaatgcttacttggcataaaaaatttaaagatatatatctgtgtgtacacacataaacctaaagctagctttacacctgcctttgcatgttgcatatatttcaggttctctgctaacacctatttgtgtgttagctacttacttttcatgataactctatgatagtgactttatccatacacccgttgtaaagtcaaagtgtagttaaatccccaagttacacagccagtaggaaagctgagatttgaccttatagtgctctcaagcagatatagcatgctaacaagagctggtagataatcatgttatatcgtgtgactcactcactcctgttcggccagggtgtgtcccggagccaaagacagatgacacccccacccccatctcccacccctaccctcttgctttgcagtgacctatggtctgccaagacaaaaggagctcaacaaaatggatgtttcctgtttcaggaaatagacgcaagaaaaactaatgtatgaagcagacatgagtgtcatttttccttctatcaaaagatcgccaggtcagcaagctaggaaaaagtgattgattttaaagagagtttatcccctccgcatgttggagccttgcttttggtgtgtgtgtgtgtgtgtgtgtgtgcgcgtgtgtgtgtgtgtgtgcgagcgcgtgtgtgtgtgtgtgtgtgtgtgtgtgtgtgtgtgtgtgtgtgtgtgtgtgtgagagagagagagagagagagagagagagaggccagaggacaaggtcaggtgacattctaggaactccctctccactgagacaggctctctcagtggccaggaagtatgacgtttaggctaggctggttgatcagtgagtaccgaagctctgcctctctctgcctccctaggattgggattacaggtgtgagccaccgtgaccagcatttttatgtgggttctgaggatcaaacccatgtctttatccttaaatggacagcactgtagtgactgagccttccaccctcagcccaaacctgtgcattttatgagattgatgaaaatattaactgttaaattaacctctatttgacttacggttctcaatgttatatatcacacatataagccatataaacttgtttctatacaaattattatgtacttatatgtaatatatataaaattgtatttacataaaaagatctgatagtacagcatgcatataatgtcataggaaaagctttgctgggataattattcaaatatgcctttctaatggaactacttgatggttccagcaggctgtaacttgctactgtaacttgtaacagccttcaagttaggagttttatggacagttacattgtaactgtcacttgtggtctaatcttccccttaagggaagcttgagaaacactgtcagctttttcgagtagaggaagtttaaacatattggcgcagagtcttcaaaattgtttagcttaaactnnnnnnnnnnnnnnnnnnnnnnnnnnnnnnnnnnnnnnnnnnnnnnnnnnnnnnnnnnnnnnnnnnnnnnnnnnnnnnnnnnnnnnnnnnnnnnnnnnnnnnnnnnnnnnnnnnnnnnnnnnnnnnnnnnnnnnnnnnnnnnnnnnnnnnnnnnnnnnnnnnnnnnnnnnnnnnnnnnnnnnnnnnnnnnnnnnnnnnnnnnnnnnnnnnnnnnnnnnnnnnnnnnnnnnnnnnnnnnnnnnnnnnnnnnnnnnnnnnnnnnnnnnnnnnnnnnnnnnnnnnnnnnnnnnnnnnnnnnnnnnnnnnnnnnnnnnnnnnnnnnnnnnnnnnnnnnnnnnnnnnnnnnnnnnnnnnnnnnnnnnnnnnnnnnnnnnnnnnnnnnnnnnnnnnnnnnnnnnnnnnnnnnnnnnnnnnnnnnnnnnnnnnnnnnnnnnnnnnnnnnnnnnnnnnnnnnnnnnnnnnnnnnnnnnnnnnnnnnnnnnnnnnnnnnnnnnnnnnnnnnnnnnnnnnnnnnnnnnnnnnnnnnnnnnnnnnnnnnnnnnnnnnnnnnnnnnnnccacccccttttcgcagttcccacctggctccttcctttcctctctttcttctcccatcctatgcttgcagagtccactctgagaggctggtgtctttcacatacctcacaaaggatgggttggtttcacaaccaactttcccgatgatgtagtaccagtgtcccgcctcacctctcaggcagccctgcttgtccatttgctctggtttctacttagatgatatcctgcccctggattcagtagttctttgagggtccatcttttatcaacatcggaaaccgtgcttagttcacatgtgcaagtgttgtgaattttacatcctatcacttacaattagtacctttttgagttcgctctcacatctcatgtgtaatttcctaagagaagaaaggagggctagttgatagtggttgtaaactcttttgacatgagggtaaaagtattttgtttatagaggacagaaaaggagttaatatttagcgactgtgctgaaggcgggacaggacctaaggaatgtggccacctgaccctggacctcccatctgtgcatgtgcacctggataattacacaggttttcgatttgctagaaaggttgtatttgtgactttaatttacattttcgtttttagttcataatcctagattccacatttctctaagaggaaaggccctgctcagacacggaaaaaaagtcagcttcaatgtggctgtttggaagtttgcagaaataggtggagtgtatgtggtgggctggacaccagctactgcgctcttgtgcacctactaatcctgattgcaggttgaggcttaggaaaagaaactagaccagggtcaagcacagctggtggtcattcagtcctcacagtggtctcacttctgagtgtgtgcgtctcagtaccaccctcaaccttcaaagagccaggctggaggaccaggacctcttgtcggtcatcctcgtgcattaagaaacagcagtgtctaaaccataggcttaataaacacagttttgaatttctctactttgcttaacacttcttttatctcaaagtaatttacaaataccacaggtcacgtgctagacagatggatgctgtttgtgtcagactcatgtacttggagcatgaattaaatcaaagacccacaggagatcactggtatactcatttcttttgaaattttatcttaattaactttttattatatagggtatgacaaggctagttccatacatgtattcaatgtgcatgggacaaatttcccagcatcccccactacagccccaggtatttgttttcatgagacccatccagttctttcaaggtttctttgtgagattttgcatgttagagcagtgaccctatttacttagcaaaggtactattagttcattattagttctgtaacttggatttgaagtccttcataaccaccgcagtcttgaagagcatttgtgctttatctgactggctagggaaaaagttcagtcttaccaaaaagaactgttctgagctcttgggtcagggtgtgaatgtttttcatgtgactttcagttgggtcttgctcagagaacgtagtggtcaaagttgggttcacatcttgggcataatttgcaaaagtgaagtttgtaggtgcagggtggttccgtgaagacatgaagatgaatggacgtaatgtttatctttgaagtcctgtttccagaggacactggggcaaggaacaaacgctcttctgttctgaagcatcccagtgttttcccacgttgggtccacgagactgagtagagggctttgagatgccatagctccaggatacattgttccctcctttttaggaatcgggtatccccagtactggggtcaggctcctcatcacgcctctgaggtaggaagtgcacggagcccaggcttacccacaaagccaagccacagctgagcatttcccactgtggaaagtccttcctgtgtttgtcacccatggactcagcccttagtgtctgggtcagttgaatgcctatccagggaaagccagtggtttggcagagaaaactggatctaagtgggaataaaatttgttgacctctgcctcagagggtcacatttttcatttatatttcacacgagtcatcataaattacagtgcttatagataaagaagacttcctccttcctccctctccagacaccacataatggaaattgcaagtttctacagaaaggccgatactgctgcctcctcctcttcttcctcctcttcctcttcctcctcctctttctccccctcctttttttttttttttttttttttttttgtaaactaaacaaaatgtcagtctctgatgagacttgcttcctgccagaattcccactggtctactgtcacagtttccacaaagggccaagatgaaggagggaaacccattttgaaccctgtgctcttctgtattatgggaaagctgctttctgcctcaggatggggagaactgttaagttctaaaccttagtgataggcacgtaagacctactggattctaactgctgaaggagaatgtcgattaaggcaagatttgttctgctgctgcgatcagacatataaaactttgcaaagttttgttgttcatttcctgtttaagaaaaaaaaaatcaccctgtcctatgaactcccagaagatgagaagattttcctcagagaaaattcagttctgggaagagccctccatagaggtcataacctacaaaattcttgaagggaagtttcagtgagaagagggcagggacggttgggaagctctgagtgctgcagtgggtgactggtgtgtgagcccctgctttcttgagctgcagccttcatgggacgtgtaacacacatctgcagaaattttgggggaaattaaaaaaaagaaaaagaaaaagaaagaacaacatgaagttgggagaagtgtagtggaggcgaggaaagagtggactttgatcaatgtatatgcaggtataactattaaataaaatattaaaaaatagatttctgtttccagcacagggcaggaatagcctagctaagtaggagtttgcaccagtagttgtatctttcccaaatgactgctggagaaaataagtgtaagccattgtcaacaggttgtggaagagactggttcagcatgctcgctaccaaaaactcgccttgctgcgaggctggccccagccccagccttccacataaagcaggtgctgttcggatcagaggctgatcatccttggcacccagagtggacagcctgccaattgttgcacaatcgagtggacccaagcgacaaaggactgcttaattgaaagtgtataaaatggttccttagttgaaccttagtgggtcacacccttaatcccagcactggggaggcagaggcaaatgactctctgagtttgaggccagcctgttctatagagtgagttccaggacagccagggtcacacagagaaaacttgtctcaacctccctctgccgtcaaataaaatggtttcttaggcttcatggacaattgagtaaccccataaccccagtttcctttctttatggtcactacctaatcctctgggatcaagcataaaatattctggtctcttacagtgaaaagattaaacagctgaagtttaaattaaatcattaatttggagttttctgtgactacattcattatattctctgttgggattacgttcctgtggatttgacagatacataaaagtgacaatatgtgcttatcaagggcaaataaaagttctgcacgctgaaatcctgagtggtgtttttagttttctgtttatattaaaaccttttaaaattgaaatgatttaacgaggttttctttttctggatacctagtagaagaaaaaatcagaagcatgaagcaattgagtatatttacgtggagacaggcctgagtgatggaaattttttttttttctttcagtaggatttagcagaaagcatgtgtcgaaagtcttacctaaatgggtcataattaaagacgttggggcttatttattttaattagaaatattaagctacactcagtgggcttcatggaaaaaatttttttctaattgcatattttattttacgtcaagtaataaattaaatttttgtgggtaccaaaaagacgttttagctttaaccacaatcataactcatgctaaatatattaatgttgtgttgattagctggctaactgtttctggagagttaactggtgagacctattgttgttgatgtttttcgttttccagtaatagtggcagagcaatcagtgtcctttctggagaaaggttctcgtttgagttgctctgatcaatacaggtgactagaagcagaggtaaagagcagcgcttacttctgctgtgttctctttaaaactctgtcagatgctgttgttgcgttgcccctcccgtgggtttgacagagtttctgggaaatccacagaggcaactctctcagcctcttacgaaaaggggcagaatggaagggggaactcactcacagttcctgtcgggattaaaccgggcatccaagtggcgcgcctcaggttgactctcagacctagctgctgtctctgggatggaagatcccatctcaacatcctccatgtatagcacagaacaatccttgttacccatctcgttttctcgccaaagagaatctgtagaacaaagcaatttagactactcaagtacattggccattcccagttgtctttgacagttcttaattagagtaaaaacggacacagtcagcagtaggaacagtttttcgggacatttgggaatttgtacaaatatactttagaggaaaaaaaaaaaaaaagaaagacaaactgtttggcttctgcatcatttattatgtgtgcgcccttgaatctggtgtaaagtgcctgggatgaagattggtttctgctattgtacagccaaaggggtagccattgcactatggtctcagttacatggtgaacttgtaaataagtcaggcattaaaaacttccagtggcatccttggctgagagtccgtcttagtcactgtgaagtatttgctgcatgacctaaagatggtaccataacatacatagccttggctttctcatctgtaaaatgggatcgatggccaggaatgagctgtgtgggagctctctcagacacacctccactcccagaagaccccaggacctaaggctcattgatgataattctcaaaacagaaaggacacattgaacacacacacacacacacacacacacacacacacacactcagtgtttcttagacttaagtgatatgtttgaacctgacgaaaatgaaaggaattgagattgcccggccacaggaaatagaggccaagggccaagttaaacagctgaaaccacgcacaaagcaggagatcatgggagatagcaaacgcttcgacgctctctttgtcggtgtttgagggagaaatgacagcagaattgtcatgtttagaccagctgcctcttctacctcacctgagagttctcctcctcgtccgtggaaggcagacaggaccagctgtgttctgtggcaaaatgcgtttttctccacagctcggtgctttcccaggcgcaggcaccctggaacctggaatggtttcgtttcttagcacagagttttcatttaacatggaacattgttgcttgaatgatgctcattaggagtctctactcatgttttcctttgcctgcttcaatagtatctagttctgttttctgtttgtttcttgttttgttttccaagactgttcttctttagtcctaggagactaatactttacacacacacacacacacacacacccaagctgacctctaaactcatgataatcctcctgcctcagcttctctagagctagaattataagtataggcaatcaggcccaactgtttgtgccacttaggtataaaccattccagggtcatggatctgttaggcagagtttagttgactccatactgtatcttcagagggcatagtactggcaaaaccatacccagagctgcagttcacttctgctttgtccatttagtgtgtccatttcctctttgaggaaaacctttggtttttcagaactccattttcctttacaaagtcagagttgcaatagcaaaataacttaaaaatattttgttttcttgctcactaattcattatgaaatagctcaatgcttaaaaggaaaaaaagaaaaaatgtgctgggtcttggtgggagggaggacatgcctgcctgcctgctctgaatctgattctcctgcccaatagaggttgccatctattggccaaagagagaaataaaatgaaaagttcggcccacgctccaggtggtgcgatggtcacggagaggttcttttggtaaagttcttggctaaaatatatgaaaatgcatgattctttaggaaccttaagcccaggatcattggccgtagccggtctctgtaagtcatgataggtatttaagaagtggctacatagctcttttaaatgcatatttcttgagaccaccagaattccattttaatgaaatattaaatggagttttaattagacaaattgatggctgattttgtaactctgtggttggtttgggctttctttcattccagcctttggaatctggtatttcctgcccagctgacatgagacaggctctgtagaacgggcaactggtggctcttggtgctgggatctggttaatttgaccatgtgcactatttagaggtttaagtagtggcatctctccagagttgtataatgtcataaggtgcatttgacaaaaaaagggaggtggttcgtggaaaattctcaagcaactgcaaacaggggaaagagttcctttggtcttgggtggacacacacacatactcacccactccacactccacacacacacacacacacacacacacacacacacacaaacacataggacagcttgaacttagaaagcaccagtataacaatttttattattaataacacatcattttaaattgacttctcatccctaatatctgaaaataatcttataaatcctgaaagctaaattgtatatacattagtgctttacttaatatgcctcaccatggtgtgtgtatgtgtgtgtgtggtgtatgtgtgtgtgcgtgtgtgtgtgtgtgtgtgtgtgtgtgtgtgtggtgtatgtgtgtgtgtatgtgtgtatgtatgtgtgtgtgttgggtagtatcctaaccaactatgaataaggctcacagtctaaccttgtggttttatttcttccttacctgcctgttcatatttggagtgtgaagcttttttaaatgctgtgtactacccaagtaatcatttgataccctggattcaggcatttgacgttcagttaattaattcctgtgccttccactgtgaactaagaacgatgacagctaaagaaggaggcggtacaagagaaaccaggaaacccatatgttatttgcttccattttcacatagtacacctatatatgtgtgaaacaaatatataaactgttacaaagcagcatattgatgaattgaaatgagtggagcatgatacgagcaagaagccggcaggagaacggttggagtggggcctagagaaagcagagtttttgaaggaagcgagacatgtttatgtgttctgatacaggtcagtattaggctcaccctgaatggcttaatgtcatgtgagcagtggggagaagagaaagggcagcatcatggaaatggttgaggcatgggcatctcctgtgggcaagccgagatgtattgttgaggtcaggctgtgtaacttccttctgaaaaggccctgcccatttaccagtcatgatacctttctttcacttctatttttgtcccttcctttaggaaaaggactagatgcttactcgttagttaaaactcaaagtcattttcctgttctggttgcttttgttcctcgagtttgagaagaatcgaattaggtccgcgtgaaacatttggtccctctgtcaagtttccattttcctattacctgatatgtctttctttttaaaatgctgtcccctctcatccaccagatctgtatcgtggtgcccctccttggtctttcccttttggataaaggcagatatactgagctttaaaattctgcctggatagattatctgctctggcacaaagtggccctgtcataaaacccagaattgaaacatccagtattgacgtctttaaattcagccttacttttaaataatactggactgggttgttggacatcatcataactaaactgtttctctagacgatgtaggttaatccagcaagcccttctaggaattctgttgcaactggtaccctgtactaccggactccattataaatgatttaacctcctataaagctgcattttaataggtgtttataggcatcacttaccaagtatttcaagggctctttaaatgaaaactgccagggagggaagggtaacactagcgttttttctcacagttataaacattcccacataaaacagggttggtggactatgggtgagggaacaaatacttaaggctccatctcctaccgctgactttcactcgttcccacgataactggagagaattccttgggaactcctcttcacagacttgtgtgttatgtgttcattctgtgccaggacctggtcctggcctggatgccttgatcaaagctcataacttaatggagggaaacagaatgctggccgttcggccagacaagtagtgtcctttaggattggagctaagctggaggcacctgtgtttgaggtgccatgccctccttagtctcctacgtattcctgccagtggctgacttttctttctggggggtagacagctggtgtttgaagtggtaaggtatcccgtgggatctacacctcagccataggctccatgggatatggtagtggagacccatgcttgctgtcttgcctttgctgcctgccctctccttccgcctgcttgtgtttggcgagctttgtcagttgcatgcctgtgatgaagatggcagggcagaagacttgactatttctgttggtaacataccagtgtgtaaattgggaagttccctaagtgcgttcgatttctatattcatttgctaaaatttatgtgacccataatgtcattggtatgcccatttgcagtgatgtactatcattaaaagtgactttggtgaagtggctttggtgtccttgtctggaaccgtaaccttcagctatagaacacgccgaggggaaacacatgttttagatcttacaatgagcttgggaaatagtacccacatgtaggctggagacttcctgtggcgggcgacaggcagcctgtgaggagagcctgctttgggaccaggactgttcctgtcatcgagtcccgttcctaagagcggcgcccagaagggtgaatgagctgccctgaaatctttaagattccttatgagatttcaaaattgcgttcatgaacatcactcacttggaagaaaatggcttggtgtcctcctaagactgtgcacacactacattaatcctgtgctttgttcatgactcccgagggagaaggaagatcagtatttaaggctccccctcaaaaccgtctgcctctgctgggtcacggctcctactgttgtaggagttctttcctttgtgtttgtttgtattttaagattataattacacagcttttctcttccccctctcccccttcaaactctcctgtgtacccccttgttctctttcaaattcatatctttttttctttaattgctgttttctgtgtgtgtctctgtgtgtgtgtgtgcctgtgtgtgtaataccagatacataaatacaacctgctcagactgtataatgttacttttagggctgatcatttggtatttggataaccgattcctgtgcttttccttggggaagcctgtttcgtgcgcactcagcattccttggctgcctgcagtttgggtttttcctttataattgagtccttgtgagctttcccccttctatatgagacggtgtctcctaaatatgtcacaagctacagccgtgaagtctcatcaacatggctgcctaagcgtgatccgaacaaggatgacaccaatagacattgttggtttttgttttgacaggaatttgctgtgtatgtagcgtaggctggcctcggatttgagatcttccagcttgtgcctcctgagtgctgggactgcaggctctggcaccaagcccacatgttatctctgcccccaactgtagtctgtaagatagataatacagtgattgtgccgaaaggtttgcctttgttagtgtagaagtaaaaattctagtgtggaactcccagcacttggaagacagaagcaagaggattttgaggccaacctgctctacatgatgagtttagggctaacctggactatgagatcgtttctaaagtttggtatgatgatgcaaatttgtaggcttaccactcatgaagccaaagcaaggaagataatcaagactgcaaggatctcctgggatacatatggagaccttgtnnnnnnnnnnnnnnnnnnnngaggtaggtaggtaaggggaaaaaggaaaaaggaaaaggaaagggagagaagaaaagaaaaagaaactagatttttgaaatagcaatgttatagtagatgagtgacattgtactttggataaaaatttacaaagcgcttctgacaatcgcctgctgtgtgcccaaggccactcaggttctcagctcaaatggtagaagcaccattttgaaaatccattggttttccagggtatctggttatatttagatagtcattttttctgctgagtatgtcctgacaatcccttatggcccatggttctttaagttatcacttgctaggctgtactgaggactctgagccagatttagtggtaccctgtaaaccccattgtttggggggattgaggcaggagaatcacaagtttaagacctgcctgggctacactaagcgagtttgagacccagtttgaaaataaatagataaggaagtaaagggatggtaactgacatcagtttagtggttatcttagggtttctgttgctatgctaaaaccctatgaccaatagcaacttggtgatgaaagaatttattccagggaccagggatttattagggcaagaactcaaggccggaacctggaggcaggagctgatgtgtaggcagtagaggggtgctgcttactggcttgcttttcatggccttctcaacctgctttcttatagcacccaggaccaccagcccaagggaggaaccacccacagtgagctaggtcctctcttagcaatcaccaaacaaaaaagatgtaccacaggcttgcccacaggctaatctggtggggacattttcttaactgaggtcccttctttcaaaactggctaattgcaataaaactagccagcatggtggtggagtgcttgcctgatatgcaggaagctctgggcttaatcctagtaccacagaaaacaagaaaaaaaaatggaggctctgggtacgtataagccattcttgggtcaagttgcctgtgggtgggggcagctttgagttcctgtggatgaatcagccactgacgcctgacactggacccagccgcagagggtaggaaacagcgttgcgcaccattacagcttctgttctttctttcagaaatttccagactcttcattctttctcatttttagattttgcgtggtttaaaagtctttctagatgaacggagaaacgcacacagttgactatgtcctgaaatggggggaaaagagaaacttggagttccaggttaggagtctcaggagctgtgaccctggtttggggtttatggggtcttggctgtgattgagagtgacccacctgcatgtgttctgctggtgtctggtggtccagggtgggtagcagagcctcagttttatcagcagcagagatggaagatttcaacacttagtatattaaggtgtctgccaagaattagagcagttggcttcctgtgtctcctctgaaggagtagtgctggtcagaagccctgcaagatgagaacgtttgcccctgggacccttctctgctgttaagtcaagggttgtcttctagaccctctgggtcacacctctcctaacatgaggatcagccgaattacaggctcaatttcaggcagagctgagcttgcatctgatgacagcaaagacctccatgtgtctttcattatcctgttgccctgggagatgctgtttaagttggcaaatgtccttactgaaagcaaagcttgtcactggtgagattactaatcccccttcccctagcccccccccccccacactcccaccccaaagggatcaaatgccaagggaaaggagggaactgtatagctttgaaaagtgtggcgaagccatcaagttcaccaggaatagtaggggtaagatgtggtttcagtttgtttactaggttcaagatgacaatatctcaataacaaacttcagaggggtgtgtatacatgtgtgtgtgtgtgtgggggggtgtggtgttgtgtggtgtgtgtgtgcgtgtgtgtatgtgtgtgctttcctgctggcattcaggtgtgtgtgtgtatgtgtgtgtgtggtgtgctgtggtgtgtgtgtgcgtgtgtgtatgtgtgtgtgctttcctgcttgcattcaggtgtgtgtgtgtgatgtgtgtgcctgtgtgtatgtgtgtgctttcctgcttgtattcagatgtgtgtgtatgtgtgtgtgctgcctgcttgcatacagatttttgcatgtgtgtggcatgtgctgcctgaatttcaaactcctagaaatcatttagaagctctagcttgttttggtcttcagttccagacttattgatagtaaatttcaagaaacttaacaaaaaaatcagactgagctttgtgatttctaggtcagaggtacccagtctttctttgcagagaagaaccattttattttactttattttttattttatttttactttttaaccttcctctgtggccttggggccaggccggttggagaaaagactaactccttcgttcacagagcagcttcagtagatacaacctcactgccatccagtggcggttggctccacaacacaggagctgacgactagacccactctttctcccaagccttttttttttttgtttgcctctgctgctcagttttctatttttttcctcctcccaatatggtacctgcactatttcctgcctccccagtggtaggaatcgaacccagaacctgcccgtgcttgatgatccccgccacctagaacttctcagcccctgcaagcagtatttgataagaaaatttgactcgggcttaaggaactgagagcaattgaatctatttaccttgccccatattcctaacagtagttcttgctatctggctccctaccctactcccccaactaggcataaagtctgtattttctccttgactgtttctgttgctttggccgaaggattaatgctcagcgggtgcatctgctcgccacacttactttaaagctagctccccatctccctttgaatttgtactttgagctgtggttgaccaatatcctagcatggttcatgacactttgcctgcatttcagttaagggttatgtgtcccataggatctgagctggcctcagagaaggagccaactagcaaatggaattattttgccttgtgaaaaattccagccttttaaaactgggctctgagaaattaaaaaaaaaaaaaaaaaaagcaaatattcttgggaagaaatggggtttgtgagtacttggctaaaaagtttaggaaaggaaagaccatttcctctggcctcaggaacacattcaatgtgaaatatgactgtttttaaaagagcccagtttaaatttattttggggttatttatttgccttgaaaaataaatggatccagtgcttataaaaaaatgttcagaatcctatttaaaataaagtgagattttgctaagttaggcaaggtgctcccagcatgtgctattaattaaaagcagctggggcttttagacgtgtttgcaagtccgcaccatgagcagagctgttggaatctggtgcacacgtttggctcactttactggagttcttcatggtagctggaacacatgcatcttgcctacctcagtggattcatagtctctcaacacttgaccaaacaggtgggacgtttcctccacaggaagagtgactgaaacagaaacatctaagccactcttgaaaagtggcgttctgtgacccccatggattgcagcattaggcctcacgcttttataaacttcattttgattttatattatgtgtggtgtatctgtgcatatgtgttttgtgtgtatgtatgtattcatgcgggtctggatgtgttgaggccagaagtcagtgccaagtgtcttttcttagtcactttctacacagacacacagacacacacactaatatttataacatgtaatataatatttatacatacctacatgtaaaatagataataatatataatatattaatatataacattaatatagatagtgtttaagtgcttgccaaacatgtatttgcacataccatatgcattcctggtgcccatggtggacagaagagggtgtctagtccccaagaactggagttacaggttgttagttgccaggtgtgctgggaattgtacctgcattctctgaaagagcagccagtgctatcagccactggccactctccagtcccactaccctatgtgcttttgacagagactctctctagctggcgctcactgatgtacctaagctagctggcgaattaactccaaggattcatctgcctctgccttacaggtaccaggattacagacaggttcttccaggcttttaaatgtgggcattggggatgccatcttggatcctggtgcttgtgtagcaaatatttcactgatgatgcaatcttctcagtcatctttctggaatctcaagagatgccaaaatgtcggccatctggtcaacagtatggtcagtaaataggaatgtgtacatttgaaagagagataaactagtattactcagtgtcagagtaaacttctgggaactcctgtgaggtccctagtcacctggtgcaaatgagctcagccaagagaagtccccaagaaagcagcaattctccccctatgtaaactcagtaggtgtttcatcgctatgtgtggtcgcttcctcttctgctgtcccctcctataggttagaaaagaaacttggaagtttactgaacagaatttcaagtcgtggatctcagattggaaaaggactgtatgggttatctttccccacctacacttcctttccttctaaaataaaaataaaataaaatcccaagaggaggaggaggaggtgtaatgttgagatgttcggttctttcccaagaggttggggcatcaccaaggtgttttcagcccaaaggctatttaacgtttaatgaaaatttcaattaagaagtgaccctgtcaagatcctaaggctaggcctatagaaatagcagttcttggattgtccagaccgagaagtgtcttagtttccagttgtaacttaagttttactgaaattcaagaaatgacacctttggaaacatttaagtattttttttaagacctataattgtgtgtggttttgctttttaagtcttaaatcttatggaatatagaggtgcagcttaactcagttgcctctagctttttttcttcttcttccacgaggcaaacaaaaacagtatcttaaattaaatcagagtttcctgaggttctggaatcttattcctaaattttccactgggtaacctccaaggccccctcttgcctgtgtccccagttgacacgagtcaggccctgactccaggaatgggttcgatgtggctctgaggcagcgtttctggggagagaacctttgaagagaataaatctagaagggcctggaacacttttagccattgggttgttagagagcacaattgttttggagcttctgagatttctaagtagatgatgaaatttaacactgtccgattttctaaaattaccagggaagcatcaatccctggttttcgtgggttctttcagtccgcatgaataggttagcaaacatctttcagcgccacacacgtggaaaactcatttgtaaagaaaaaggggcagttaatgtgctcaggaataaatacagaagtcagggccttcccaaagactggtatccattggtatccgttcttgactgccagtattggaataatttgatgatcagggtcggcctccagcgcagctccactgtctgcttcagcaacagagcagagaataccacttgttagctactgctttgtgactcttgtggaccaagagttaatggaactctgccctgcaaaataattctggagggaaatgaggccgtgacaaccgatggggctgaggaactcgtgaacacacgaaagtatggtggaagacgtgatgtgttcatgtcagccttgctgtctgtacagcattgagcctcccaggtttgctcaggccccactgtgcttcatctaaagggaggaagtcaggatgtcagggaacagccaggatctaccactccctgcaacacccaatcctgtggctgttcacggatattggaggggagagactcaaagaagtctttaaaaacaaatatctgttgattcaaaatagcacagttcaaagtaactaatggtcctagtctttttaaagatttatttatttattatatgtgagtacactgtagctgtcttcagacaccccagaagagggagtcagatctcattacggatggttgtgagccaccatgtggttgctgggaattgaactcaggactttcggaagagcagtcagtgctcttaacctctgagccatctctccagccccaaccctagtctttaagggaaacagtttgtacttgcttattagaattggttttttatttttagagtctataaactatatgtaaaaatactttgtaatgttttatatgctacaccaatttatggcttgcttattaatatttgatttgggtcaagtgagtatggttgtttatcttgatctctatgaatccattgttaggtggagcatgttgataatcttaattagactttcccaagattcctatcagtgagcagttattttcaggaaagaccgtccttcacatctttgcaatgagaagaatttggcttgatgctccatgaaaattgaccatgtcctggtgtcctgggccatttgcataccatgtttcctgcatcagtataatggatttttcttttagtgagttgaagagggtggcttttgtgtgggcaaagacagagtacctgaagcctgggactggggaggatgtgcagtgtgtgtatgtgtgtgtgtgtgtgtgtgtgtgtgtgtgtgtgtatgtgtgtgtatgtgtgtgtgtgtatgtgtgtgtgtgtgtgtgtgtgtgtgtgtgtgtgtgtgtgtgtgtgtgtttgtgtgtgtgtatgtcggggggaagcatcggcaagttaagaaagggttaggaaaggaagggcagctgctcggcaagcatacgcctcgtgctcttctgtcccctagtatcttcttactgaatcgcagtgcattcactgggacttttgtaccttcgtgacttcagatttcaggggaggtggtatgttgggacctatcttgcattatagagcatcatcaggtatggccactgtagggagaggtcagaagtacatcatagaggcttcttgcacatcgctatgctaggtgccgtagaaagctggcatgatgggtggtctggaccgaggtgggagcaagtccagattactgcgacatctgggcttttcctaacctctctctagcatcttgagttaaaggagcaagtaacagatttgggaacttagagaaataacagacaggcagacctaagaaagttcccttaaactttacccttcccttaaactttaccctttctgtctaatggaaagatagctgacatgacggagtaaccatgaacttgacccctttccctggcttaatgcagtcatggcagccagttggcacatttcctgttctgggtgtaaaacactctgaatgtgttatctgtttgctgatgcttttatatgtatgttgcctgcaaagttatagtcttcctttgtcagataatttttccagagtacattaacatttccaaccaatcatttattgtatagcttaaaaaaaaccaaactagaactgtcatttctgagggagactccgtatctaatatctggtccctgctctgtgttaactgcttgttcacgcatgcattgtgtgcagcatctgttacccaggaagtgacatttccgagggagattcccctgtggaaaacataactttcccattctcttgctgcttttccagaataattttttttccttttttaatttggtgggttttggtaatttgtaatacgtggtctaagatggaaactgtctgcaactctagtctctgttacccgctccccaccaccaacaccttgcaatgaaaaagaacaaaagctactcacgtgtttaaagaaaactctcttctgggcccaaacgattaaaggctatttgcattatgaaactcgttgtgctttttataagtgttaggtgctgggttgaaggtccacaggccacttctaagttgggttttaggagtcacttcatgcaggaagacagctttgcagcttaaggaatggctgcatggctcagccattctctgtcatcattcttatccgaagtgtgcagctcagacttaagactgtaaccaccacccttgaaaaatagttccatgtcttcataagaatgaggtcattaacccgaatgctctataaagactgaattggtgacaactgtactactaaaatgtataccattggaccatcttatcaagaagaaactcagttctataaggagcctgcttctgtctctaatattggtagatatttctacctcgaccccttttatattataacttctgtccatttgtctttcagccaatatgggacatgttaataacccctaatttaataaatgaaattattcctgctcatattgtccagatgtgaacctaagcagaccgtgtgggctttctgacttaatggctaagcgatgccagtctttccctggtaattgaaccttctgtcatctgcagttagcagatgatggtctcgaagcaggaggcacacagtcaaacttcctgttcgtttaaagggaagccagggacagatggagaagcgtcagatgcaagaaccttactaatcacaccgtttcagtagagccctgctcatgtcctgctctcacgctggacactatgacaaactccgagatagctggaaacccaacaggtttttggcttgtgtcaaatgctgtgggtgttcccagctccactcagctcagcccaaatgcctttccaggagggcagagccatcttgaataaccccagtaaaagtgtgcctgcttactcgatcctcttggaacactatggtatagttcatttgtttgtcttaatagtttttattttgaaatgaatacatcccccagatgaccaaagccacacagaagaagatcggaagactgtttgaaagagcactgctgtctacccagttctgagtctaccagtcttgtgtcacagcctgctggcaggtccttgctctgtgctgacattgttccaagtgtgactagggcgggcaagaatgaccgtaaaagttttggttaattcattttctgttttacatttataagagtaagtgcaggatgcatgtcaggaaacttgattccacgcctccttctgttcagagcccctgttgcagggccctgtgacttgtttctgtcccagtctgaagtccacatggtggctgtgtcatgtattctgcgtgatttcatctaagatctggcattttccccttccaaagtgaatggtcagttgggaaaggagagaactgtgcccaagctgctctcacaagcactcttgtggtttttaagagtgaggagggatgtgtgtcgagtcgctatgatggggcttgcttccattggacagccagcaatcagatatgctatgcatttaatggtggactctcttaggaaagaagactatgttctgtaaaggccagaccaggcaaggagcagttctcacttcctgagtccgttctctggccacagaaccactaataatgttgccatctggctctggacagtccattgatgaagtacttacttagtacatggggagtcccttgaattgaatgctggttctggctggtttggttgtgtgagactgaacaaattctttatctgggtctccggtctgcccacctcctcataaagatgggatgatggcagagccctcctcacggtgttgtggacaattgtatttggaaatttcagtacacccactcaagtccagaatgtagcacatattaaatcatcatcatgttggccacgacgatgacgacgatgacgacgacagtctttgtacccacagttcagatgctctggccttagtgcattgtctctgatcttgtgtggaacgggattattttcccataaccacattttaaaaaacatagttttctgaagaatgaaatgactgaatggtaacacacacacacacatacacacacacacacacacacacacacaccccagtaataacctgtggtgggagcagagtgggctcctcagactaagccacctgtccctgtcctgtcattgactgactgtagtagttcacaggcagatttgttcccccacccttttctcagagtcctatagtgctgtgcatgcattgctcagaattccaaaaccatcaaaggaggttactttgacagatgactcagaagtagggaagagtgaggactggaaagagaagccctcctagagccttaacctctttgcgggggggggggggggggggcaaggggaacttgacagggcaaactttacaaggtaagacaatgaaaacaacaacaattctaggatgtcctactccttggtagaaggtctctcactcggcacgcttcctnnnnnnnnnnnnnnnnnnnnnnnnnnnnnnnnnnnnnnnnnnnnnnnnnnnnnnnnnnnnnnnnnnnnnnnnnnnnnnnnnnnnnnnnnnnnnnnnnnnnnnnnnnnnnnnnnnnnnnnnnnnccacatggcccgttgtcttctgcgaggtccatgttcagaggtcaccggaagctcttcagtcttttttattctagcagagtgaaaatgaatacttaatttgcaaagcctgctttaagccccacaccttaggttcagaaggataggtcattgtaaccagacgatgtgtcagtgactcctaccaccctctcactttctaatgttttgcacacacatttgaaggaacctgtgcttgctgatgccagccatccctaacacgtgattgacagggtttcggtagcatggcagcagagaacactttttggatattttctttagttacatttcaaatgttttcccctttccaggtctcccctttggaaacccccctatcccattcccccttctcctgtctctatgagggtgcgccccccccaactctcgacctcccgccctggcttcccttacactggggcattgaacaccctcaggcccaagggctgctcctcccactgatgtccaacaaggccatcctctgccacatatgcagccagagctatgggtccctccatgtgtattctttggtagttggtccagtcaccaggagctccggggtgactggcctgttgacactgttgctccctatacggggcggcaaaccccctcagctccttcagtcccttctccaactcctccatcagggaggggaccccccacgctcagtccaatcaaccattggctgctaaatccacctgaaaggtgtaaatttaatactttcctatttagctatgtttccaactcccccctagagtttaagaactagaagcagtttaatatggctggtcttattaatcctattaatctttgacaatttctctcagctgcaccgcgaggatcccgagatactggatatttagttcaaagttccctgactctcactgcccatagagaaaccaggaacagctcaagcatgttcctcctcttttggatccccctcccccccttttcttttctagatatagtgacagttgtgcctagaagaggatctagtcatacaaaacataaaactcacagagaggccacggctggcttttaacccctctctggttttcctaagtggcttcaatgagcatgtctttacaaggctgttgcaaaagcgaccagcaggcggagccctaacgcagtcttacaatgatttcttttcacttctccccttgaacgaagttgcccaagcgctattggagccaattgaaaacatctgttgttttatttatagctacaatttctaagaagcatattctatagcggttgaaaaaggagttgacagctcataattcataaagttactggggctaatctgatagaacaaaatgtacaaaactccttcccatggtgcaggcgctatcacttcctgttcaaccctacaaagaagtagtggctaagcggggcggaaggggaacacagaaagggtcctctgtgagatgctaatggcagaagagagcaccccacagcgagggcagtgccttcccctctgccaggctgagtcactggttctttttcattaacaacatcccaggtatttccatttatagaaaatcagcattttcccaccaatcccactttgcagccaggaagtttcagctgcgtcctgtctgcaggagtaggagctaaggtgttgattaaaaagcctgactggttgccacccagatgggcggcaggcttattttacaacttttcattcagcaggttgctcctttatattgagttgcctacttcacgctcccccccccgccccccagacctttaagcaattattacgacacaagcactcctcaaatgtcatctccctgtttgttagcttattctgagaatctttggcggaacaaggtcagatgcaatcaatatatacttaatattttgcgacagttctatctacagtgcttcctggtattgcagttaagggaaaaaaaaagttagcctgacataaatgagttgccatagcttagtactagttccaactggcggtgcttgtaagagactgtactgagacagtccatcttgcttcagtgggcccatttaacgttcttaaagccaaggtcacttctttagtgaagaggtgggtaagtttgtgttcatttatttgatgaatgtggtgtcttttgatagaggaaaatgtgttcgcccaccagaattaattgcccgcgcggaacagtagtagtaaagacatattgcttgacttctttcaaaccatgacccttcacaccattaaggctgtgtttacctttatctcaagatcatttgcctttattctgtggaataaagctttctgcctgtgtcttttttttttttaattaaggggttttgttaatgaataactctgactgttacaacctcagtttctcatgtatttctcgaattttattgtgaattttccattcagtatttttgagtcattcatctttcttgcccatcccatatgcaatccatctttctcttcttcttcttcttcctctgatattctagtctccatatattttgttgtggttatttatttttacacgtatgggtgttttgtgtgggtgccgtgtgcatgtcctgccttcagaagccacaagtcgtcactggatctcctgggactggagttagccattgtgaactgctgtgcgggcactgacaatcgatcctgagtcctttggaagggcagctaatgctcatacccaccagtgcccaggtctttactggacctttcttccacctgatgactcacagtgagcccttcatagtttgccaaatatgataagttggccagttatttttagctgaataaacccagtgacattcctgaggaagaatgtgcttagtttagccttatgagaaaaatatttaataaatgctgtcccaaaaatatttagcctggcaggggctcaggcctgataaaggagaagtgatggtaagatgctgacccaccaatcccagcccgacttgaacaaacatgcttcttgtcaccaaggcccgtacgtgttgccaggatcgtttatatccatcttattcaaagctttttgcagcctctgttcttggctgggtaacctccagcgcgcaccaagtgggcctcccaagaaagcaaactggatccattcagattagtttgccacttaactgctgtactaactttgggcaaatcacgtcgttattttaaatcttccttttcctcatctgtaaaatggggataattatacggcctcccaagctcttaggggtttgagagtgaaagacaaggggcttctcacctctagtcatggtaactgggctccactgcatctccaatgccccatttccacagtctctccaaaccacacatccaaaccaaggagtcttgcccttagccagaacttcgggacctcagtcaagttgtgactctcgagatgcaccaaacaacaagggtctctgcccccaatatctgttgatatgacattaggtaggatatccaacttaatcactgagacagggagaccttctacttagttccatctgctgcgtaacacaaggtgttttgcggagtttcactgtaaaaccagcctttgaaaccaagcacagctagggaacagctatcagtattctggctcctggcgtccttttctctttatagctggaggaacactcatcctcaattcttgctccttgaaagttgtggtctgagatctcgaagcatgggtatcaatcacttgctcagctggaattattgataagtacctgaaaccttatacagcaaccctctttcttcatcactgtcagaaacattcttacccatagaggtgttttctaaatacttaaaagagtttgctactgactttctagacaaaggaagttttttgttttgttttgttttgctttgttttcactttaggtgtggatcttgatacatgagctcaggttaccataaaaccttagtaaactctggtaatttggtaaagacctggtaaggaagccttatgcctccttccacagatcctcctctggaaagtgtgagaccactgctctcattatgaaggaccccccccccccatacacacacacacacacacacacacacacacacacacaaacctcatttaaactcaataatcttccagaggctgtctcttgagtatcctcactttaggggcagagggtggtacctcaaaggacttcaacatatgatttatgggaaacacaatatagtccaaggcaactgaatcacatcccttaccttgaaatgtaccataaaaataattacagataacatttatgacaaaatattaattgttgggtctaggtggagtatagccaggcattcaagttttcagtatatttttaaatgtcagagaaaagtaatggctgactaggatggggtctggtgattctctgttgcctctgatgtccatccagcctttcttaaaactctcagcattgttcatctgaaccagtttactgctttggcagctcctcctcctcaaattctgtcctccgttggccagcatttgcttctgcctgatcagtgggtttgccagctgagatcagacatcttcctggcctctggggtcaccatgttaactttccagtcccttccatctcctctaattgcatctggggcttctcaaactcctcctatgatctggcttcattggagcatttgtaacacgtttttatacatttgatggtgaggtttagtatcaaatgtatataggagagatgtgagcattgcgtccagccctcgctcaccttgttctgcaaggtgttcctacttccatctgctatgaacaggggtgcccactgctccactgtgtgtacccctgattacctgtatatcaaaacagtgtgagaatggaagagaatacatctgctgtctaacttgggggcaggagatacataagcggatgctgctgttgaggtggcttttcttgaacccaccagtacttggccattgcctgatgggaatgaggatcacatgtcttctgtattacatgacattcttactgcagttaccactgaaatttgggaaccttgaaattttgggaaacatcatagcaaacatgtccaaaccagggactgatgaagagaaaactggcccatgctaagcacatacacactacttaggagcttatgacatggaccaagtggcttaatttctcaacttctgtttccttgtctttacatcaaaaaaacaataaagactatacatctttgagctggtatgaaaaaagaaaaaagagcatacatgttaaaaggtgtggggacatttagctggtgccattaacactccttccttcatgcattcaacaaagagccaagtgccaccacgagaacatatgtgaaatgtgatttttttttctcttactccccacttccacctccccattctttcttttaggggttatctaagtcatgcttcaaatgaaatctttctaagccaacagaccaaaggaccaacttccttataaatcactggcctttgaaattccttggactcaactataaattattttcttgctaggaaatgggggtggggggctcactctcttccctatttacctcctgctcagcattttaattcgctgtgcacagtaagttgtcatctttacatcacattccaatttaggtgataaagatcacaattaattagcttgcctgtcaaagattaagtgtaaccttgcccttctgtatcctgaagtcactttatggctttagtagaggccgtcaggcaaagctgtgcacctgcatatacttcctaagacctctgcctgctgtttgtttctgaggctgacctagaagccagtctagaaataagattaagtggacatagactcctattctcttctgacttgtggagcaaaaaaaagatgaggcaggggatgaacttggagatgttgagaagtaaggagtgtaggatacctgcaaggactctcaggcgtcagttcaaatctgttagccgcctgaaaatgtcagtgttactagtaaccctagttacctcagaaaacagtggttacacctgaaaatttactttcacatcaactcccatatttcactgcccatccttgcgtcttcattctccaaagcaaaacctagttcacttgtggaagcttaatagaatttatcacacaatcattccaacttagtttatccttcagattcagagacttgaagtcaaataacttacagactagtgttatggtccttattaggagacaatatgataagttcaaaatagtataatatttgagttaacttctgaaaagatactgagtattatttatagagtgagaagcaaaacgttaataactactctgtcagatacgcttcaagctcctctccttaagaagtactaggaaaactgacctaatattatatagagagtctacttttaaattttgtcatcgtgaatgaatatcgaaaaaaatcttttaatggagcagggaagattgcccagtagttaagagtactggctactctttcagaggacccacactcagttcccagcacccacgtggcagctacaactatcaataactacagttctaggggattcagtgccctcttctggcctccttgggcacctggggaacatgtggttcatgtagagacatgcagacagacattactagatgtaaaaatgaaaccttttaaatctattaatcattctgggattaatgattgtctttctacaccctgggtactttgtccactaactcatataattactcccattttacagaaaacaaaaaaaaaaaaacaaaaaaaaaaacctcaggtctaaagtcaattaacttgtccaagattactgttcttaagtggtaccccaaggatggaaacacacgtctctttgtgcttttaatcatgtcagcactactgatgaaaccagtgtgtaccaaaatgaacaaacccatggtttatttttctactttgtttttgattcttagtcttactgtcttgcccaaagagcgcaccagcttttgatgtggcttgcagcccacagagcttaagaagtttgaagtccagggtattagctgttataggtagacagtatgaacgtgcttacagcgtttgtttaagaaaagaattggggttgctttgatttgtgtccactattttttttcccctcttttgaagtcactagagaagattggtacagacagaaagaaagcttggattcagcaagtcagtagacacgttaacatcttgacttaatatcgatcccccatttgcatatatcctttctttcctgtgtagtccatgttagattttgagtggaaacgaggaacttttcacacacttccaagccgcttccattaggaatgaaatacttggcttgggcagtctctgcgttttgatgtttccgcttaaactttccactcgctcctgccaggcactaactttaaaatgtctttttcttttcttttaattttttttttttaatggagaacgcctccaggagctgcagctgtgtgttggtttcatcttgcacttggtagcgctggcaccacttagagcacagaatgctcctatctcccacacacctctggtgcccaggagtgttgaggcttgcccacttcagtagtctgggaagggcttcaggttggagagaggttctcttctgttctgtgattggctgtccccagggtccgcagaaagagcaaacagaacatgctgcctccaacgtcgcatgagtaatttcttctatgacctggggctcctggttcaccggagttcttgtaagtgtggaaggctagcctacctgccttccttagcaattagacatactagtttagactcactcttctcagacctttcgactcttcttcctttgttttctttttcctttttccttgcacaacattaactttttctgatgaaaaatgatttggctaagtgagagactgggcttgggtgtgtcaggaaatctacagatacttccagatgcggaagaaggattgtagctctgcagcccttagacaacgcagtagggcaagcttccaaccccaagtgcattctgattcagaagcagactgtctggagaattgcatcgaatggaatgtatatgtaaaatggaaatgttcagcctgctaatttgggttttgcttggcagccccaacctgtatattctgtagggttttttgtttgtttgtttgtttgtttgtttgtttttattgaaatttttggtaccattttgttttatcagagtttgatttgatgcttcatcatggacagggaacagttagcctgttagtcatccctagctacttacttcctgctggaatcacttacgatgaaatctacggacagaaatataggtcttacatgtgtatttaatggggttagagaatagttaggcttagaattgttgtaagaaagtaacacttgttttagagtgctgtttagaattccagggatggtccccattgtctaaagcaggcaatcggaacggccgtagcatccaagcctgaatatttctgagaggaagcgtgccgagtgagagaccttctaccaaggagtaggacatcctagaattgttgttgttttcattgtcttaccttgtaaagtttgccctgtcaagttccccttgcgcaatctccatcagctgttgtgagtcatacctttgcccaatctagcttcttcggtattaaaaaattcagctgggtatctcctcgatacggcacaaaaaaggagaactcttcctccccctctatgtgcacagtgctttgaaaaggccagtgttctcactacagtggctttcagagacctcatctagcagtagtctagttgtgagatggagacactctgtagctcaggatattgatttttgttttttgttttttttttcagctgaagtagaggaagatagaaacctcctgtgtgtgcaagcacttgcccagccagcaactgttgggtgcatatttcaataatagttacatgaaatttttaattatcatttaatttagtttttatatttgcccatggaaatgatcgagttgataagattttggaaagagataaactttattaagcaattccgatctctgtgccagtgggttttttttttttttttccgatgaaaaatgcttgtgttacatgtgaaggggagaggacttgaggattagttatgtgagtgcggtaggggtgtgtgtctctactacttacccttgggtttgggatttgggctgtgctgaggcttgttagcaggaagaccctgtactgaatcctgatgggtagctcttctctttgtcttcagtttcttctgtacatatgtatgtggacaggatgaccttcattttgttccatgtagaagggaaggtatttgtgggagaggatactgctgtgagctgaaactctgaagtcaagggaagtggtttaaagtttatcaaaggaaatgaaatggtttgccctttgcagctgttgctgctggtgtgtgtgtgtgcgtgcgtgtatgtgtctatgtgtgtgtggtatgtgtgtatgtgtcttttgcatgtttgccttcttctagccaaggtcttttgttaggagatagcccaggctgtctcttaccttgtaaccttccagctgtagcctcccaagtgctggattacagtcctgcactgccattatcagtgctgatccttagtacttacaatgggtttagttaggaattttcttaacatcatatacaacttataatatttgcagcgctgaaacctaattatgaccatttagtgtttctaggagtatatgaactgtctgttctagctaattataaacacctgaacttatgcattaatgacagacaagttactcctgaagatgtcgtcattaagattcacaacctgtattttggagtttgagaaatttaaggtgaaatgtttagctccctcttctggcatagttttgaaaactacttttacttcagccacccccaccccctttctgaataagaacatggtcatcactgtaatgttgtcagagggaggcatttgagattgtcatcctatttgatcgtttgtattgttgccattggtaaaatattcacataacatatgaagacacagcatatcacaatacttggttaagagcatttgttgctcttacagaggatccaggtttagttccctgcacccacatctgtaactccagttccagggaatctaatgcattgtctttcctcaaaagtaccaggcacacaagtggtgcatatacatcatatacataaatgccagcagaacactcatacacataatatgaaataaatcttaaaaccatttgaagtctctcttttcctacccatatatatatatatatatatatatatatatgtatacacacacacaaatatatatatatgtatatatataaatatatacacacacatacacacatatgtgtgtgcgcgcacgtgtgtgtgtgtgtgtgtgtgtgtgtgtgtgtgtatgtgtgtgtatgcatgcatatgcaagcaaagatttttgacaacatttacacaggggctaaatttgctgttgggtggccagtggtcatttgtgttggcttgcagtgataccttggcattgatagaactcagtgcaagggcacaaaagaacaccaagctactaggaagtcagatatatcagttatggaccatgtaccatggtaacagcctatctcaagattttatctagtctcgcctacctgagcaacagttctttcataataatgtagaagccagacttgctttcagagtctctggacttcccctggttgtgttcaggacatggggctgaagcatcatctctttattctccctgaacatgcaagctctaggctagcctggagctcctccacctaggcccagcctgtactccgaggtgccctaacatagggcagtctgtccttggaaagatgccccagaggggagaacatcagaagcccgttgctaggggattctgggattcttggtgagcattcagagagttctctctggaaggaaacaacacatatgtctctggggccccagcactgtgcagcctggcataggaatccctttaggagactccagtttcctatggttgggaataattaaattacttgtatttaactattcttcattgtgtttgaatgcgcttgactgccttgcatgaaacctaatgttggaaatctttctctttcagcgttgccccttcctgacctggccgagcagtttgcccctcctgatgttgccccgcctctccttataaagctcctggaagccattgagaagaaaggtaaccagacttcttacaagttttatttcatgactgttataatttataagtatctctgggccactcgttatatgactgtcttactaactgctgtggatagaggctatgttatccacgcactagttgtatggggaatctgtactgggaagaaatcctggctaataatttctaactctaggtcagtgagtagttctcaactttcttaatgctgagaccctttaataccgttgtagtgatatccaaccataaaattattttcattgcctcttcatgactgtagttttgcttgtgctatgaatcatattgtaaatatctatgtcttcctatggtcttaggcaacacccaccaaagtggtcgtgttctacaggtagagaaccactgttcaaaaactaatatgtgcttactatgtgagagctattcaattctttataatttaataaagatgattattaagatcctgctctttaatagtccactggatttgccaaaattattgacataccagataaaattaattgttgaggttggcttccgagaatatttagtacacatctagaatagatagcggatggaaattggaatgtccctctggcagcaggctcacaggttctcctgagagctgtgttttgcatacatggtctgttttgtgtcctaggactggaatgttcgactctatacagaacacaaagctccagcaaccctgcagaattacgacagcttcttgattgtggtgagtgtcacgggactattataaatgaggataaagtttctgtttctgatgatgtacctcacccccattcatacagcactgtaaatctcaaagggatttccaactcacatgcaggagttccttctgccccattacattagcatccacaccttagccatagggcttctgagttgggactggaatataagctctcaaccctttccacatacacaagcccctgggttgagcaggaattgcagaaacagccttttttggcatttacctgactctgtgtctctgtcattgtccctgagccttgcttgtcagccacatctcattcatttgggtcagccaaaaagattctaaaagtctgtgtcatttaacgaatgtctcctggtgtcctcttaccctttcctgtctctctttccctcccacctggcttgctggctgtcttgctcacctgctcactttttcccaccctgtacacattgaggagcatggcatcgggtgctttcttcagtaatgtaccgataaccctgcactctgcagagagaaagtaccaggttagtgttgagttatccctactgtgctggctttcaggatgactaacatgccattgaacgtggaattaggagaaattgagaacatttggcctcctgaaccagcaccaggcaagccagctccgacacaccattacttaggagacaccaattcattctgccaaatggtggcttcgtatggcttcctcttttccttttccatataggataaagtagtacaacttaccctggctgccttccttctcatgccagcttctctctctcaagcccttcgtcccttcacagtattctgtccctttctgtttctttcttggagctttctaccatgcatcctttacccacgtttgtagatttaaatgaaagagttgcatttgctgctgttcttattctgggcaaggttctgtcaaaaccctgctcgaatggggctgcccacgtgaccctcacaaggtaaccctttgaagagagaagccacttcgggattaggcaactcagggaatttctacaaaaggtgtttcttagaggaaagatcgagactagatgcttatcagtgcttgctttcacttgaagcaaacccaaccaagtgtctgaactcgggtccctcgtgtgccttgaactcagctgagcatgcacagggagggctgcattgcttttttgtgtgccccgtgctcttaccaactgggccactggaagctgacgggcaggagccttactggagtggtaaggaaacgctgaattttgctctctgccaattaaaatagaattacatgttttggttacaaaaaaggggggggggtgttgtgaaattgaacacatgctaaaagtcacaggaaacgtaaagacaccagaaactaatgaaactatgaaaagttgtggttaaggttttaatgttaccaatacaaaaaacgatccgggttagctttggaaaaagtttttgctttttttcacaccactcatgagatggcgtaaaccaccaagattcgctcacgtcagtcatgcattttgacaactttccttccccattgacatcaaaagccacatgcagaaaactggtacacgttcctagcgaagaaagagcaaaccttatccaaacttgggagcttgcacatctgccagagtgtctccgggtggtggccttttcagtccatgaagctattagagtatccatggaagcctcagtttcacctgacagatgctggctttcaaatacccatataaatttgcagtgccagccagccagaggtgggcagccacctgcttttcctcgcccttttacagcatctcatgttaacttgatgctgctgctgctagtgactcttaagtctccagcaacaaaagccccgattaagcaaattcttttaacaggatttagtggtaaattagcaaagttgtgatttatatccagattagattagtctggttgtcccagccttcctctcaccttcctcattttaccctaaaacatttttttgttgttgttgttgttgttattttacttgagttttaatggtctgaattttctcctgacaccttttggtttctcttaacttgagtacggcttcttcaacctggcgctctgactgtgttctgccgatcaagagtggaagaatatcatgctcactgcagggtatttagccacatccctagcctctacccaccgggtgccagtagcatccacccccagtcatgacagtcaagaacagtctccaaatagtgccagactcttcctactctacccccacgccctgggaaccactaaaccagatagagatcaacctgtggctggctgggggttgggggggtgggacttccccggggaactagagtagtgaagcattaaaggaactggttacccatcagtagtttggtgaggagtgaagtgagggaccaatacctcttagctgtgggtagcgaagagctgcccggtggtattaattcagaaagggaaccatgtattgcacatgtcagaaaacccagggcatgggagaagtcacaaaaaaataataaataaaaccaagtgtactctattgtcaactcccgtggatttatacacatggggaatttatcccaagacttgtgaagcataatttcattcaaacactgtgaagactccaaggaccgggcttcctagattcttcataaggtctcggaagtgagcacctcccaagggctccagacctcatctatttaccacagctcttgcgttggctgctgagcaaggccggaagagcaggggagaggcacactctgtccttgaggccccctaagtgtgatgtgagattcataaaacatacaaactgcttgccaggtgtcctagtgaaggcattgctcatcagcccctgcaggaaggagcactaaggggatgatgcctgagagaggaacatgggactgcaacacctttaagtctacacacgtctcctaatgggtgccacatatatttttcaggatgagcaagtttcgagataccccttttcaaggcagagagacgagacatgaggcatacaagggccacgtctagaggagccagaaacctcagatgctcatataatcttaattggcattacatcatttcacaaataattgctcagtttcaggctagatcctttatgcaaaggcccagcagggcctgtgcacctttgttagcatgtgctctgtggtcttgttagctctctagggtattgaagttatcttcttaggtcttacctcttacagtttttccttgacctggcctatgtacatttatactaggctgtggtgtcacagtctcagacatctggctacttagtgggacaaggtttgcttaatgggatgatgtgcccaaagactttctgtaccgcagtctcaccccagattcccatagcttctcagtttggaggtcacttcccataaagggatgggtaacctcatgtagtggtcataaagaagttgacaacactaaaggtttctgagctaagatttaagtcagacatgtaacactctaagatgttttttggccagattgacacacgcatcgcacttcactttcgctagccttagttctgaacatacaacattcatgcttctcactgtgtatgggggtccatgttgtcaggccacttgcacctaagctcagattcaacactattgtatgttatggattatctacacagagattcctgccccatagaaacagtgtgaccgaactatagaagactttgacgtgaatctttcatcctcaacatgtctatcttaggatgtttgtatacagacacacacatacacatatatgcacatacacaaatattaatatgtctttggattgaattatataaagatgtttgatcgtaaaaattgttctttgggtttcttttttttaaaaaaaaaaaaagttaaataaattttgggctggaatcattaggaaagaatttccagaagtatttggaatggcccttgacgtataattccgtcatttagtatcatggatttatacaaagcgacgtcccagcattgacaatttttaagtcaacattgattacctccaaaagcactgaagatgctctgtatctcgaagcatcaaatactcagctaagatttactaccgcataagaataaacaaagaaatctctaattaatatgcaaattagctttcacctttaatcaatgataaaagttatatgtgttcctagcaattctggtaaaataaactgctttataatttcattaagtatttgctttgtatgcctgttttatgtacctaactatttgggatcatatacaaatttcctgggtacaaagagatcatgaatgggcaaaggtttttttgtttgtttgtttgtttgcttgcttgtttttaattgaatggggcaagtttaaggagcctgctttgcactatcatctttagttcgaggataacctaaatactgtcctcgccttacgtagaagcatcttaaagtgactctggcatttctcatctcccagacactgcctgaatcagctacacactaggttatatctttatattatcttgctccgtatatctccttggcagcagaacccccagtgccttagtgaaggcaggagaatgagtaatgtcaggtcctccttctgagcacactgttccccagataaggtcccatcaccaaatgcctctcttctatggatatcctggatccttcttgctctcggtacacctgcttcctattggccctcatttcctgtcccatcccaaggactgaactatgcacacctcccgtgtacaggaaagtactttaggttacccttggctgaatggcgtggcctccttactagccgatgggaaagctgctccttttctctttcttcccagctagtttgatgctcacagattagaaaggagcagcattaggggaggcattctgagcctgttcagattgctcagtaggtaatctggaaatggtttgctcttctgagactattcaaattgttctgtaggtaatctggaacttgtttgctaaaagcctgtagtatctagatgttcggttgatcactctgttagggttatatttcacgcagccttcatcagttaagatttgggaaaaccagggctggagagatggctcagtggtcaagagcaccaactgctcttccagaggtcctgagttcaaatcccagcaaccacctggtgactaacaaccatctgtaatgggatctgatgccctcttctggtgtgtctgaagacagctacagtgtactcatataaataaaataaataaatcttaaaaaaaaaaaaaaagatttgggaaaacctggggcttctcttcttcctgtagtggttcgaggagacgctgattgtatggtgagctatttccaggacagagcctcctcagccacagcagaaccactccagaaaactgaataaaatgtatttctcgcacagcctcacaggctggaaatccaagatgatgaaggtttaggccttgttcgcttcctttgagattccctttctaggctccccaacagccgcctctcagtgtgtctttctgaggcctttcctctgttcccgtagtccctgtgtctgtgtctgtgtctgtgtctgtgtctgtgtctgtgtctgtgtctgtgtctgtgtctttgtcttttttttataatgatgccagttagcggtcttagggtccactctaataaccttgtttaatcaaatcaccccttacaggatctctctctaaaccgtgttctttctggaaaactgggcctttgacttttaatacaggcatggagaggatgccaccttagcagtgcagagtattaactgatcagtaacagtggcatatttttgttgttgttgttgttgttgccccaagacatatgggattaacgtgatagttaaaggcggattgtgagacagaactccatgaggaaaagctgttctgtcccaacttcaggaatgaaacagtggtcagtgtgccatgcttctgttctgcatcgctcccttccctgtgtctcgtttaagtcccacacttggaaaactggcccaacagaaagtctgagtgcctcttacatggtttcttacattgtttctcttccagatgccgcgtcagtggacttggagatgatcgacgtacacgtcttagcagatgctttcaaacgctatctcgccgacttaccaaatcctgtcattcctgtagctgtttacaatgagatgatgtctttagcccaaggttggttctctcttttcagacctctcggaatggatactgggatgtaggtatacttggcactctaggaggcgccaacggccctgtataagtaggaggtgttgagaaaacactaaactgccaccccagatctcctttaccacacagcatctgatagaagacaccctattgtgtttgctcagaagcctgcccaagtgagaaactggctaactgttaactttttgatcactctctgcaaagaccactgcagctaggcaggccacagccatctagcaccggattcggagatccagtactagagtgcacgatggggcatatttttgccctcttccctgaacacccagaacaaaatgtgtcgagggtggaagactcagcatcgggagccgaggctctgctcagtgctttggggacaggaaattgtggtccgtgaccttcaaagtataacctgtgctacttatctgatgatccgaggaagtagccaatcacgcttggtgctgcctgatggaggccaggcttctgagagcacacccagaacagtctgtgggtttttttttttttttttttttttttttttttacaaaaagagttgtcttgtatttcatttgacctgagaactttactttctcacaatgcatttcttactaagaaggacaaatgtcctaggtacctttcctgaagatgtctgtgtgcacctcctcgtgtagctaagggagagagaagaaatggtcaaagcgttggctcaccggcacctacacctagccttactctgtttcctgttttgttttgttttgaacctgcagaactacagagccctgaagactgcatccagctgttgaagaagctcattagattgcctaatatacctcatcagtgttggcttacgcttcagtatttgctcaagcattttttcaagctctctcaagcctccagcaaaaaccttttgaatgcaagagtcctctctgagattttcagccccgtgcttttcagatttccagccgccaggtaagtgaaggatgaaaagaaggttcggacggtatgggtgagagctgatgagtggccctaaattgatgcctcacagatgcacgttttctggggacttacttcacacacatcaataggatgtagatgaatgaaaagagaattacttttagaaatgatggttctcacaaaatgctctttgttgcagctctgataatactgaacacctcataaaagcgatagagattttaatctcaacggaatggaatgagagacagccagcaccaggtaaggctctgcaacatttgacattcacttccggctcagcttttttggaccttgaaatcggtggtttctagctccttggaattaacacagatctctgcaatccatagtaatatgctaatttatggttcatggaaaaataacagtggtggtatttgtgaaatgtcatatgtcgggttttgcaggttttaagctaccttggttttacttttttattttttatttttatttaatttactagcttgatacaaggtctcaccatgtagtccaggctggccttgagctcactttgtagcagaggttagccttgacctcaagattccttcatgtctccatctttttgtctcagatgagaatagagagagctccctgggccttccaccacttaggcttcgggctgctgaataaatttatggagtttgttgcagctgttgacattttgttgttgttgttgttgtttttccaaatcttacaaagtagggggatttataattactatataatttaaagtattttggagtgtgtgctttggaagtgactataccaagaaatgtctgtcaaaataaacattttcagtaacgcaggcggtatgaaagcagtgttctgctggggctgtttagaccaagccagatgccattctaaaagcaggtgggccttcagctagccatttaagtccaggaagttcaggaagcaggaagagcctggaccaaagagttcaaacaacctgtgatccagtagcagttagcttactgggctggccttttagattgattgtcagcccttagcaggagagcatagttgcagggccaagagataagttctgcttgtactcctcctcggtgccaggcttttcaatggagtaccctgcttcttctatctgtgatgggtaactcacgaagattagcaccgctgtgtgagcagccagggggtcagagcatcctaccgtgcgtttctgtctgtcattgcaaggtcagctgtggctctttgcatctggatgagacagcttgagagaggtcaggtcttgggctcaaaacatggatgagcacccaggatgcaggacctggaaagaggttctgtggactggctcaaaatatggtacctagagatgatggatgaatggtatattccaaaagttccaaaccacagcagacagcatttaaccagggtgcccagagctatagacagtgcatcaaggaacctcagcctagcttgggatttgaggccaagggcatcaccccatatgatcctgagtttactagagaatggattcaggagtgttgggttatccttgggagctgcttttgaccttaacggggaagaaagagtgtggaggcatggatgtggctgtgagctatagagattgcctaccctgagactcaccacacaggctaggaaggaagaggggcaccaagaatattcaggccctgagccaaaggcctgagctgcaaatgttcacttcctcctgcttgcctttggctgtttgtcggagaggaggcacagctgagctttgtgtgccctgaagggcttgggatggtgccgagtcgggtgtggggaatctgacgagctggtcatcatggtcttcttaatggcactctctggcctcattggggaatatacatggaagcccaaagccagacaggactttcacaaatgaattgattactaagggcttatttgtctggggaggggggagttcaccactgtagtttaatacaaatggattaaatgtcttttgtaaggttgacttataagagtaagcacgtatcatcagtatccattttcatactgcggctgatacacagaagagggctacagtgccctgcatagacgcttgtatactaatttcaaaggaggattagttccgtcagctcggccgaggaatgacggatttgaacggactggattgtcccagtccttgtgcggcttcttcaaaagagagagagaagagaaaaagaattaaatccaagtaattcttaagccctatgcgagccattttcacttcatgcggtatttctcagccacgatgagcactgtataggccccgtgggaccaaatggatgcttcagtgtctctcacctgtgcaaacatttcactctccacctacaagagggtaaaagaaggtgcctccgtcctgagtcacctttgggctctaggatagctccagtgctgtgattggtagggcacccccaggcaagggtttgggtgtgtgtgaccccagtgggaatgcagtgcattcccagaggccctcgtcgctagcccagcacgaaagagtccctgagggctttggaagctcacctccagcacatctcaaatgaatgctcataaaccagtcgtttaatagaaactgctgctctgaacagaaaggagtcgttgaaggatccttaagtggggactacaaggaagtatttgttgcagggcagattgtctctgggctgttaccaggtagtacttggaatgataatgctgatgtctgaggcacaacttaaataaggcctgttaagacacagtgtctaaatactagctgggagtgtacttctcccaagagaaagagctttagaggtgctgttggtgacattttagggtgatcagatgagtggagaagttcatgaaagagcacaccccgaaaggggccttgaaaagcagatccagttttaactggaggaaaggaaaatagccttttgatttgcaggcagatagcgaatcaggttgtggcaggctgtgctctctagggtgtgtacactctctaggacatatgtacgtcgccatttcttaatgtgtttctccaagctgatccaccaggcattgacacaaggccactttttaagtgacggtgttaataaggcatcactgggacgatgaggagacaaagctgagaggttcgctttatgctgcccgaccagtgtatgccacacctggacctgcccagaagctacctttgagttcagcctgtcccatctgcaggtcattactggattaatctgcctacattactggatccattacgaatcatgggcctgttttcagtgtctaatgaaaaggccttctgaagttctcagaaagtattgagctaacaaggagagagggaagatcttagggccatatgcagcaaaggatcccagtcctatgtgggtagtttgggggacaaatctccacgaggtgtttgtagtggaaggagagttgaacctctctccctcggtggttaggatttaacaagctgtgtgtcttggtgggtggagtggcctaggtgtcaacgccactccctctgtcaccttgccagtgtgcccttgcacagtgtacagaaagtacaaccgtacacagtgttcccagtgccatccactctatctgtgtcccaaccagtcccggtgtgctttctctgcaggttgttaacatggcccattccctgtgtgtgttcttcagcccctgttcccttatcttaaactgccctgtggttgttggttgtttgcttttttactgtaaatttaattggttcagctacatttctaagaagcaaagacaaaggctattcctcattttgattcattccaattagtgtctggaattagcagcctcctaattctccatatatacacatacactgataagctgttcagattgcagtgaaatctcagaagccaactgatttcctgcacccagcagccctctgaggtaaagattccttgatttatggaaggagacacagatggggacaggtgatggggacagtatgctttcagagctctattgtcagcttgccctccatcccctctggttgagaagtcttcattatatctgaagctgaacagcaggttttctggaattccttaggctcctcagacggggcgggggcagggaggggcacggggaggggggagctaagctgatcccacagggcaaccacagtagagatcactgtgaacacagggtacctctgaatactacccgtgtttcggatttcatggatatattcagaaatattaatgtagcataattggaggctaatattgcacccgcaagccaggcggaggaaagaagtgacccccccaccccccaccttcccacccccgctgccctcctacacatgtcaaggttgatttttaactgttggtgctttgcaaaacatcgcagaatccatgcatcttgcttgaaacaccccgggctgcattctcagctgtagatgtaagcaaacacgaagacgagggaaataactttcagagtttcacttttctctcatttgtttttcctcccattgggtttaaaatatggcctgacatgagagagttgtctctaaggtaagatctgagacgttgaaaaagatgcaggccccaagaggggtagaggaacaggggagagctgattccatctcatgaaaactagaaaagttttactcgagttccccgagtgccacgtgatcgctgccctgggcacgtgctaggccatgtttttacttttgttttcagggtacagctttctctgactctgaagggacagacatcacaggatggggggtggggtgggagggggagttccctctgtctgctagacagtgggcgtgggtgtgcctttgcagaaagcctgtagcctgtgtctggattattattattatatatttttggtatgtaaacctgggtttgtttattaactggaaagggaaagggtgttttttcttaatgtgggttcattgagctcgcatggatatggagtcatgaattagccccgtgctggagggccctactttctaagatgtcttacattggaattgtgaagaaacatattctttttaccctgggtaactttggataattcatttttccctcctgctgcctgttttccctggcttttgttcattgacagtggtgcacatgagtctctgagaagcaagctttccaggtctcgggtgatgccccaagaggtcttgttcagagcagaaagcatgtcacagaacttggaaacacatgttaataatcatgagagtttcttggctagctgaaatctactggcaagtcgaaccctggcctgcctttgcctctgaagtgagttgtacaaaaccctgagaaaaggggttctcactggcctgaagcatccagaaggtgaagtgagccttccgttatgcatgtgcaatgggtcttagcagccccaaatagataggatgccaagaaagcacaagtttctttttaaaggggcttattagccaagtggaaataaattcctaggtaattgtgacacctgtgactttggtttagtagtgaattacgtatatttataagctatttataattatgtgttattaatttgtggggctatttggatacggaggaggtgaaactggaagttgatggttgtctcttaagcaggcatgatttactccgttctgccagcagagggcgccctccttaaactaataaagagcagaaagcttctgctcacacttggagttaatgtccttaatagagcctccgtggtaggggattgtacatatagtgaggagtttgtttgaaacaacctgtccatggctattcgggaccttttctggtatatactgtttaacggtagatacttttgttctgagacaaaatagactgtcagatttacagtttaatcgtcgcacagacaggtatttgtaagaagccaatgtctgatgtttcttccagagaaactcttttgagatcagggcaatgcatgaaaataagaaggacctttgtttttcttaagctaaaagaagaaaacaagaaagccagagttttgttataggtgtgagggtttgtttttgctttttggtttttagtttttcttcagagtggcctaaaagaaagtaaattcagcttgttagtttcgactttccatgaccaaggaaagccaagactaggggcagtgggctgagaatggaatttaggaccaaaagtttttgggggctttgtgattttttttccgttaatggttcaaaagaagtgggggcttctgggcagatgccatggggacgtttcctaggaaaagacttgatttctgtccacccagcaaccctaaacccagttagctgcaactttctcaaattacagactagaatcccagagaagggaaagcgcgtccttctctgtccctttgtcacacccagccagcacttaacccagtgcagacacaccagttaacccagtgcagacacacctcttagatactccagattagaaagtcctagggctatttgaaggtgagctgaagttgactccttaaagatctgggcttgcttgaaggatgccctccccggggctgctagcctgcgtgtgatgcgctatgtgaagggctttcctgttaacacctgcggggctgactgtgccagtgcgtgggaggaggaggacacgagagagaggcaccctgtcctgagctgttccgagaggttcaggccttcacaaacgcggctttgattctattttttgatgaactaggtggattacttcctgtgctgcttcactgcggcccacttgagtccccggagcgggggctgccagcgcgttacaggcaccatggccaccagggaggactattttcagcacccccttacaatgcccttctcatttcccggacgaaaatgagcaagttagtcttgcctcggccacttgtcagcctgatgacaactttgactttgacttgggtgcccctccccctcccaaaatccctagctcagcaaatatttgaacctgcccgagttaatcatgaagcctcgatctttatctgagcgagacgtgcgagcgcccgccggggctcctttcttccccggtgcagtagctcgacccagggggctcttctcgcggagccggggacttgctgccggggcggggcgtggggcggagggacccgctgcagcctagccccggggagccggcagccgggctgagagtcgcgcgcccccgccttgcgcgctctcctccagctaggttctttactgccggtaccgggcgggcgggagaacctcaggggctgggaccacttggtagaagaacagcttctttgaattttttttttttttttctctgtgggatactggcagttcaaagcgaaaccgttgaaatgcataacctgcaaagtaagtcttttttttttttctttcatttatgcacttctctgcaccgggctctttatctgcaaggcgtcctctctagtttggctgggcgggcgggggtgtgtgtgtgtgtgtgtgtgtgtgagcgctggaagtgtgtgcgcctgggtgagtgctgcctggggagagcagatgggcgattagggagacactcccttctgtcctccagggggggacactgcggagaagagatggggtttagtttggagtttagaaagtactgggcaggaagttggggccaagccagggcttgcagggaccgtggaaaatcacctgtctcccagacctgctctttgggttcccttgccacatgggcagcagcagtctacagctaggctgattttactgagtgccgtacataagtcccctgtgggctaacccttgggccttactgcccagacaacctgtctctttacttttgggagaagactcaacgttttaaattaaactacttttttaaaaatttatcttatctaaggacacacttctctaccatttttatttgacgttgagtttagacttatttaaactttgggtttctaatctaccggcaaatagagaagtatgaggtggaaggggacaggttgagtctccaataatacagaaatgcggtagagaagggacgccagtggacagcatccagagaacggaatgccctgctccacttttaatgctgtgcgattccaattgggatagaaatgtaaagtgctcccccacccccgtgttgtgtaaatccttccctaggtgcacaacattcacagccacaaagcccactctttaaaaggaagccacatttacattgcagcattaccccaaccatccatgtaaatgtcaagaggttctggctcccaggggcaacgtatatcaagctccagtcttggtgacagaattgcatgcagaatgatttaaagagccaaaatgaatcattacatttgtagggaaattgatttctttatattgaacactactaagaaggaatatttgtccgaccgcccccccccatccctcagtagggctctgagctaaagagagaagtggggggggggcacagagagagagagagagattacatcaccttccttaaagcagctagcaatgagatgggttcctgagtgagacacttggcagagagcacctgtactctgcgttctgatatactgcctttttttttttttcagaagcatcctcttgcccagtgtcttaggcagtaacattgaaactcaccactattgagcatatgcttagcatttctacaaataatagacagcttcattcctgtgctgaattttcatgattattctataaagtcttgttttgaccttgggatatctgatagaggcattttgcctaagtactgtctttaagcctctctctctctctctctctctctctctctctctctctctctctctaatgtggtgcgtctatggcagtgtttaaaatccaagctctcagtgaattgtggaagactggatttaaatatccagagtgctcggatcttttctgcttctaatatatgcgtgatatctaagggctgtaatagagaccttagggatattttggtgcctttgtaagattttttttttttttttataccaaggaatagccaggctatctctaaacccagatgcacgaaggggacggagctggaagctgcagtttatcagctctcgtcaatctgcccacggtggaatgtaccatgctgcagagtaataaagagagacttagagagcacagggctgggagagagcaggcaaattaaacaccttaaatggtgagcacggagatgccggagcggagcagagcagagccggcgtgacatgtaggctctcagagagaggctggggccgtgtgaagctggcatccaggagaactgacgaagcaggagtggtctggtgacatttttctgacttgattggctggggtgtgtgatgtaataggttacagtgcgggccgtataggttttaaaatgaattccaagacaccattacaaagaaagccggactcttttcttataaccgagcaaagccaaggaaactgtcgcacacatgtacaccacggtttggactatggaagacctggacttagagtgtgccaagacagatataaactgtggcacagacttggtgttttatatagaaatggatccaccaggtaaaactgcagtattaacggagagagctagataattctgtgactttaattttttttttttttctttttgaaagctgctgtaacagatcctcttgaggttgctatttttactgatgtgtttcacggtttaaaattagtttgattagaactttaaaattaaatagactctttgcctgcctgtagcagcaagcagcccaggctgtgtctgataaatgctggttcttgctgaatgcatgggaactggtttctactttttctgtccgctgctgtcttttgttaattgtgatccttggcaagttgggctatattgttgtattttgttcctttcattaagaggacgtgtcctttgtgaggcttttctctgctggctctgggctctgtggtactttgatgacaccgggtgcttcagaaagcatgtgagatgtagcagtgactcaaactggtttctgatgatccgagactctctcataaatcagatgtggggactttctcgctctctctctctctctctcatgctgagatactacaatgggaaaagaagttgtctttcctcgcctttgtaaaatagtcttactagacacctggaatcttcccggggcataaattcaagcagttacagtgctttcaaagttaatggttttggatttagctaaaaatcttaggctcattggttgttccctctggggtcagcccttcctaccacgagggaactcagagacgccgaggggcttcttgccaccctgtgggtgctgatttgacactgaagaaggggatagggtttttaaccggatctggcatctaaagcccagcgtcccccagcagaagagtaacatggagactaaggagatttaggtcacagatgaggttcttaaagtggctttggcagagctgtgcctgaagtatcaacatagaaaaacccagttcttaaagcatgcttgctgcaaatgagggctgctttaaatgtgactgctgtgttcaggcagggcacagcaaccaaatttgcctttcgtaattaagggagaggaatgaaagcccagctcctgttatttctgcttctcagatgttcctggtttcttactttagacggagctgctagggtgcacaactttagtgcagataaaatctagaagtagagaatgtcgactctggatttgctatgaaattttctcccacagccagccccatgtatttcctaatctctaggttggtctgtctgtctgtgtcatctctgcacccctacccctgtcatgcactactactttttcctttccagttttagttttaagtcatattctgagatttccttcaaagactagtgtcttccatggcacatgaaattatgaattcctggtatccgttcccacccctcccctttccccctccattgtaaatgtttttagtaaattcaattgccttttaactgaaaattgaattgaatttttatatattttaactaaaataggattataccactcaccccctaccccttactttttgtttgtttgtttgtttttataatgaaaagatgcaagtctaattttaaatgtacacttgggagttcggattacaactttttttggtctcctcttttgcctgcagcactgccccccaaaccacccaagcccactactgtagccaacaacagcatgaacaacaatatgtccttgcaggatgctgaatggtactggggagacatctcaaggtaaggccacagagcctctccttctcaccggctgcagggaggtttcgagtaagagcagagagcactggcttgctcagtgccgtttttaggatgtcatccaacataagcatgaagcatacttgggtctcttccaaagatgacaagaaaagtcaccgagcactggagcactgtgggtgctgggtgacataggacattgaatacccaggaagcttccctgttgccagaggtgccagagaaggtcggggtaacagggcactgtctgctttctctctaatgggcagggcttcgggaataaaggggtttgctcctttagctcttagagtggttagtgagggagctgctagaacccccccctttttttttgtggatcctggttttctgtgctgatttgaaagtaactggtgtgtatgtgtgtgtgtgtgtgtgtgtatatatatccaacaatttttgtattatagtcaccaatagtgtaaatgtgtgtgtgtgtgtgtgtgtatgtgtgtgtatgtatatatatatatatatatatatatannnnnnnnnnnnnnnnnnnnatatatatatatatatatgtgtgtgtgtgtgtgtgtgtgtgtatgtatatatatatatatatatatatatatatatatatatatatatatacatacacacacataagtgtatgtaatgtatagtgcacttattttctgtgggatgaatttgtagcacttttgtataagcaaagaaggaactattagtgttctttgaaaatgtacaataccaacatgtaaaatctaaaggaccgcagaatgtaaagacaaggaacctttggattttctgctcagtgtcctaaagaatagtgtctcttaagactaaggatctatcccagtggtaaatcaatccccagtgcagaagaagggaagctctgtgtgtgtgtgtgtgtgtgtgtgtgtgtgtgtgtgtgtgtgtgtgtctttgtaagtgtgtggttactcaaagttgaaaagtaagtatggtcttatactgtgttcattttagggaagaagtgaatgaaaaactccgagacactgctgatgggacctttttggtacgagacgcatctactaaaatgcacggcgattacactcttacactaaggtgagccaggaagtcagctgtaattgcgatgtctcagttgtcatgaaaacatttcttcattagattgcctatttttcctccttaaattagcatataaagtaatgggtttcactataggattttttttcaaacatcttcgattcgtccctttctcctactgccttctcctccccatcctgagagccctccttctgcatcagaaaatgttaataatcattatttttgtattgtatttacaggaaaggaggaaataacaaattaatcaaaatctttcaccgtgatggaaaatatggcttctctgatccattaaccttcaactctgtggttgagttaataaaccactaccggaatgagtctttagctcagtacaaccccaagctggatgtgaagttgctctacccagtgtccaaataccagcaggtaattcacacagagctcctcccgctgcagtaacaagggggccagagactcttcagcataggaaatgatctgaaattgggttttgacaaactttacaccctgaccagaattttataatagctaaatcagataccatattgactatgccattagggattgttatttgagtaaatagcttatcaactgaattctttttttccctgcttgtatattcttccaggatcaagttgtcaaagaagataatattgaagctgtagggaaaaaattacatgaatataatactcaatttcaagaaaaaagtcgggaatatgatagattatatgaggagtacacccgtacttcccaggtgagtttaagatattttggactaacacatactatactcagattcaaaggaagaatcaagtgtctctaacccttttcagcttaacccatgcttataaagtcctacattaagcttgcttctaactcgcagtgttactattatgagcttccagttgatggaacgttaatttccgactggttacttctgcctaggctagacattgataataactgctaatgtcagtttgtccaagctctagaatggaaagttcagacccatccctcctgctgtgaggagaaatggccgtgttgattatcagagaaagcagcatgggtgtcataaaataaaatggctttttcaaagactgaccggcttgtacttacatacttaggaacacacacacacacatgcatgcatgcactcgttcattcacacaacatgaatttgaaggaacaaggagtggtatgtgagatggttgaaagggaaggaggaaataatgtaattatgttataatctcaaaaaaaaaaagaaaacataattttaaaaagtgaaagacagataattctctgtcaggaacatctgtttcttgatcatttgacgagagttggtgaattcatgaccagccctgctaacatacacagcccttgcctatctcctgctcctgaatcctgaagatgcacagtgtaggcatctccccgcccccttgctcctgttgtctaagccataccgtacagctatttacgtagcactgatgttgtctcatgctcaagccatttagaggtgatttggagtcgatgagaaaattgctcaggctctgtgtggccattacatcacttcaataagagacttaagcatctggcttgttagtggccaagagggctgctggtacccatggatgactgtgctgactggcagctcatttgcgttgcatcgctagctagcttgtctcttatagtaaagaagtcgttctctgaaagcgatgacattgcctgatgaaacttgtgttgcaggaaatccaaatgaaaagaacggctatcgaagcatttaatgaaaccataaaaatatttgaagaacaatgccaaacccaggagcggtacagcaaagaatacatagagaagtttaaacgcgaaggcaacgagaaagaaattcaaaggtagatgaacctcaagaggctcccgttatccttgtgacagaaagtggcaaaaatcgtttaagattggtcgcagtgaagatctcccttcctgtaatttgagcaactttcgaatgaaattaacaaaaccccctttactctggggaccttgtatggtgtacgtaggtgcttactggtctgtttttcctgcctgcaggattatgcataaccatgataagctgaagtcgcgtatcagtgagatcattgacagtaggaggaggttggaagaagacttgaagaagcaggcagctgagtaccgagagatcgacaaacgcatgaacagtattaagccggacctcatccagttgagaaagacaagagaccaatacttgatgtaagtgtcggaggtagaacccgaagacttggcagtggctaaattcaaggagggagtctcaatgtccttcgtttgtaaaactctttcaggtggctgacgcagaaaggtgtgcggcagaagaagctgaacgagtggctggggaatgaaaataccgaagagtaagtacctactgaggaggcttttttggggggtggcggggactgggcagtgggagttttgtcaacagatttttcagtgactttggtacaaatcccaagccaaaaaaaaaatgtataaaggtagtggcagggtccagagcttcacccagggagagttgagcccaggagggttgggttttttgggtttttgtttgtattttaacccacagttgtgtaaattgaccctgtgtgtccgtaatgatgtccccgaacatcaggaaaaaaatccccacatatttttggaacaatgagagaaaaccaacaattacgtttagtgtattttgagggttaagtatatgtttagtttgaattattttcaaactggcagtcttcttaataccgtccctgccctcggcccaggttactgaactccaggtggagatagtaataactttctgccagccattcaccctgggggttggtgagaaggccaaacaaaaagagaactcggagagaaaggctgagtcaccttatccgacttgctgggaaggagacccgggggcaggctgggttcccacactcttgagtcacaagccttcccttctgcccatgcagtcaatactnnnnnnnnnnnnnnnnnnnnnnnnnnnnnnnnnnnnnnnnnnnnnnnnnnnnnnnnnnnnnnnnnnnnnnnnnnnnnnnnnnnnnnnnnnnnnnnnnnnnnnnnnnnnnnnnnnnnnnnnnnnnnnnnnnnnnnnnnnnnnnnnnnnnnnnnnnnnnnnnnnnnnnnnnnnnnnnnnnnnnnnnnnnnnnnnnnnnnnnaaaaaaaaaaaaaaaaaaaaaacgttctaaccttgaagaagtatggttagtccaggcagatgaatctgttaagaacatctaacagagagacagacacctgctgccatttagtaggacagctgggacaagtgaaatggctgtccctgcccctctacaagtcagtatagctagaatgcatagtctgttttgtgagagcaccacctgaaatagataaagcaagcactccttcagggacgaccaaaacaagagcgaagactccatttcggtcatcagacatacaccccaaagtgggcacatgtctatcttgtggtctagtttctttttacatcttaatactttggaggagtactttgaaaagtaaactgggaagccaagcatggtgtctgtaatcctagcactcagaggcgtaggcaagaggatggtgagtggttgaggccagcataggcttcaacatggagaccccgagtcaactgaaaggacaatgcaaggaaggtttggagtcatgagcatattaggggcaagaaaataactgtcctcttgtatgcatggacaccaaaagaaccttctacaacccaccaccgattcatttatgaactatctctttaagaaagacagagggagagcttttgagttaggatgagaggatagcagaatgcagaatacacaccaagatggagagcctaagagacctcttgattagaactgaccacttgattagaacagcaccagagaggttggaaactcatttgtcacatgcttattacatggcacatccagccccacatataacaaacatgtctcataggaaccctactccatacatacatgttatacctctccttgtgttaaaccatttaaagtccagtgaagcaggctcaaatggttagtcctggtgtatgttgcaaagggcactcatagtttactctggctttggggctttggttccccaggagggaaacagacccatccactgtgcccctccacgaggtcggctttgtttaaaaataccctgcagcattccagatcatctgagaaccactgaaaaagacttttttgttcccttcccctttccagggtagacggcgaagtcaagcattgcgtcattaacaagactgccaccggctatggctttgccgagccctacaacctgtacagctccctgaaggagctggtgctacattatcaacacacctccctcgtgcagcacaatgactccctcaatgtcacactagcatacccagtatatgcacaacagaggcgatgaagcgctgccctcggatccagttcctcaccttcaagccacccaaggcctctgagaagcaaagggctcctctccagcccgacctgtgaactgagctgcagaaatgaagccggctgtctgcacatgggactagagctttcttggacaaaaagaagtcggggaagacacgcagcctcggactgttggatgaccagacgtttctaaccttatcctctttctttctttctttctttctttctttctttctttctttctttctttctttctttctttctttctttctaatttaaagccacaacacacaaccaacacacagagagaaagaaatgcaaaaatctctccgtgcagggacaaagaggcctttaaccatggtgcttgttaacgctttctgaagctttaccagctacaagttgggactttggagaccagaaggtagacagggccgaagagcctgcgcctggggccgcttggtccagcctggtgtagcctgggtgtcgctgggtgtggtgaacccagacacatcacactgtggattatttcctttttaaaagagcgaatgatatgtatcagagagccgcgtctgctcacgcaggacactttgagagaacattgatgcagtctgttcggaggaaaaatgaaacaccagaaaacgtttttgtttaaacttatcaagtcagcaaccaacaacccaccaacagaaaaaagagtgtggagaaggagacttacagtgacattcagtatataaaatatgtacataatattgggtgactaactatcaaatagatggatttgtatcaataccaaatagcttctgttttgttttgctgaaggctataaacgtgcagcgctatgcaattcttaatttttattatgttgttacccgtttcaaatacacctttggaataagcttcccttaccccagtttttgttgcttgaaaatattgtccctgatttttgttaatatttgtttttgtcatttttactttttttttttaaagaagtgtacaggatgccagaaaggagaatggcttaagaattaaaactatgaaatattttacagtttttcttgtacagaatacttggctgttagcccaaggttaaaaagttcataacagatttttttttttttggactaaatgttgggcagggccctgataagcttcaaagctgctttattcaataaaaagagaaaaagaaaatgatatatgatatgacaaagtattgctgagtccaacagtgttaagactcttgaaatacggtacctggcaatgtttgtttcctaatgaattgtgaacttcttgaatctggagggagggggaggcagtcatgggttgtaacaggcggggtaaggggagggggggaagtaaggtggtgtgcactttctagggatcccagagaagggaggagccaggctgtttgtctcctgtctttccccatctgagtttggtagtcattagcaattaacagcaactccagacctaatgttgtaactccatcccagcacagttggccagcatctccgttgtcatgaagtgctgagtttgttctggggttcctggaatgtgccctctttcgttgttgtaacacactggtctcaaggttgaatccctgcatttagaaaatgtgttcttttctctttgtagcattggactagtcacagcagtcagccagtcaccattcattttggctaaatcatggtctgaaaaaacagcatctagttggatgcttgatatttttccagctctctgttcagagttcagtttagaatggaaggcaagtagacccaagtgggtggtcactgtgctttgtggagattgttaagtgcaaacatttaacagttcggacaggtcttctcattagcgtgattgtgcatgttgcatacatcacggtgtgcaaagggagcagttggtgacatctttaattcaggacaaaagttcgagtttcccaccctagtgtatatgtgtcaaagctggtgagttcatggggaattgccatgtgctgtgatgggtagaggttgatggtagtccctgtcgcagcccaggtagattcatgagccatcatcagtttctctttctcaatatcagacacacctgcagctttatagctcttcccttatttgggggggggaaggggtcttgtaatgttgctcttgttttgatcttggaatttgcagtccagtgtctgggttaatggtctgtagaatgtgtttttcttcctatgaagccactgctcattttcaagagcaaaagtcagtcaaccagactgtcagcccacaaacttgacccgaccacctcctgactgccaggaaattgattccccgggttgactctgggctttgcaacctccagcggtagcattccgccacaccacatacaactgaagagttaatacttatttgtaagctaggtttgtggttggcttctgctctcttcttcctttctctctttcctttttctttttgtagcacatcatgtatgctatcagatacaaataactttaatttttaaaaaggatctgagattgcttcgtgacaagttctgttaagtggtttttttttgttttgttttgttttgttttgttttgttttgtttttttccttcaacactctctgcaagataacttgcaacttaggcagttgcctgaatttctcatctcactgacgtgagtacaatagagctttcatgtgtcagaaggcaggagtcattgagttatagcacacctgtcctactgaatgcccttttggtgacaggttagcatgctcaccaactctgtccttggagaggtttgaccattaaggttctgtggattccatccaagccatcttctagtaacaccgagtggctcatgaatgcagatagatacagcatagctgggatgtgagcatgcccactcaggttttctcaccaactgtcccattctagagacagccagacactaagctagactatagaagtgggagggttgggaccttgtgttccacaccagagtgatcatagccatgggataaggcagcaagcatattttgcaacatttgacaacttcacagccctggatatatgtatatatgtataatgtgcatggactgtttccaatacacctttcagccacgcagatccacagtcaagttcaagtacataacaagcagatgtccagtacaggtcttgtatatgtgtgtgtgtgtgtgtgtgtatgtgtgtgtgtgttcctgtatttctttgctattgctttgttttgtcttataaagtacaatttgtccacaagtgaagtgagaagtccgtcatttgatactttcctctttttagaagctcttccctttcagggagcagcctggatgatttgcttacctgatggatccctgttctcagtgttgtcaagtcagagtgtgtttctgtgagctgtcattgtggggaaccaatcgctttgtcgtatatctgattatgaactataacttgtttgggaagtcctactgatgttctttattgggagaaagttcttgcaggttttctcaactgtgctttcgcaatgcatggtatccaagtcagttggaaagtgggttttgttgtctgttcgaatttagggtcatttaagaaaggggcagttaagaagcacaatgcctcccatgggacaacattccaaaatgccaaattcttctctttcttacaacaatctataattatataaaataactagtactgggggtagggagagggtagaattggctccattggaaagactctcctgcttcataccgagcttgtcgccatgagatagcattggctgcccaggatgctgctatttaagaagaaaaaaaaatcaaaacaaacaaaaaagccctcatttatatgtgtgtattttttaaagctacactctgttcaatgtttttacaaatctgtttatatgacattgataaactaaagttggtcttttgacgagagggaggatgtcatggtcggttgtaattttgcctttacaaggtaactggggtgggaggggagggagtgtgcctccttgacattttgttcaagatatagattcagtgaagctatgtattgttttaagttgcttaatgcattgtattaggtcctcaaacagaataaaggttgttttgaaacttaaaagtttccatttgaaattttagtgttcaccgggagatgtttctaaactcccaccaacccgtttgttttcactatttcgactgtgtcttataaactgaaggtacgaatcagtcacttgaatgtgctcagtgctatttataagaaatagcatcttaatgcgttggtggtagaaaataaatacctctaggtggtatcatttcaaggcatgttcttgctattcaaaatgtctcatttccctccatctttcctgtcctccacccaaccttgacaatcatctactagttcctttgggtttttgatggcttctggttttgtctcttgtacactggcttatttaaactcatggtaaaatgaggtgacctcagactataaacagggccacttagtccccacataccagtgtgccttgcatcacctagtcaagaaacagctcttcctgtgaaatgacttccccagcgacatttcctgctggttgaatctgccaccaccatactactgtgtatgtatgatgtatgtaggccacacataatatatgtaagcacaatgaggttgctagaaaagaagacactgccaggtggtggtggctcagacctttaatcccagccctctcaaggctgagggggccagatctctgagctcaaagccaacttggtctatagaaggagttccagtatacccagggctacaaaagaaaccctttctcaacaaaacaaaacaaaaacaccaaaaaacaaatgattacccaacccaaagaaacagaaaagaagacatgagctagggttatgagtgagaggacccacacgtctatgccaacagtatctggtgtgtggtaagcaaggcaatagctcttgggtatcacaactcattccctagcttttataccctctggtctccctgagtgagtccccacactgtgattgctatgtagattttctccttcagatgcgagtgaaatcctgtgcacttagctcccagacaaggctctggtcccactgcaatcttctgaatgtctacagtctcatgcagcttctaaccctctgttttctgaatacatcttcttttgggtttctaaccctttcattggctgctgagtaattctgattacttaactttgcctgtaagcagcactatgcagtatctagcagcagggataattttgtcattatgtgaacatcatagggtgcatttccatacacctactggcatagcctgttatactacacctgggctgtgtggcatgtacctatgggctcccagggcccaaatgaattagtgaatatgagagtagatcaagcacaagagcaaatggtagaatccagacttataaactagctatctggggctgctgctggtgtagcattgcaaacttttacagagaacattttataattaggagtgtactccaagatacatcaactacattggccaatgagaactgttgattgtcaggtctcaggtactgcccattgctactttttacacatgcttgcactgtaggtttgtctgaatcagcctttgcacatttatatgataagttgtggcagtgtcataaccgtgtgtgacccacactattcttaggggagctgaaatatcactatgtgacatatggctataatctcgtcaggactggcctctgacataccaagtgactgttatctactaaactcttcctatgctttatccataccaatcccccaacaattatatgagttagaagatatcacctccattctatagatagaaaaacactatctatgcctagaaatgcctataaaaactataaatgcctaggtataatatatattcaaggtcttacaacatgttagaacagagtaagaagagcatctcactgaaagccaaggcacacccttcaacccctcccaagatagaatctaaagacattccatgaaaaaaaaaatgcacagagcagttcaaagaggggtcaccagtagttcctcctgctaagggctgaacaatgtgacgtggctgatagacagaacatggtgcccaatgacgaagggcctgagaaagcttgctcttactcagaagaacacatcagcatcagttgggaccttgctgacattccaactcccagacctcacgcctcatttgacagagtagagctgtacctctgctcccacaaattctgcagcctcccttcatggatacaaagggttgaaaatggctgctttatgtcacctcttcagagtacttctagtgttttagcaaagcatatttccattaatgagtgctcaaaacgttacttcatggcacagactccagataggtaaatttaattagcagtgggagggactatnnnnnnnnnnnnnnnnnnnntcattagttctgagtctgtcagttccgggggtccttccctagtagcatgctagttagcactgtcatcatcacataattggaggggcacgattttccttgcaggggcagccaaacaacgaatggcccaaaccaactgttgtttctaccacaactctttcagggaccacaggggcaatgagtttaatgtttctatagtatatacattgcccaaatcattcatgacagcgaaagaagctacaggcaaaccacactgtggtgcctggctagaaaccaagccaaagttgtataataaatcaataccttagatacattttcaggagaaaactacctctaaggccaccccataaaagtggtagagaaacccaatatttcaaatgtgcaaatctcaatgtgaaacaaaagattatgaaaaaataggttatataattctaataaatgatcacagtggctctctagtgatggatctcaaagaggttaatagggggagtacatatgatagacaatacaaaggaatgactatggaaaagctcaacaagacctgagagtatacatgtaaacagttcaatgaaattaagataattcagagtaaaaataaaccacctagagttttttaaataacctaacagaaaatagacgtttaagaaccactcagtgaatcaactaaaaacaaacaaaaccaaccaaacaaaaaaagacagtcagaatctttaacagtggactatattaaacagaaacaaagtctgaactcaaatcttggcattttgtaatgtgccaaacaaagtaaacaacaaataaacaaacaattaaatgaaattaagaaagaagggaaatgagaggagagaaaagatgagaacattcaaggctttcgaggttccattaaaaaaacaggcagctccatctgaatactcaaagataaccataagaaagttaataatatggaaaacttagaactagttgaaaacttcttcagtcttaggaaaaatataaatatataatatataatgtataggaggtatatagaactacaaatagaaatgatcagaaaagatcttcacttcagcatgtcatagtcaagcagttaaggtaaaaagaaatattttagaatcttaaatgtaccaagacacattttaaggctatccccattatattaatagcaggtttcttagnnnnnnnnnnnnnnnnnnnncactgtcagcaaggtggctgaaggacagtattgcagaaactggagtctagtagtcttgcagacatcttaaaaagctatccttctagggaacccaaactggcaactgagttctctacggtgtgcatggaaatatattttcaaaatgaccttttgccatctcctaacaataggagggataggaaggaggtggcctacaaaatcctattggccagtgtttctcaggcttcctaatgccgtgaccctttaatacagttcttcatgttatagtcacccctaatcataacattgtttttgttgctactatataactgtaactttgctatggttattaattgtaaatatctgtatgcaggaagatctttggtgaccattttgaaagggtcattaaacccacaaaggggttacaacccacaggttgaaagtgactgctcttgggcagcacaggcaaggagaagtatcatcttttacgacatgattactgagcccatttttttcaaacaagaagtggtttccttgacctgtttctgaccatctctagaaatgataatcttgtgaaacatttagaatatatgtaatagattgtttcctatccaaagttcagatcttctcaaaaaaaaaatcccactttgtatcttctagttgggtatcactgtcataaatcagctcaacagaaaaccactgagatgctttcaaaggggcagaggggaggataaatgagaagccaccaacacaggcttgcttatctgcatttggctctccagaaggaaatgaagaaattcctttctctctatagcattcaatcatggcagtctgagcatgacctcaggcttaacttgtgaaagaaagaaagaaagaaagaaagaaagaaagaaagaaagaaagaaagaaagaaggaaggaaggaaggaaggaaggaaggaaggaaggaaggaaggaaggaaggaaagaaagaaagaaagaaagaaagaaagaaagaaagaaagaaagaaagaaagaaagaaagaaagaaaggaaggaannnnnnnnnnnnnnnnnnnnaacattcaaggctttcgaggttccattaaaaaaacaggcagctccatctgaatactcaaagataaccataagaaagttaataatatggaaaacttagaactagttgaaaacttcttcagtcttaggaaaaatataaatatataatatataatgtataggaggtatatagaactacaaatagaaatgatcagaaaagatcttcacttcagcatgtcatagtcaagcagttaaggtaaaaagaaatattttagaatcttaaatgtaccaagacacattttaaggctatccccattatattaatagcaggtttcttagtagaaaacctaaagacccagaggaaatggaattattattccaagtaactgccaactaagaacactatatccagcaagaaaggctgtccttcaggatgaaggtgaagaaaatccttctgagagaagcaaacagaaaagatgcttaagaaagtcccacatccaaagacaaaataaggacctcagtcaccaggaaaagcataaattgccactggcaagcaggtacccaaggagtaagaaagtcaaactatggaacttagaagataatcaagagagagaataaaactcacctgaaacagccaagtgagaataggcaaaatgacacttttactcattggcaatgaacttgaacatgaatgaattgaaagaacccatgctacttctctgagcctggtcacctcacttaatatattttccagtttcattgattttcctgcaaatttcacaatctctctctttctctctctctctctctctctctctcgctacttatgagccttggggaggtggaacgaatggatccttgaggctccctggccaaccagaccaggctaatcagtgacttcaggacatgtaagaaaccttatctcaaaaacaagagagatgactcttgaagcatgtgcacatacattcacacacatgcattcacacacatgcattcacacacatgcattcacacacatgcattcacacacatgcattcacacacatacattcacacatatgcattcacacatgcattcacacacatgcataccttatttatctgtccatattcaaaaagctaatcagatcatgaatacataattatgattctatgtacacacaagtaaacaggatatggatgaagagctctttgtaaattgtattatcattttggaattatgtgtatatacatatttccacttatgggtctgtatgtacaaatgaggagctgcctgtagagtgcagaagagggcataggatctcctggaactagagtccttggcatttgtaagccacctgacatgcatnnnn

SEQ ID NO: 1475 - DNA, 3454 bp, Mus musculus
ggcacgagccgagttggaggaagcagcggcagcggcagcggcagcggtagcggtgaggacggctgtgcagccaaggaaccgggacagcgaagcgacggcaggtcgcagctggatcgcaggagcctgggagctgggagcttcagaggccgctgaagcccaggctgggcagaggaaggaagcgagccgacccggaggtgaagctgagagtggagcgtggcagtaaaatcagacgacagatggacagtgtgacaggaacgtcagagaggattgggcctcgctgcgagagtcagcctggagtcaaggtgttgacaagttgctgagaaggacacgtgggaggacggtggcgcgcggagggagagccctgtcttcagtcaccccgttgatggaggacagatggacagcagccggacggccagtcacctctcttaaacctttggatagtggtcctttgtgctctgctggacacctgttggggattttagcccattctctgaactcactttctcttaaaacgtaaactcggacggcagtgtgcgagccagctcctctgtggcagggcactagagctgcagacatgagtgcagagggctaccagtacagagcactgtacgactacaagaaggagcgagaggaagacattgacctacacctgggggacatactgactgtgaataaaggctccttagtggcacttggattcagtgatggccaggaagcccggcctgaagatattggctggttaaatggctacaatgaaaccactggggagaggggagactttccaggaacttacgttgaatacattggaaggaaaagaatttcaccccctactcccaagcctcggccccctcgaccgcttcctgttgctccgggttcttcaaaaactgaagctgacacggagcagcaagcgttgccccttcctgacctggccgagcagtttgcccctcctgatgttgccccgcctctccttataaagctcctggaagccattgagaagaaaggactggaatgttcgactctatacagaacacaaagctccagcaaccctgcagaattacgacagcttcttgattgtgatgccgcgtcagtggacttggagatgatcgacgtacacgtcttagcagatgctttcaaacgctatctcgccgacttaccaaatcctgtcattcctgtagctgtttacaatgagatgatgtctttagcccaagaactacagagccctgaagactgcatccagctgttgaagaagctcattagattgcctaatatacctcatcagtgttggcttacgcttcagtatttgctcaagcattttttcaagctctctcaagcctccagcaaaaaccttttgaatgcaagagtcctctctgagattttcagccccgtgcttttcagatttccagccgccagctctgataatactgaacacctcataaaagcgatagagattttaatctcaacggaatggaatgagagacagccagcaccagcactgccccccaaaccacccaagcccactactgtagccaacaacagcatgaacaacaatatgtccttgcaggatgctgaatggtactggggagacatctcaagggaagaagtgaatgaaaaactccgagacactgctgatgggacctttttggtacgagacgcatctactaaaatgcacggcgattacactcttacacctaggaaaggaggaaataacaaattaatcaaaatctttcaccgtgatggaaaatatggcttctctgatccattaaccttcaactctgtggttgagttaataaaccactaccggaatgagtctttagctcagtacaaccccaagctggatgtgaagttgctctacccagtgtccaaataccagcaggatcaagttgtcaaagaagataatattgaagctgtagggaaaaaattacatgaatataatactcaatttcaagaaaaaagtcgggaatatgatagattatatgaggagtacacccgtacttcccaggaaatccaaatgaaaagaacggctatcgaagcatttaatgaaaccataaaaatatttgaagaacaatgccaaacccaggagcggtacagcaaagaatacatagagaagtttaaacgcgaaggcaacgagaaagaaattcaaaggattatgcataaccatgataagctgaagtcgcgtatcagtgagatcattgacagtaggaggaggttggaagaagacttgaagaagcaggcagctgagtaccgagagatcgacaaacgcatgaacagtattaagccggacctcatccagttgagaaagacaagagaccaatacttgatgtggctgacgcagaaaggtgtgcggcagaagaagctgaacgagtggctggggaatgaaaataccgaagatcaatactccctggtagaagatgatgaggatttgccccaccatgacgagaagacgtggaatgtcgggagcagcaaccgaaacaaagcggagaacctattgcgagggaagcgagacggcactttccttgtccgggagagcagtaagcagggctgctatgcctgctccgtagtggtagacggcgaagtcaagcattgcgtcattaacaagactgccaccggctatggctttgccgagccctacaacctgtacagctccctgaaggagctggtgctacattatcaacacacctccctcgtgcagcacaatgactccctcaatgtcacactagcatacccagtatatgcacaacagaggcgatgaagcgctgccctcggatccagttcctcaccttcaagccacccaaggcctctgagaagcaaagggctcctctccagcccgacctgtgaactgagctgcagaaatgaagccggctgtctgcacatgggactagagctttcttggacaaaaagaagtcggggaagacacgcagcctcggactgttggatgaccagacgtttctaaccttatcctctttctttctttctttctttctttctttctttctttctttctttctttctttctttctttctttctaatttaaagccacaacacacaaccaacacacagagagaaagaaatgcaaaaatctctccgtgcagggacaaagaggcctttaaccatggtgcttgttaacgctttctgaagctttaccagctacaagttgggactttggagaccagaaggtagacagggccgaagagcctgcgcctggggccgcttggtccagcctggtgtagcctgggtgtcgctgggtgtggtgaacccagacacatcacactgtggattatttcctttttaaaagagcgaatgatatgtatcagagagccgcgtctgctcacgcaggacactttgagagaacattgatgcagtctgttcggaggaaaaatgaaacaccagaaaacgtttttgtttaaacttatcaagtcagcaaccaacaacccaccaacagaaaaaaaaaaaaaa

SEQ ID NO: 1476 - DNA, 2175 bp, Mus musculus
atgagtgcagagggctaccagtacagagcactgtacgactacaagaaggagcgagaggaagacattgacctacacctgggggacatactgactgtgaataaaggctccttagtggcacttggattcagtgatggccaggaagcccggcctgaagatattggctggttaaatggctacaatgaaaccactggggagaggggagactttccaggaacttacgttgaatacattggaaggaaaagaatttcaccccctactcccaagcctcggccccctcgaccgcttcctgttgctccgggttcttcaaaaactgaagctgacacggagcagcaagcgttgccccttcctgacctggccgagcagtttgcccctcctgatgttgccccgcctctccttataaagctcctggaagccattgagaagaaaggactggaatgttcgactctatacagaacacaaagctccagcaaccctgcagaattacgacagcttcttgattgtgatgccgcgtcagtggacttggagatgatcgacgtacacgtcttagcagatgctttcaaacgctatctcgccgacttaccaaatcctgtcattcctgtagctgtttacaatgagatgatgtctttagcccaagaactacagagccctgaagactgcatccagctgttgaagaagctcattagattgcctaatatacctcatcagtgttggcttacgcttcagtatttgctcaagcattttttcaagctctctcaagcctccagcaaaaaccttttgaatgcaagagtcctctctgagattttcagccccgtgcttttcagatttccagccgccagctctgataatactgaacacctcataaaagcgatagagattttaatctcaacggaatggaatgagagacagccagcaccagcactgccccccaaaccacccaagcccactactgtagccaacaacagcatgaacaacaatatgtccttgcaggatgctgaatggtactggggagacatctcaagggaagaagtgaatgaaaaactccgagacactgctgatgggacctttttggtacgagacgcatctactaaaatgcacggcgattacactcttacacctaggaaaggaggaaataacaaattaatcaaaatctttcaccgtgatggaaaatatggcttctctgatccattaaccttcaactctgtggttgagttaataaaccactaccggaatgagtctttagctcagtacaaccccaagctggatgtgaagttgctctacccagtgtccaaataccagcaggatcaagttgtcaaagaagataatattgaagctgtagggaaaaaattacatgaatataatactcaatttcaagaaaaaagtcgggaatatgatagattatatgaggagtacacccgtacttcccaggaaatccaaatgaaaagaacggctatcgaagcatttaatgaaaccataaaaatatttgaagaacaatgccaaacccaggagcggtacagcaaagaatacatagagaagtttaaacgcgaaggcaacgagaaagaaattcaaaggattatgcataaccatgataagctgaagtcgcgtatcagtgagatcattgacagtaggaggaggttggaagaagacttgaagaagcaggcagctgagtaccgagagatcgacaaacgcatgaacagtattaagccggacctcatccagttgagaaagacaagagaccaatacttgatgtggctgacgcagaaaggtgtgcggcagaagaagctgaacgagtggctggggaatgaaaataccgaagatcaatactccctggtagaagatgatgaggatttgccccaccatgacgagaagacgtggaatgtcgggagcagcaaccgaaacaaagcggagaacctattgcgagggaagcgagacggcactttccttgtccgggagagcagtaagcagggctgctatgcctgctccgtagtggtagacggcgaagtcaagcattgcgtcattaacaagactgccaccggctatggctttgccgagccctacaacctgtacagctccctgaaggagctggtgctacattatcaacacacctccctcgtgcagcacaatgactccctcaatgtcacactagcatacccagtatatgcacaacagaggcgatga

SEQ ID NO: 1477 - DNA, 96596 bp, Homo sapiens
cagcctatccttcctgcagctgccccagagcccatgagaaaagccactgcgcaggggagcacagggaacaggagacccacctgaggctcagccctatccctaagcccacataggggagtttactctctggggcaccccccttgcccatgcctccagcaacaaaacaattcaattgcttttttttttttttttttttgtccaaaataaaacctctgctagctctggaaaaaaaaaaaacaaaaagaagtttggtgttttgtttgtttgttttttttttttgtttgttttttttgttttttttttttgccaagtagtattccactgtatgggaataccataatttgtttattctttcacctgttaatggacatttcggttatttacagtttggggctactaaaaataaaactcccatgaatatatatccacaaaattttgtatggacacatgtttttatttttcttgggcaaatacacagaagtggaatcactggatcttacagtggatgtatgctcaacttttaaataaatggccaaactgttttcttcattacatcattttacattaccatcaccagagttacagagttgcacctgttccatatccttggcaacacttggtattatcaacctttataattttagccattctaatggatatgtggtcatatctcactgtgttttcttttttaattcagaaagtatttattgggtacctagagaatacaaaataatgtccctaatatggtttggctctgtatcccccacccaaatctcatctcaaattgtaatccccgaatgttgagaaagggacctgatgggaggggatgggttcatggaggcagtttttctcatgctgttctcatgatagtgagagagttctcactagatctgatggtttaaaagtgtggcactttcccttcatttatgttctctctctctctctctcgctgccttttgaagttgtgccttgcttctccttcaccttccaccatgattgtaagtttcctgaggtgaggcctccctagccatgtagaactgtgagtcaattaaacctctttcctttgtaaattacccagtctctggtattatctttatagcagtgtgaaaacaggataatacattccctttatatatatatttggcccttaattattttttaaatttttattgagttaaaatatataagataaaatttgccattttaaccattttaagtgtacaatgtagtggtattaattacattcacaatgctgttaaacatcaccactatctattccaaaattgctcatctcaaacagaaactgtacccattaagcaataaattcccattcccactcaccaaatcccataatctctattttcagtctctatgaattcatctattctagatatttcacataagaagactcatacaatatctgtccttttatgactggtttatttcatttagcataatatgttcaaagtgtatccatgttgtagcatgtgtaacaactttcttcctttttatggttggataatattcctttgtatagatacaccacactttgtttatccattcatgttaataaatacttggattgtttccaacttttgtgtgttgttgagtactgctgctgtgaacattggcttacaagtatctatttgagtcccctctcattatgattttaatttgcatttccctaatgactaaagatgttgagcttctatacatgaacttggttgccatccatatatcttttttcttttttcagagacagggtctcagtctatgggctacattggagcgtagtggctgaatcctagctcactgcagtcttgaactcctgggctgaagcaatcctcctgcctcagcctcccaagtagctaggactacaggtgcataccaccatactcagctaattctttctttcttttctttttctttttctttttttgagttggagtcttgccctgtcgcccaggctgaagtgcagtggcatgatctcggctcactgcaagctctgcctcccaggttcatgccattctcctgcctcagcctctggagtagctaggactacaggtgcccgtcaccacacctggctaattttttgtatttttactagagatggggtttcaccatgttagccaggatggtctcaatctcctgacctcatgatctgccctcctcggcctcccaaagtgctgggattacaggcatgagccaccatgcccggcagctaattcttaaatttattttattttttggagatacaggatcttgctatgttgcctaggctggtgttgaactcctggcctcaagcaatcctccagactctgcctcccaaagctctaggattataggcttgagacactgtttttgtttgattatttgctttgttttgttcccctggccctggagtgcagtggcaagatctcagctcactgtagcctctgcctccctcaagcaatgctctcacctcaggctcctaagtagtggggaccacagccacatgccaccactctcagctaattattgtattttgtgtagagacagggttttgccgtgttggccaggttggtcctaaactcccaggctcaagcagtctgcccaccttgtgttcccaaagtgctgggattacaggcatgaaccaccatacccagccctatataccttctttcataaagtgttgtgcaagtcttttgcccatttaaaaaaaactgcagtttttttttttaaattaagttgtaagagttcctaatgtattttaaatacaagttctttgttgcatatgtattttgaaaatattttctcccaccgggcgtggtagctcatgcctgtaatcccagcactttgggaggctgaagtagacagatcatgaagtcaagagtttgagaccagcctggccaacatggtgaaaccttgtctctactaaaaataaaaaaattagccaggcatggtagcacgtgcctgtagtcccagttacttgggaggctgaggcaggaagactgcttgaacctgggaggcagaggttgcagtgagccaagattgtgccactgcattccagcctgggtgacagagtgagactctgtttcaaaaaaagaaaacattttctcccaagatagggcttttcattgtcatgacagtgtcttttgaagatcaaaattctcaattttaatgaaaggccaattcactgattttgtttttttcttaagctcaagcttttttggtcctgatatttaagaaatcttttccaaacctttttttttttttaattttttgaagtattgtgttagctcttaaatttaggtctatgatccattttaagttaattttttatatggtaggctataagggtcaagatttattttgcctcgcatatggctttccagttgtttcatgctcacagatgttttggcaccacttgcagattggcttaatgggtggtcctgttgatctgtttccagatctggctctgacttaccagaccctcagaaggatgatctagacagcatttgcattctattgtttcaactgccacaaatgtaagaaactggtgtcaagtttcctttcacccttcagacctttctcccttactgagtgcccatgatgtaccaggaagtctgatagctgctgtattttatacaaaaataaaaattcgctcttgctttcaagcaaatagcacagaaatcttctacatttcatattttatcaactcaactgggataattgtattttaatttttttcaggtgagttttttttttgcaggtgattttgggatcagatattgagtaaaattgatctgaaactataactcatgaggctcatttacttccattctatactggttgacttattttcagagtcttattcctgaagtatgaggactgaagagctaaaagagaaaaaaatccctagagcatacattatgataagagacctttgagtacaggtgattgtaatctgacttgctctctgggatacattaaagtttcctctccttctaatgcttcaacatgaataacagcttgaaaaagctcagaaacaacagaatgggaattacagtactgttggtcttctgaattcttactatggtagtatatttgcccattttcatgctgctaataaggatgtacccaagactggataatttataaaggaaaagaggcttaatggtctcagagttccacatggttggggaggtctcgcaatcatggcagaaggtgaaaggcacatcttacatggtggcaggtaaaggtagaatgagagccaagcgaaaggggaaaccccttataaaaccatcaaatcttgtgagacttattcactaccacgagaacagtatgggggaaaccacccccgtgatgtaattatctcccactgcgtccctcccacaacatgtgggaattatgggagctataattcaaaatgagatttgggtggggacacagccaaaccatatcattcaacccctggcccttcccaaatcttatgtcctcacatttcaaaaccaacagtgccttcccaacagtcccccaaagtctcaattcatttcagtattaactcaaaagtccacagtccaaagactcacctgaaagaaggccagtcccttctgcctataagcctgtaaaatcaaaagtaagttagttacttcctagattacaatggaagtacaggcattggataaatacacccataccaaatgggagaaattggtcaaagcaaaggagctaaaggccccacgcaagtctgaaatccaccagggcagtcaaatcttaaagctccaaaatgatctcctttgactccgtgtctcacatacaggtcatgccgatataagaggtgggctcccatggtcttgggtagctccacccttgtggctttgcagggtacagtctcactctcggctgatttcatgggctggcattcagtgtctgtggcttttccaggtgcacggtgcaagctgtcggtggatctaccattctggggtctggaggacagtggccctcttctcacagctccactaggtggtgccccagtaggaactctgtgtgaggactccaaccccacatttcccttctgtactgccttagcagaggtccttcatgagggccccacccctgcagcaaacttctgccttgacatccaggcctttccatacatcctctgaaatccgggcagaggtttccaaacctcaattcttgacttctctgcacccacaggcccaaccatgtggaagttgccatggcttagggcttgcaccctctgaagccacagcccaagctgtaccttggccccatttagccacggttggagcagctgtggaaaaggtctctggcaagccctagagacattttccccattatcttggtgattaacatttagtgccttgttacttatgcaaatttctgcagccagcttgaatgtctcctctgaaaatgggtttttcctttctatcacatcaggttgcaaaatttctgaacttttatgatgtgtttcccttttaaaactgaatgcttttaacagcacccaagtcacctcttgaatggtttgctgcttaaacatttcttctgccaggtaccctaaatcttccccctcaaatttgaagttccacaaatctctagggtgggccaaaatgccaccaatctctttgctaaaacatagcaagagtcatctttactctagttctcaagttccttatctatatctgagaccacctcaacctggacctcattgttaatatcactatcagtatttttgtcaaagccattcaacaagtctctagaaagttccaaactttcccacattttcctgttttcctctgagccctccaagctgttccaacctctgcctgttacccagtttcaaagtcacttccacattttcaggtatctttacagcagcaccccactgctgctgtaataatttactgtatgagtctgttttcatgctgctgataaagacatacctgagactgggtaatttataaaggaaaagatgtgtaatggacttagagttccatgtggctggggaggcctcacaatcatggcagaaggagaaaggcacgtcttacacggtggcaggcaaagagagaatgagcgccaagtgaaaggggaaaccctttataaaaccatcagatcttgtgacacttactcactaccatgagaacagtatgggggaaactgccctcatgattcactgatctcccaccaggcttctctcacaacatgaaggcattataggagctacaactcaagatgagatttgggtggggacacagccaaaccatatcaggtagtaagtattccagtcaataattttttcatgtttctcttaatatgtaattaacctgcataactcacaataggtgcagattttaatctaagtaatgcaaagattcattctactttcccacccccaacacatcagttagcaggcaggagaaagagaaaataaaaatattgcatagaagaccatagtgttttgccccagggttgcaagcattgatatctcacccattaccaattcccagtcattgaatgcctacagtgtttggttctgttagagaacagaacatttaaaacacttgactctttagatcatgaggcttacattccaagaagccagtactcttcttgggtgatttttttttcccactttattttatgatgtgcagcatcataacatcacactaacctaacccacatttcaaaaaaatcacacgaatgtggcctaacctatatttctaaaaaaggttgaattcattgccagcattcaataattggaaaatagtccataaaaatctgtattttcagcttctctaggaaaattggaaaatttgggctcacattcctgtgcggcaacaattagctaaactctagttcagctgcccgctttaagaccagccatttgtactctactgtacccagagggctttcctaatggcgcctttcttaagtggctcctccaaagcagtggttcctaaaatctggcttcccactggaataatgtgaggagcttgaaaagttactaatgcctgcatttcaccccagagattttgatgtaatccatctggggtgcagaccaggtattgagatttttataagctcctcaggtatttgcaatgtgtagagaaaactgagaacccctgtctaagatagggcttctcaaagtttaacttgcataggaatcacctgataatcttgttaaaatgcagattttgattaagtatgcctgggatagggcctgggattctgcctttctaacaagctcttacatagtgccaaagctgctggtctatgggcctcacttgagaagtaaaggtctaagccatttgtatttcacattggctttgaaccctaagatacattcttaggtttcaagtctaatgaaagctaattctagcactcacaatattgatgtagctggaatgatgatgccaaatgagagtatcctaccatactttggggagaattctttctcagcctatagctactcagcctttcttgacattggggggtccttgacttcttatgccttgtatgtgacacccctgtatcacccctttcgttgcaaattgtacatcttctgctatttcgagctccttgctggtgtcactacctgctggccaacagtttggccattactgattgaaccatggtgtttgggtacttaatgtgagtattttattgcagaggttttcaatcagtgtttccagaagccttagagtaatagttctgaaaccatagggcatgcatcagatcacttggagagcttattaaaatacagattgctaggctccaccctcagcattcctgattcagtgaggacaatttgaatttccaacaaattctcaggagatccagatgtttctagtccaaggatccagaggttctagacagaaggaagggaggtggtgcaatgggcctcttggtcttgttacatgacttcttatcttatagttgtatttggggattctagactagattttattaaataaaaagattatttttaaaaaagcttgaatactgctgttttgttgcctttgcttttgtttcatagaaatcaattgaaggtgaaaataaataaaaatgctaatactagtgatatggggagatatcatcagtttaaaacaaatgaaatactgaatttatttagtatatgaaaagagagccttattttcttcccttgggacactctttatgatgaaaaaacgtaaaggaaatacaatgtacgctggaaataaattactaaagactgtgtctaaatgaggaggtgcatttgggaattttattgtttttaggtttgcgggtgaacagaatcccactgcaatagtgcataagactctttccagctatctccagaagaaggagataactagcaaggttttcactgttagagtttgttcagagcggaacctaaaggaaatactgggaaggtcacagcagtttcatctcagcttattggattggatcaaagtaattctactgcaaggcaaggtatatcattccatttacagacagagaatgcatgaagtccttcatttcacacagtaggtgtgaagaaggtaccttggtaaatttcctatttgctttcagataaagtgtattcttaaacatgatgtgggtagctgcctgtttttgtgtcgcctctgcaagagacatcttggaataatagaaacaccagtgtctgaatagcctaaagtggagcttacttttctgttaggtgagtcacctttaaaaatgatattttttaaggataagcgatgaattttaggacgttcttccctctacttccaacgtccacaagaataaaccaccaaattcaacgttttacagaggccaagtgcttaggttttgtgtgtttgtttttaagagttttcttgcaaggaaactgggagggaactataaaagggctttaggcaaacagggtgggcgggtgcagggctttaagctgcagaaaggagaatctggaaagagcttttaggaagcagattctcacatgttttaatatgaaagagtggcacacgtggtgctggcattccatcttaccatcagtggaaggtttgaaccaacatcaaatttttctggagcaacttaggtaattattacttgaagaatatgcatttcaaaactaacacctttaagagacaatgtaattcacctgcgcttccccgccccccccgcccgcgccaaccccaccccccgccaaccccgcccccgactccgcgaacgccgaggggcccgtggtctgcctgagtgacctccatttgctctgtcatctcaggactagaagccatcagccagcgtacgccctcagaaaactctcttcccttctcgcgggtccgcctggctcccggaggcggcggtgccaggctgccggagttagccagcggcaggctgcgggcgcccgtccctccggttcaccctttcacccctccttcacccccggagcgccaggcgggtgccgcgggttttccgcccactcggaaggcagtgctggcgagaccaggaattgcagggcctctccgctttggcgagctctggaatccgagtcctccccaccccagccactctgctggggcgctaggggctcgaaaaagcctggggttggctgaaagacactcggattagagacgcagccagcctccagggaggtctgaacttgtcttcgacctccccgaacccctccgcctctgcgctgggagacgcccagcagccgggcgggcccgggacgtgtagagccagagcactccgcagcggaggcagcgcgcggcacggccgcccggggcatccccgcggctggggggcggaaggcgagggcggtggcaggaagggtccgccaggcctgagctcgctcccccactgccagccgccggctcggaggcccgaggcgtgcggacggaaaggggcggagccgcgggctctggttggtgtgggctcgggggcggggcgcgcggggccgggccggaggcggggctagcgccgggcgctggagctgcgggcgcacggagaggagtcgccagcagctggagcggagttggaggaagcagcggcagcggcgagggcggcaggctagctgtcggagacggcaagcacggatcgggcacggccggcgggtcgcagccgggctggaggccggtcggaaccgagcgggcaggaggccaccgctgcagcgcgggccccgcagaggaaggaagccggcgggcggggtaggtaggcagcagcagccccgggtgtgtgtgctcgggcgggggaggcggtgcatgtgtgcacggctgccgcgactctcttcctgtcactggcagcggcttctccttctgcagagccccgccggggggaagcgggctggccaccggccctccccgcctccggcatctcctggccgccgggcagcactacccccgcgcgcggccggcgtcctgtgagatcccggccatcctgactcccgtttcccccgtcctcctgcgagctggtcctgcacgccgccggtcgcatttgcccccggagttgccaacgagctcgggcttcctcccaccctccgtcaccgcacacttccgagggtccccgctgtcgccttgctgcagttttccggggcccctcaccggaggagagcgccctggccgctgccttcgtgttgcgggaaggagcgctcccttcccccgtggccctccagctgcagccagggtcgctgcccgggcccttcccggggcgggcgaggcggcggtggtccccggagctcgtcccctaacccccgccttccgaagtttgccgccctcctcttccggggtgggggaagtgcgcctcggggcggttggtcgctggggccctaactcagcgtttattgccagccaagcttgggcaggttgttggaggcatatttagtggggtcttggaaccgcccggaaatccagcttttggaacgtggggcgaggcgggagggacctgcccagcaatatggagccggctggggagagccagggagcctgcaacccggagctaaaatatcgtgggcaattctctggaaaccacagctctaacactagtgagctctaaccacagctctaacctaagctcagaaactgcccctcagatcacaagacaaagagaacagaaaacctctggccaggcactcctgtacagaaatacactttgataaccagaattggagcctgaaatgcaaggatatatgcagaatggctgttacgtgttgaatgcagaatgtgtgtcaactgggtttgggggaattcttctgtttcccggggcgctattaatatcggaaaggtctcacttccaccgttaatcccttgagctgcagcgctgttggtgtccgagtgtgagtctgctctttatttgggggcttcatgattttaggttttttttcttttttctcttcttttcctctttgtcagccagtgcgaagtaccaatggataaagcagttccgggttttgaatgcaacataagattgtcattttggtgtgatgaggctcaagttttagtaatcaggagggatattcacagagcttattggtcaaggcttgatgtggagttatattttaatgcttcattagttctgttacgttttggcaaccttaaagatggttagatattagctaggaagggttggagtgggcagacaggttcatttcttaagcaggttattagaatattagattgtcacagtttgaattactaggaatttggtgacttctgcacagaaggccacaagtatcttttaacattgaaaaaggaagaaaaagcaactcactagctatacaactttttgacagattacactgttcttgaaaaaccgtttagaagaaagcagataagagttttcttaggtgcaaaagttgattaaactttaggaagcaagtgtttttgaccagtataaagaaaataagagtaatgtgtgggggtgtgtgtgtgtgtgtgtgtgtgtgtgtgcgcgcgcgcgcgtgcctgcggctaaagtttgggaagaaatgttggttcagagttaaggtttaagttggaaaggccagtggaggaggctccctgccttgcagaactgctgggtattgtcactgcttgcctcttcagcttttatatgcaggtaggtactagataatcatattactttttccagagaagtggatagatttttatgattgggagaaagtttaatgtatctgatactggcttgcaaagtgtaatgtgcatttacttttaactttcatcttgacttgggacctgttcttagttgcataacagaactctgcagtgtacacactgctatttgatgttttatctgctttttaaaaataatgatatcagtgagtctcttcctatccatgatgctgtatagtcagtgtaaaaagcattttgtttcccatttattgaatgttttttctttagcgatttcttgagtttaaatatactaagcgcaggaaatcctcacagaataaagttggttctgggaaacagaagtggaacaataagttataggaatacatattttgattatagacagtgatgatggtggtatgcgtttatcttttggtaatgtcagtttcacctaacgtgatttttgaaggactttgaattgtaaatgcaaacctactcaaactaacccaaattttgtactgttaaaagttttggccatttctttacatttttccatgactgtcatataatttttaggttgatatgttgattgaacatatcaacctaaattgatatgttcaatcaacatattggtcgttcaggggagtattgtaaaaaggcatctactctgaaagattgttcacatgatcattaaaataggaacaattctagttcagcttttattgtgtttgcattttgtgatttgcaaaatacatgttttattgaataaagagatggtgaatgagcaggctgaaaaaaaattgatttttatgctcaagtagaatatagccagttgagataatgtttgtgttgggttttggaattctctcacgtcaaggcatacacaatgcaaaagatattgtatgtttcatatgagctcctccagctctccctcttgcagggcacagggtttgcaagtgaaggcaagagaatgaagcattttaatgaagccctggaagactagaaagttagttatcaatggaaggaattatcaagttagtttttactttagaaagcagaatataaattatatcacagctttttatcaaaacctaggttttaattaattttcaaagtattcatatcatttactgcattttcccatgcctcctttacgtacaccctaatgccctaatgtgattacttgccatgattctgccaatacttgtatggagttacttgcttaaaagagtggcaattaacgaccatttcatgtacattaagccacatgagctgaaaaaatagactatatagttacttataaacttgtctgtatggcctttatttatcccctaggtgttaggtgtttatttatttgaaaggctagagtgattgtagtatagtgttattggaaaaaatgtctactgtagaaacatctttggagattttattctgctagcattgttttccttaaagtaaatcaaatacatatccacaggcacctgtagtcaaaatagttgtcaggttaatgatcatccaagagagtattgaagtcacaggagtctggccacagtgtgaggaggctccaccagtgagtgtagtgagttaataaagccaaggcatctggaccagccattccttgcctgttgtcttcctccccggatgtcccagtgtcccagcctggggttctgccccaggatcaagggctgtaccatgaggacacagctactcatctctaaatcctggggatgcacacacacatgtacacatcccttggcctctcccaggcctcctttgtcctgacctctgtagagccgtcctctacctcaggtaaggagagaactacatgggcaaagtccacactcagcctttatctatttactccaaaaggggtttaagacagcgggagttttattttagctagattcaggattcacttagaactgtttgcagagttaagaggcaatgcagaagaaaatccctcacaaatgtttgttcctctgttaaatctgaattgtataaatggcagtaggtgacattcaatactaatagaaataatagtaatataatagttgcaatttactagctatgtaactttaggcaaaatatttaacttttatctgcttgttttctcatctgtaaaatagagataattgttgtacttagagtgattgtaatggttaaatgagttgatatatgtacaactctgagaactatgtgcctggcacatagtaagtactatgttggcattaattatcctaagctcctattatcaagtatggagcgaagtgctttatgtatgtcattttgttaatcctcataatgactctgtgggctgtaggtttgcttatagctgtctcacagatgataaaactgtgccacagagaggtttaagtaactttcctgaggttacatatttaggcacaatctgactggggcagctgcctgaatctgaagctcagtgttcatactaaccttgccaagaagtttacagaatagcatctttttttcaaaagaagagagacttgaagtcatccccttcagtcctctcattcctgccccctcaggtcctcttcattgtgatgatgcagagaaccggaatggtcagcctcatggccttttctgggtgataggatctgtctgtccctcaggtcccagaagctacgtcaccctttctcccagcctccgcataatggctactgcgtgcctaagcgttgctgtcacctgggccagggtcattcctctgtgtttcctgcagtaccttcccctcatgttggctgctttctgaagagccctagctccttgttgtgttacctgggcttgtgctacctgttctcctctccctcgccccacaaacacaacaccaaaagggcttgtaggcgagaattacagcctatacagcctgtttacccacaccacacacccagccctgagcatggcagcatgcaacacattctatttagttggttggtttggaaatgaatttgatgtctattatttggggttaatctcagcccattattttcattttattttaattgatataaagtccacataccataaaattcaccctaaattcatcatttcaaattgaaggcaatttattatgtttactaggtgctctgggttgaatgtgtcccccagagtttacatgtcagaaatgtaatccctaatgcaactgtgttgggaggtagggcctaataggaggctgtgctctcttgaatggattaatgtcattatggcaagagtagattagttatcttgggaatgggcttgttataaactcgagtttggccctgtcttgctgtcttgcccttgcaagaggacataagatgaaggccttcaccagatgctagtgccatgctcttggactttccagcctccagaaccaaatatacttctgttgtttataaattacccagtctcaggaattccattataacaacacaaaatggactaagacactaggatattttaattttgttcgtcttgattttcatgatttctgggacaccatgatttggaaggtaaaccatttttaaataatgatttttttaaagactgtatgaatttaggtgaggagcttgacctagactctgaactagcacactgaagttaaaaagatggactgtagagagatatgggctgtgggcccaggaacccttccataccctcctgccttggttgaagacccatttcgtgctgccatccaatgcctaactgctaatttcattgggagatagaatcacatgacttggatatattcttgattaatttaatgtgatttaaaaatatcctgtattcctgcctgtccatcaagttctccaaattcttgtcatttctaaatggagaatggagtaactcaacaaagtcagagagggcttttttgtttggctctttgccaaaatgcctataggttagagggttacacagaaaatctactttacagcagttgtacgttaagtagctgtggattgctatttgtcaaacatcagaaacaattttattttggggaatagaaagagaattgctctgtatgttagcagggacagaaaatatgcttctgattaatgggattgcaggcagtcattagaaggattgaaagactggagaaaaattccttaaaattttgaactgttgcatatgatattatataagagtaagttagtttacttgttcgtaggattcctttataccctttgttacaataacttatgcatgcactagcttggagcctatatcacaaaactgccttggttatttgaaaatattacattgtagataatgttatctacatataaaaagcctttgctatgtgaataatcatgtcagaactgggtaaaaatagtttagtgggcaggtatatgtagcaaaagagaatagaggcatgatagagtgaatctgaggaaaaatcctgttgatttggatagtttaggctccaggtcgatctcggtaggggtggtggttacacaggtattaccaaatacctcaggctgctgggtcttctgcagtactgtgaagaatttgaggatgagagaaaagagaacttcccagtcctctagatgtgacagtccttgtggcagtgccatatccccctaaggaggagctgggttattggaaattgttcagtggaggggcctgggatagtggcaggaggcagaggtgctaaggatacaggtggcagaagcgaagctcatagagcagaaataggcaggattccagaagtgggcagccttccagaagtggtgtgcccagtattcttttattcactagtttatggacttctttcgcagggacacattttaatgaagtctctttggaagaaaatttgcatggctgagatgctgggttttggagttgatggaactgccgagttaaaatagcttttttgtgtgtgcaggtagtgtgaaagagccacatacactatcagtaaagccgctgtctgagagagttaaagaggcagacagacagttaaggttaattggagtgatcagcttgtgcaggccacgaacctgcatcatccacaccaaagcaagttgagttcaggcagtagatgctggaggtgttaaaaatgggacttacagagctagactgcctggatctgaattctagttcctcttcgcaattgctaagtattatcgtgacagagatattttctgtcctatgttaagtgagactactgatagtacctgtttttatatagttatctacacacacacacacatacatatatgactatatatatgactatatatatatgactgtatataactatatatagtcagcatcatcatatcatctaatactaattgggagctatatgtgtacaaactcaatcatcatcatcatcatcatcatcatcatcatcatcatcatcatcacccaatacttaaccggagttttatgtggattaacccattcagtcctcaagaatgacagacgtcaaaatggacatggcagtcaggagaaagtgtacaatgtgcaaaagagtaggggtggctgccttctctgtctagctaagggctctctacatcttatcaccatgctgtccagtccccaccccaatgacttgactgctctccttttttttttttttccacaacattgccctcagaccacttaattgacactgactaatggctggccttgaattaacgtctgcatcaatggatggatgccctgtttgtatccatcttcctggccttactttggggtctcagaagacagaaatggtgtgttctatttaccatcctagagtcatagaagatttgtggttctttttatcagatgaggacccagagttctgcacagggttcttcttacccacaaagtaaggttcttcttacaggtggcaagggagagagaatttgtagagacctttagttctctgtcacttcagacagggattgcctctctggtgtctagcctctaaaagtcatcatgttccttaggtttctatttccctttgcacaaatttagcctcaggcagactcaagcacagcttttaggtttgtaaaaccttgacaagtcctggagccttttcttaatacagagccccctggcaaggaacagcttcagaggtaagctgtgagcaggggcttgcttgatggttcctggaggattgaagatggggaagagtttgttcattatacttcccattctattaagaatcccaccaaactggcccactgggtggctggaataaaggaagtgttaggaagcagctggcataaagatctacccagcctactggttgaggatttttttttcccccctaaaagacatacattgccaggaaaagctaacaaaaatttcaaggcagatttggaggaattaaattattcttaggcacattgcctggtttctaagcatttagggatatgtaaatgttcatgttctttagaggtctctgtctcttttgtacagagtacattagtactaaaaatgagatttgctagttctacattttcatgtgaatttatgcagtgaatattcaatttgattctggatctttcaaaaggaaaggctttctttaaacaaataatatagcttatttttctgatatgctctattggttgctttgatttttttctccgacaactgaaatgcgaagtagagtactatccccaattaatattcttgctccacaaagacttccagtgtttgtttttgcttcttttaatatgtaactctcctaagtgtgttattgtattacagctaagaggctttacccatgtaaagttgaatactttacacttctgaatgccaacataacaattaatctatgattagattttgcttcttaagatgcctccactgacgagtgcctgtaatattaaacttctaaagtgttccactctttaaaacttataaaagctctctttgatatagcccactgaaattgtgtggctattgtttttattgctttattgtgcagccagcttaactgaaacctttgggtggcttttactctttataataaagataacattgagaaatgcctggagtacaaagtgtatatgtgtacatgccgttctcagccatctactctgacttagtaactctctaattcccttgcctccactatgtttaagaacaaaaaagaaaaacacttacatttcacatttcctccatcaagctgtctttatagagtggtctgtagcaaccattgctacttcctctctaatattttttaactccttaagatgttgttgctgtcctcactgctggactggaatctgcgtgatgattccatcatgggcgaagccccaaattatttagccttgactcagtctctcctgtctggatgcctttgcaggatttagtcttagggatcacattttcctacttgaactcttcttccttgtttttgggatgttgtctctaaaccttgactttccttcctcagttacatacattgaacttcactatttggcccttggatcatttttttttttttttaacttttgatttgtccttgtgagctcttccattccattgaattcagccttgcctaattgtggccgattgccaaatccctagcatgtttcctcttctgaatcacagaccagggtttcatcagccactagcacacttgcacaggggtgcccagaatcaccgtcagcccatcaggtcacctggcttctctttgcctgatagtgctccaaactctcattaatgcaggatcaggcaccctttgctcctctcgttctcgccgcacatttaagcatttgccacatcccacatgttctttctctgcagtgtttatttcactcctcccctttccacacctgctgctgccaccctggtttgtgtcctcactacctcttggccagacctctgcaacacacctttctcgcacactgtggttagattgatattcctggagtgcagctctgatcccgttgctcacttttcaccaagccctttccgtgttccacactgtgggctgaattactcacaaactcagcatgggcatgcgtgatgtcctacagcccctacctaaatctctaaccccaatcccactgctccctctttggctccagacggattggactgcctgttctagctcttctcagaatatgacattttcttggtcacttctgtaactagcgtccgaccacacatgccattctgtcttcagattcctgcagttagtgtgctttctccctcgtttgaaccctgcagtgtttagtttctgcctctcttatgacatgtactagtgttgtggctctgtgtactctgagccacattatcagcgataatgtcacattatcgctaagacattgcctcatgccgacactcctcccctctgcccccgcccggtgttcttagaaggcagggactgccttactaatctctgttgtgtcaagcaatagcacactggcctgtgtctgtctgccaaatcgattaagtacttgttgaatggaagtagaaattccaattaacacagatggcaaagtgtgctgttcattcttaagtctcgtttttttcattcctaggtgaagctcgtgtgtggagtgccacggtacaatcagacgacagatggacagtgtgacaaaagtgtcagaaaggattgggcctcgctgtgagagtcagcctggattcaaagtgttgacaagttgctgaaaaggaagccagtgagaggactgtggcacgcagaggaagtggagccctgtcttcggtcacaccattgatggaggacagatggacagccgtatggccagtcacctctcctcttaaacctttggagagtggtcctttgtcctctgctggacacataataggaattctaacacattctctgaattcacttttcataaaaacgtaaaatcagactgctctgtacaaccaggctcaactgttgcatggtagcagatttgcaaacatgagtgctgaggggtaccagtacagagcgctgtatgattataaaaaggaaagagaagaagatattgacttgcacttgggtgacatattgactgtgaataaagggtccttagtagctcttggattcagtgatggacaggaagccaggcctgaagaaattggctggttaaatggctataatgaaaccacaggggaaaggggggactttccgggaacttatgtagaatatattggaaggaaaaaaatctcgcctcccacaccaaagccccggccacctcggcctcttcctgttgcaccaggttcttcgaaaactgaagcagatgttgaacaacaaggtcagtattgatacgtggttgcttaatgactccctttctttttctttttaaggaaaagtcttaagtttgggttgagtcgttatgttctgggcagaagttaccttggcaactgcacctgaattgatgtgtggtgcataaaagcttggtcaatcattacacaactagaaatttgtgtttgtggggttggaagttgttataaaaatagggacacagtatccgagaacctgtttagtgagtgtcgttgaacactattattatagttgtcattgaattaaacatctactatatttcttatttttgtaattggcattataggcggagtattcctagtctgaaaatatgaaatctaaaatgctgaaaaacccaaaattttttgacacccaaaggaaattctcattagagcattccagaattcagattcagtggtcaaggggtataatgcaaatattccaaaatccagaacaacatgaaatctacaacacttctggttccaagcatttcagataaggaatactcaacctgtgtatatctaataataattttgggaaagtggagggtaagtctaatataagtatatttaacatgatttgtatggaaaaatgtagagagtaataaaatgaccacagaactcggctgagaagaaaccattgtttttataacctggtatctacctcttggtttcctctccaggatcgctgtggccaaagctgaaacccaatcctatagttagtataaaagtaaagggatttcacttcctttgtgggtagtgtcatttgtagcattaatgcctatagtctggttcgccttcatgagggggaagaaaaattcactgaatactttgcttaaatggaaaccaccttcattcaaaaaccacttattgcttattggagatggtccatacttgcgcttcaggcacagctgtgtctttaaggtttatcttctgttcggtttcacacagagacaagccttatgctcagctttgctgttatcagctttgtcaaataccggtttcctcactagtaaatcacacgcatttttcttttttctcttgtgtagtcttctttcttagggtctaagaagggaatgggaaggaatggtttaagatgggtgggcctaactgcagtagttatatattgaggagacctgactggcatcacaggatatttctggaagagattctgataccactagtaagctattataccttctttaatgttgccttattctaacacaagtgaataagacaatgagaacagagaaacagaatgcaagggtaagagctgcctttcagtattgagtagtaatagattgggaatattgtgttaaaatcaaggaatttattaatgatacctgaagggaagcccttttctttcccatacccagcccaaagggatacttatttcataaatgttatactttataatgttcaaataatatcttttattatattgttcaaaagccaaagttaatttttctttgcagatcaatcaaaaaaccatgactctccgcacatacataagtgattttatcaaccattgcagcacttagcagattgaagatacatacgtaatcgtttttctccaccaagttatatattttcaccttttattttttttaagttaaaaacgctttcttcagtagcctaattccaaaggaaaagtgatttaatttttccgagaatacagagctttacagaatcataaaaatagttgaattagagaagattatttaaaaggtggaataagggcaccttgtcaagattagttacaaaacaattttataaaagcagtttctaaacaaaatttgcatttgataattgctatcaggtgcaagtttctttggctctggtgtacagaaaagcaagtctttccttataggaaaagtcattttctctttttatatcctaaactattttataatgcttgctttctcatgtaatgtgatgacaattgagatttttagcagctttttcatttttctttaatacatggaaagatggagtgaaatgaaaatttttagcagaattcaagaaagagacccatgataatgtgcataaaagtattagagcctgaatataaatgagaaattagtaataactgaaagattgaaaggagagtgttgggggggggtcatgtggggagtataatactaaacattcaattttctagaagtgttggtcttgtattctcatttaaatattcctatgaagcgagaattcaatagctcctatgagttgcatgttgaattcatatggaaagtagttataaggacaaattttatatgttagaacctgtgagactagtttcttttgcctccgtttgtatttctttgaaaagcttttgcagtgacaaattgtgtgaaggcaagaaatgatagttctgttctattcttaccataattgaattctttagttcttttctttttttttccttttaacaccctccacctccacctgacttagccagtttttcatgttatgctgtgtttattgcatttagaaggttattcctcaccaacccccaccccaggtctaggaaccacatgcagttttgttttgtggacttggcacacctcgttaatgggcagcagggtagacagagggtgcgaggacagcctgcatgccaattgtgtgtctgtgtcctgctgagccttgctgccctctctgtttttaaaaggaaattgtccttagactctggccaagagtacgttctgtgagagattcctccctgtacgatagtgtcttacttttccactttgcttgtatgttcttggaaataaagctgtgatatttaactttttgagagaaagagtcaaaaacccattaggaaatcttatatacggcactgtactttcttccaatacattttgcatgcagtttttaggaagccctggcatatagattgaatgaattgttttaattggataattttggatgtttttggacttaaatacattcagtaagcatggtctgagtccttattttgtgctggaaagcaaagataaaagatgaaatcaaggctcaagagccagcatgccctgagatgctctctcatgcctctcttccacctttggagctgtgctttttctcctctgctagtacagctcttcccctagacatctgcctgactgacccactctcacttctctgctcaaatctttcgtctcatggagtctggctctactcacgctattctatgctgggacctacctctctgcttttgcaaatcattgattacttaacccacgatatcgtttacttattacgtttattgttcattgactgttccctctgttagattttaagctccataaggggagagatctttgtggtcccccattatcctaagtacctaggacagtgtggtagtttcccaacatgctggtaaacaggtgctgctgcagctcatcctacagctatttcactttctgcattgcttttgaaattgaccacgtgctctgaatgtcatgtgcagtcatacaaagcttaatggcccatcttgttttagaaaataacagcttatttgttatccacatccttcatctgaggcatcctgccttggccttaaccattgcctggtatgtctccagaactctttattttcttcccagggcctgggacaggtagttctgctggtgggaaagtgcattaagctgatagtaccttcagtcacttaagccaagtgagtagaggggctgtcatggtcagcgaatatcctcagggcaaattctgtgccctttctcccatccttttatctccttccctttgcatgggggctaaaattgccaatatgaggatgacgttttattttatttttctacaagccagtagagccctatgttatgttcttcggagagaacctcttccatgttttgtttggataaagagtgtgctgggtgtgcaaggtgggtgttacatgtcctcgggtgaggcagctattgaaaggcaatcttatggctctttctgctttagcttgctcagatcctggcatcccatcccgctacaccaaccccattcagccagggtcctgtattttctcttgtacacaacgaaatgagttgattgaaaatggggatatagggatatgggaataaaaatatattcctctgtcatatgtaagccatccagtggggctatttctcaagacagtggttttaactcatactttgagatcctttaattaaagtcatgctaatgcagaatatttagacgggtgagagtctgtgcccatgttagtttgtgcagtgcagtgaaacctgctaacacaagagattacttactgcatacccacctccatcctgacctgcacaaccctccctggctcctcctgcagcctctgacagtggatttcagctggtttcaaacctaagacataaagcatgcatttgacatggcttacgctaaattttgatcaaaatcccttttaaacagaaagaaaaaggccaccattggtgttggttttcatggtttcccaaggcatgttattgttaaatttttcacattcagcatttgagtgtcccttcatggttgttgttccctgtccagaaagcagggctgcaataaatcacaaacattgactacactgtacagaggtcacagaaaatagtgacctgatcccaaattacacacctctgctgagcccgttggtcataacctacgctgtctccttgaggcaaatagtgcttgtgcaagtaatttgctttgcttcacaaattcctgcctttacgaattctgttttctttcagaatatactttctcataacattcttcactcttccttcctacttaagtctttgctgtgaacttggaggtttgtcttgttaagcccaagtgatggggaaaaccacccaatttatggtgctgactgctcattctgcatctatcgaccactctgtttttgcgagaaagttgggtcagttacaggatcttagaagataagggcctttgagctctgtctctaacttctgaccacaagaaaagttcatcaggacattatggagatttttacccaggcatgaaaatttaagtgtttgccctctgtgtttcagtaggaaatgaaatatatttctactgaaatataattgattaaagagtgtgtctggaaaaaacaaatgtgctaattattttgaataaaatcagattagcctaaccacttagggtcacagaatatgtcatttgcatattaaattacttattgcaacacagttcaccctctcatgagcatttatattctcaatacattcttgattttttaaaaacattttttctgttaactttgtttccctaaaaatgtgtaagagaaaggaaagtagccctaattagcgatttgtgtatccgtggttttttgaaaatgaaattgacaaaaagagacaggatgctcacttttattgctttttgcaggagggttcttaccctgagctggcctggccactttaggaattcacaggcacgctctgaggggcctgtgagtagggaggctctcttacccagaggggagaggaaggcatttctccctccttccctcagtctgttatttgaagggaatcacttgaactgctctcctagagctgcggtgacagttaagtccagggttgcagaataagacagtatttgaggagaagaagctttctgccaggtgtctgtttctgcctctgtcctttagaatcacagggttatggtaggcaagttatattttcttatttaagtgaaatgtttgttcagatgcttttgttaaggcttctgttctatacacttctttctgtgttcttttttcaaaaatgggaaaagggtccagtgtccttatatgtatatcctaagtaaagccctcacacacctctgattcaaataggagttatttaattagagggagcatattttgttttctggcaactaagttaatgttgatattctaatacaattttctttgttataaatatggaactctctatttaacttgtcaatagattctttgataaatttgatgtcagtcttctctggtttctaggtgatgcatctttgtctacaacaagagacattctgattagtaagaatttcttctctgagttagaaaaaaaattagaaattctgaaattcaacaacaaatgctgacttacatctgctaagtagcacccaaaaaggggagaattttttacctatggcaaataagagtgccaaatgtgacatcatttacatatccatgttttgattagtaaaaaccaaacagatgttagcagtacagctggctcttgcatatatgtgtatctttgttgctaacagatttccatggggaaggatgtagcactggtctgaagtctcagataggagaagataacatggtgtgatagcttgaaatgaggagcataattgcatgatggattatatctgaatgttttgaggtcttgagtttatagcattcgatatcaaagcagtccttaggctttcaatagaggaggacacatggagggggacaaagtgaactagaaatgggctttatttcaattgcttgggtatagtgtacctaaaatgtcaagttgtttaacagaatatcagactactttataaatgtgttattccttcttaccaatttatgtaatattttatttttactatgaaaattccatgcagtatacaaacagtacgtggaattgtagtagaaacattgttaaaatataactttgaattaaaaacaaaacatggtatacattgttatataatggataacatagtgtatacattgttaaaatatatccttgcaattaaaaacaaaacaaatcagctgcaaacctttgtttaattatgtatgcagaactttctcccaatggctttataccacctaaggcatggctgtgattttcaggaataccctctctggactgtttcttgcttggaggtgtttgcgatgtatttgtatttgtctgtctatctattctcagttggtagattatgtaatgcctatagattattctgtcctgtcacagtttgattcattttgaagttataactgtgaatttattacagcgtattgcaggagacgtaatttgatgatcaaatctgatatccaagatcgtaaagaatataggcataaatgaaatataaatctgtgatatattatttgaatcagaaattccacattgctttgctttctataaattccttaacgttctagttccagtgttctctaattgtaagatgagaagctaaatgctgtctcttttgagtttcagcagtttttgttttaatccttctcttcccaatcagaagaactgtcggagaaataagacccagaaaaattggttctcactagtagtgtttccccaataatgcaacccagaagccctgtatatgagaataagggaatgtagtgagaggatttatgcagagaaacaacctaggatggttggaaagatgtacttacatgacctcattgcacgatctgattggagactggtccatggattgtatgggattattgcttatgaaagtgcccacctggtatcaagtttttgcagatgcatgcggtgtatggttttaagacatgtttcaccagtgtgaatatttaggctctacttctgttggtgggcagttagcaattgctggtatctaaactggtttgagacttactgcctcatttgaacagtatctgtgcagtagcgctaaactcgttgacatgatctgtactgagagttcctacagatttgtttcatatatatttgttaaattttccaaggtaagtagagagtgatggttataacatttgtttattcagacccctctaaatctacctaagaggtaacatgttagcataggcattagacaaggctgcattgtgaagtcagagtgactgtctggggttgtcactgtcatcttccaagctttctcctaaagaagaaaattgacataatgctctcagacttggcacatgggaccagtgccacagcaagcactggttctagcctgctactggtttttggtaaaatgcagttttcagaactactcaagggtgtaataagattaatttttatgatattagatataatatgttaactttttagctattgttaatcttaaacactgatggctttatttttattctatttaaaaaaataatttttgaggccaggtgcagtggctcacacctgtaatcccagcattttgggaggccaaggtgggcagatcacttgaggtcaggagatcaaaaccagcatggccaatatggtgaaaccccatctctactaaaaatacaaaaattagctgggtgtgatggtgcatgcctgtaatcccagctactagggaggctgaggcaggagaatcgcttgaaactgggaggcagaggttgcagtgagccgagattgtgccactgcactttagcctgggtgacagagtgaaagtgtctcaaaataaataaataaataaataaataaataaataaataaataaataattttcaatgcttaagaattttttatcagtaaacagttcatttgaatttttttttgcattcttgtttcccaactatagaaacatagctgaatatttgtggcatcattaatgcataatttcaaagcattttacacattgttaattaaatctcaccatgttctttcaggtagcaaaaagtaagtttatttttgattcagaagtatttgaagaagttagaacaagatgattttattgctaaataataaggaatatctgtggagtaccaaggaatgagatataatgaatttggttagagtatatcaaagtacatattatagtttttgtcttacacttccctgtgggtctgtttaactattgaaaatgtcttcttcaaaatgaaccttaaacatttgcaaacttactctttgctaattattctgccaggcatttttttttttcttttttttttgaatcttgctctgttgcccaggctggagtgcagtggctcaatctcagctgactgcaacctctgcctcctgggttcaagcagttctccagccacagcctcccaagtagctgggactacaggcacatgctgccacgcctggctaatttttgtatttttagtagagacagggtttcaccatattggtcaggctggtctcgaactcctaacctcaggtgatccacccacctcggcctcctaaactggtgggattaccagcgcgagccaccacgctggccctgccaggcattttatagacatttttcatttgacgctcacaaccaccctgcaaagatggcatattataacctttttttgtttgtttgtttgtttttttgagatggagtctcgctctgtcgcccgggctggagagcagtggcacgatctcggctcactgcaagctccgcctcctgggttcacgccattctcctgtctcagcctcccgagtagctgggactacaggcacctgccaccacgcccgtctaattttttgtattttttgtagagacggggtttcactgtgttagccaggatggtctcgatctcttgaccttgtgatccgcccacctcggcctcccaaagtgctgggattgcaggcatgagccaccacgcctggccctataaccgtttttgagatttaaaaactgaaggtcatgtgattgtgtaaatatttaaaaagtgatcatattaaaaaatatcatagtgatggcacattgataagattcaagaacattttgggcaaggcaggcagtcatgaggatctccttaagcagtctcttgtgaagtgatcggtaactgaattttgctttttgggtggtcttcaattatgtctgctttatctgttaggtttcactagctattacattcatgcaactccagaaatttacctccaatttatatgtgacttacaacattttcttatgtctggtaaatatttgaaaggattgaattacaaagagacggataaggccatgaagctaagacaaagttttgggtatgtgcatgtaaatgcaatttttctcaggaagaaatacaccatgatcagataactcaaaagttttataaccttgataaatagatttaccttcgtttctgttgtttttgaagaagttaaatgtctgctttaaatgtttccctgagtttcaagttttcttatttcagactcataattatatcattttgattaaaatggagcacagactggagttattacttgcttaaaagccaaaaacttgagggtatccagcataagaattgtgtgttttggtctgtggatagcagctgcttgaagtccataaaaacaagaaacctgaagttgattcagatgaatctgaagtcttgtacctgaattatgtcaaggttagcagtaaatgccatttaaaaagactgagtacaaattgccaaattcctttgaatgccaaaccatatttctcaggaaagttggccactgccaaatttataacatttgtgtttctgttacctgaattccaagggcagaggggtgattgagggggtaagggaaaggcacaggtgaattttattttcagatgtctaataggacagtgtgacattgcccagagatagtctctcaaaggtagtgagtgccagcagaacttctcgaatgcgaagttgagaaattttacttatttacttattttcccattgaaaaaaaaaaaaaaaactttaaatgttttctgagttaaaaaggcctctgactggtagtcctgacacagcttcttgagagtctccgagagagcctcttctcagtacaattcctaagaagataggaagaaaaaaaaaaatattcttaacacataaaactagaattagtgggaagaaatgcctactgtaaactcaacagaaccggggttaaaaaatataggataagttttgactacctaaaagtagcagggcagacccatctcttccctaactctgtccataattcagaaagggcccagggaactgtcctcaggaatgctcttcccccctcttccttgtcctctccgacagagcctttctaatcagtaggaggtcacaacttagaaaataaccagagagagctggaatggtaagttaggggctattactgttatattctgagaatcctgatccatgaaaataaagtgctgaaggtggggtagagttagaaagacctgtgttcactgagggttttgagtattacaggctctccatcactcagagcatcagaaagtcaggcggtgaacgcaggagatttttctctcaggctaaccaaaaccatgttgaaatgaaaaccactttggaattggccttttcgtctcagactgccaaataactagcacccaagtggatcccttagctcagagcagtcaccaggcatgggtaggtctttccttgtttagtgataaacaggaaaaacctaaccgagcctactgaaccatgtccatctataaaagaaaaagggagatcatactggagatttgaaagaagagtagacctccagaactgattgattataatttatttctgttatagtatttccacttagtattatgatttatttctgtccctcatgaaagggacagaaagtagtcaggcggttatgagatgaaaagacagtaagatgggatgaaatcggagtgaaacaataaaaaaaagactaagttaaaaatgtaatagcatattaaaattcatgtgtaagggggtaatgagctgaaaataaagtctgtgttttgaaggagaaacaagataaagctctttggaatccaaaggataaaaacataaaatgagggagaagatatatagagagaatatctaacaggagaattacaagtgttgataaacagggaaccaagtgaaatagaacaacatcattataagaagttttcatgcacgtgtgcagatttgaaagtgttgccgtatttttcatgtgaaatcaatgaaaaatatgtttgggcatttctatttaagaataatgttaaagtaccttgccaaaatatctggcaagatattagctaccagggaacaaagttgtttttcttctcctttctagcaataaatgccaaaaaaaaaaaaaaatagtgcattgattttagtagagttttgaggagaaaagatggtgacttaagaacttactgagcttcctccttatatgttatgtggaaaggcaattgagaggcattcgttgataagcaggagctcaggaaagatacactaaacctcttgttcacgtgggagtacctaaaggttgcctttttattgttaagctttataatttaaaaaggtgtaaatttaaacttaattcattttggttaacttcagtaattatcaaaataataaaactataaagtatgtatcttctaaacacctagaaatatatattccaaaagataggcaacaaagaaagaataaaaataatacagggaaaatgtttactatatatgactactttaaagaaatacagacattaacatatgtatgtacgtatatacacatacatatatacatataaaattgaccatatacatatatttgtgtgttcaacacacgcattatttttcaggtactgcactaaccttttattccattgacttgttacttttcctaagaactctgtgacactggccttattatacctgttttaaagataaacaagtttagttagagatggcccaaggtcacacagctagtggaggagctgggatttgaccccaaacagtctgactgttgacccaatgctcttaagcaactgtgcaatacagcgaaaggggcgccgggggttaatgttcacactgcttgatgctgctgacttccgaccagccacaaggcaccccggagccaaaggcagatgactccctggcttgccagtgacgtgtgatgcggtctgatatgacaaagtgagttaaacaagcagatttttcctctcaggaaacagacacaagaacaactgaaaagaataaagcagatgtgtgagttactattccttacagcaaaagaacctcatcagaaccgcaggctggaaagaggtgattacttttaaagggcagttcattcctcctgcatgttggaaactgtggctcttaactggctaaaattttaactttcagtgtagccctcacttggcttgtgcttcttaatgttgtagataacattatagatttatataatattcaacttttatatatatattacttatatataaatgtttatgtataaatatatatttgtatataatatgtattcgtatatgatatgtagtaaatgttatatttaaaccatcatatagaaaagccattattgggtacactgtacaaatctgcctttataattgagtgtactgttctactaaaagcagctttagagaaaggattgaaagccagctctttctacttcactagccttcattgtttggattggcattatgtgtacagttatattgtaactgtcacttgtggtctaatcttccccttaggggaaacttgagaaacctggtcagctttaacatttagaggaagtttaaacatattggagcataaaattcacagttgtttaactgaaactccagttcttgtcagaccacatctctccagcccttctgtgattggaatcatctaactttggccctcaataaggaaaactttgacaagatgcaaaaaatgtttactcttgttttctttgccaggaacctgagtctgcagcagactctgagacctctttgcctgccccaaataagtgaattgtcactgtaactgttttttatccccataactgctttcggtgaatgccaatctagttgttacatgcctttaatattttgggtaattatgttctttaagaatgaaaatattttttccttccttcctttcttctttccttcctggttttgttatagtctagctgtgagaccagttgcctttcatatattctagaagagaaggatgaggtgagtttcacagtgatctttttccaaaatacaaaaccactgtcactctccacttcccaggcaaccccactcattctattttctagtgagggttttgcttagatgatgacgagtctcttgattcagtggactcctaagggaccatctttcaccagcaccaaatgctgtttagttcacatattgaaatgttttaaattataacttagcaattgtagttagtaatcttcacattatattgtctcacatttaatgtataatttcctaagagaaggaaatggtcctggtgggggttaatagttatagtaactattaataatactgatgactactagttaatagtaattaaggcctcctaaaatgagaggaaaaaaaatcttttgtttataaggtttaaaaagaagagttgatacttaatagttttagtaaaaccccagtgcatgttcgattaattttgttactttattctgggcatgtagttgaataattacctgcatttttgatttgctgaaaaggtggtggttacaattttttttgtttttttttttttacagtactgtttttagttcattacattgagatgctacattttccttttcttaaatacatgcaagatgaaatgttttacctctgagatgaaaaatttgaaatttctttaatgtgactccttactaacacaattgcaggcaagcattgaacatttgctttgttccaggcaccatgtgctgtgtgctctacctacctaatctcacttagtccacttagtgctatttgcaggttgaggcttagaaagaaaaagaaacttgcccagagtccaacactagtagctggtaaagagctggtctttgcatgcagcctctctcacttcaggatgggtgcttcccagcaccacactgtaccaccctcaagacgagttgcaggaggaaaggaacctctagtggtattaactaaatcttagcaagtagttgcctgtaaattgtagacttttaaatacaatctcacatttctgtgatctttacccatacaccagttaccttcaaactaatttaagaatcttatagatattaaaaatgcttgattggccaatatctcatttctgtcaaaatcatgtactagaagcatgtatcaaatcagagacttatttatgacaatttgcacacacatttggataaaatgcatcaacttctttcaaagtttacttgaaataaaaagggaagaatacgaagtatcacaggttaaagcaatgccctcattccatttaggcaaaagtgttgtgctatttgaatagtgttagtttgagaatatggagttgtactccttatagcaattccaacctagaaaaatgtttgtgttttaattgatgggttaggcaaaaagttaatctttgcatagaggaaagaaacagctctgacttagaggtcttggggctagaacatggatcaagtgtctgaagtttttcatgtggcctcaagttgaatcttggtcagagaatacacggtggtcaaacttcacaccatagtcataatgtatgaagccaaaagaaaagtcctagttgctgggtgcttccattatatcatcaacctgggtttaatgattttattggaagcacgacttccagtgaggcaaggcagtaagccccagaagagaggccttccatgggtagataggaactcaaatgctttcccaggctggacccaggagactgtgtcagctactgtgatatggcttgccaccaggacagatcattctacccgtctaaggagttagggtatccccaagagctgtgatgggaggtggaaattcacacctgtgaaatgggaggtatgctgagttgaacgggatagcccaaggcctgtccatgaactgagccatggccaaggatttcttaattctagaggcctccttcttgagcttgccttcttttgaacttggccctcagtgtctgggtaagttggagcgtgactatccagggaaagcccctggtttgtatttagtcaagttggccagagaagactggatctaagcgggaataaaatttgctgacccccatctcagaggttaacattttcatttgtgttttgcatgactcattttaaattacagtgctctacaagtatagaaagaagccttcctcttcccaccgtccccagacaccacataatggaaaaagcaagaattttctgcataagcaaggccttaaaaaaaaaaaagccagcctctgatgggacttctttcctgccagaaatcccactggtccactgtcgcaatttttacaaaaggccacgatgaaagagtaaggcccattttgagccctttgcttctgtattatgtgaaacataacttgtatttctgttcttggtatcagaagaattgttagtttttgaacatgtaaaatctactagggtctctgactgttaaagtataattttgattaagaaaagatttgttccactgctttgattagacacataaaactttgaaaagttttgatgttctgtttcctgttttaaaaaaatatgtcctctcctatgaactctaactagatgagaggattttcctcagagaaaattcagccctgggaagaaccatctatggaggtcataacctagaaaattcttcaagggaagttgcagtgaattaaaagagggcggagttagaaagtcctgttctaccaaatttgtgctaatagttgcacctttctttctttcccagaatggtcactggagaaaatgtgtaaaccaactgcaaacaagtttatccgttgccacctttcttttcctttagtgacagttcaattcgttaacctgaaggagctactgtaccatcaagactagctcccagcccagggcttcagcataaagcagctgctcagttaattttggtggatcacgggcagaaacaagttacctttgggatgcagattctgaatagtctgccatgaaatgattaaatgaatgagagtgatgaggggctacttaattggactatgtaaaatggctccttaagcttcgtggacaattgagtaatttcagtttcctctcttcactcttgtttacttcctgctcttctagcatcaagtgttaggtattctgttctcttacaatgagaagattaaacagctgtagtttaaattaaagcattaatttggagtgttctgtggctacattaattatattttctactaagattaaattgcagatggatataagcagcaatatatgtttatccagggcaaaccagaattctgttaaccagccatccttggtgactttttatttatatataaaaacctttttaaactgaaataatgtaacttgatttttccccccagttaggtagaagaaaaaataattggatgcagaaaacagttgtatggagcgtatttgcataggtacaggacttgagtgacagaaaattccttttatttttttccccagtgggatttagcaaaaagcatgtgttgaaagtctcttgactaaatgggtcataattaaagactttgggatttatttatgggtattttaattagaaacattaagttcactcagtggtccttgtgaaaacttttttctaactgcttattttatatcaagtaataaataaaatttctgtgggtatgaagatgagttttagggctgcctatttctctaggactgccccccccccccccccccgccgccgcttcagagagcttttctctttctttcacctattaaacttctgctctggacctcaaaaaaaaaaaaagagttttagctgtaaccacattgtaattcgtgctgaatatatgaatgctgctgttcactgaatagttaactggttatatcccttgttaatttgaagttttcttccttcgttttggaatgatagttataaggcaacatgcattttagaaaaatgcacttgtttgaacttctcagatctaatgtgactctgtgggactagatgttaagaaaccatatctttaactgaacatcatctatgatattccatctcataacatgttccatgagttttatggacaatttctaagaaatccaaagtagcatgcagttttatcaacctctctgcatccccttggcacaaggaataatttttctgttattgaggggcaaaacagaggggtaaaggcactcatacagttaaatgccagattaagtcaggcatccaagtcactctgctttgggttgattctctgagactcagctggctgacttcaaaaggacgaaatagatttcaacattggaaaagaatacagtatagaatatatgatgggtcttgttagctatctcttattttctaatccaaagagcctcctagttggaggaaaaacttgaactacataagtatatcagcaaattttcattatattttataattctttattgcattatacgtgaatatatttagcagtggtagtacgtcttggaaagtttaagaatttagacaaatatgctttttttttaaaaaaaaatagttgagttttaaatatgctgtttgggtccttatgagcatgtgggagatatataggagaaagagtttgttgctgatgttatagaatcaccaatgcagcattgcacttttgttcttttccattcattgttcttgcttacatggagcacttgcaaataggctggacgtctcagagttctgaacaatgcccttggctaaccgttagtcctaattgctgtgactaatgtgctgtgtgacctaaagacggtaacatacttaaccttggttttctcatctgtaaaatagaattgatgacctctaccaagccaaggatttcagtgaggcactcaaaaataaaaattaaaaaatacatttgggacaaacatgaaaaaaattactttttagacttaagcaatgcatttaaacctgacgaaaatgaaaggaattgaaattgtttagccacagaaaataaagaccaaggaccaatttaaacagttgaaaattatatgaagcagtgttttatggagagtagtaatgaactcttcttcaccttttttgaggctgtccaaagaagaaatgaagttagattattgcagaattacataagttagtaagcatggactgaccagttctttctaagacacatacttgagtatttattctcttcagttgcaatgaaggtgacagtgaatttgctgaatagctgtgtacatgtttccccaaagagaccactggaataaagttttgtttcttgagacagtttccattgcatttataagtcttgtcccttgaaggatgttttctggtaaacacctgtattctttttacattatatatcttcattaccgtacaagtttggttgtgagccattccaaagtctttagtatgctgtatgggtgtattctatactttataccttatttggaagtcataataatgtcaaaaccatgcctagccatccccttccctgcagagtctcttttgctttgtccacttggtgtgtatattttttttttttttttttgagacagagttttactcgtcgcccaagccgcagtgcagtggcgcgatctcggctcgctgcaacttctgcctcccgggcccaagcgattctcctgccttagccccccaggtagctgagattaccggtgcccgccaccacgcccagctaatttttgtatttttagtagagacagggtttcaccatgttagccaggctggtctggaacgcctgacctcaaacggtccatccgcttcagcctcccaaagtgctgggattacaggcgtgagccaccgcgcccgtccatgtgtgtcttttttattttttgttttttgagacggagtctcgctctgtcgcccaggctggagtgcagtggtgcgatcttggctcactgcaagctccgcctcccgggttcacgccattctcctgcctcagcctcccgagtagctgggactgcaggcgcctgccaccacgttgtgtgtctttttaaaagatttccaggacttctttttcctttacaaatccaaaattgcagtagcttaataaataacaaatattttggttttatgattactgtcaaatagctcattagtaagagaaaaaaaaaatgctgagccttaagaggggagaggaaaggcagtctttctgaagctgaatcctttgcctaaattgtcttagcaataaatcttgccacctattggtaaaaaggaagaactaaaactaaaaggtgtttgccgttctcacaggtagttagtagtgtgatcgaaatagaattctttcagcggtgcttttggataaggggcttggaaatatgtgatttgatatggaacttttccctgtgctttgaatttatcatggctcatctctaagtcataatagttttttgagtagaggaggtatgctgctctcatggtctctcttaaaattatattttttgagatagaattccattttaatagatcagtggattttaattggacacattttagaggcttgattgattttgaaaacatttttcttttttctttctttctgtctttctgcctttctttccaccacggctaactgcagtctgaacctcctgtgctcagttgatcctcccgcctcagcctcctgagtagctgggactacaggcgtgcgccaccatgcctggctaatttttctgtagagatggggtttcaccatgttgcctaggctggtctcaagtgatctgtctgcctcagcctcctaaagggctaaaattataggtgtgagccactgcacgtggccttttttttttttttttcttgagacagggtcttcctctgtcactcaggctggagtatagtggcatcaacatggctcactgtagccttgacatcttggggtcacctgatcctcctacctcagcctctggtgtagctgggactacaggctgaaaacatttttctaactctgttgttagtttgggctttccttcattccagcctctgaaatccattatttcctgcccaacgggacaggccagtggtgacgttggcctttggtgccagggcctgtttttccagatcatgggcaccatacaaagataactgccctaaacggcatcattgccccagagtcattgaatgtccttaaggtgcatttgataaaacaaaaacagttttttgttttgaaaattctcaagtatttccatactgggaaaatgttctttttttttttttgacagggtcttgctctgctgcccaggctggagtgcagtggcgggatctcaattcactgcaacctctgcatcctgggttcaagcaattctcctgcctcagctgggaccaccggcacatgccactaagcccggctaatttttgtatttttagtagagatggggttttgccatgttggccagactggtcttgaactcttgacctcaagagtgacccatctgcctcggcctccgagagtgctgggattacaggcatgagccaccatgcctggccaacaatgttctttttaatggtgttttccccactatctggatagatatatgaattcagttactaagatgacttagatttaaatataaaacactagcatagcagtttttgattcttaatattatcttaaatccacctcccctcattgtcctctgtatctaaacacccttcaattcttgagaaaattaagattaccaaagattagtaatctatttgtgattgtgtgtgttggtggacatcctaacaaatttatgaataaagccaatactgttttgttagtgtccttattttttctttacgtctgttcatatttggaattctaaggcactacccagataatcatttgataccctttgttggcatgacatgtttggtcaattgttttggcaaaattatttatccaccactgggaactaagcactgtaacaactaaagaaagaggtcatacaagggaaattggaagaactatatgttatttgtttcaatttttatgtagtacacctatatatgtgtgcaaaaaaaatgtaaactgttacaaagcaacatattgatgaatttaaatgagtagagcataataaaagcaaaaaccaaacagaagagtggttggagtgaggccataataaaccaagagatattttctgaaggaagtgaacatgtttgcattttccagcatactgctatggatgtcagcgttaggctaatacatagtattgcagcgtgattcaaaaaggtgagatagaggggaaataagatagcttcataaatattaccaaggaatttaagacatgagcattttatgtagggaggttgaaatgcattgttataatcaggctgtgtaatttccttctgtcaagacctacccatttaccagtaatgataccttctttctcttctatttttgtctcttcctttaggaaaaggaatatatgcttactcattatttaaaattcagagtcattttcctgttccagttggttttgttcctggaaccaccaaagaagagtagaattaggtgcatgtgaaacttttgtttctgctttttctactcaatcaacttttatccctttttaatttttactctctcaaccatcagttctatatcatggtatctcttcttggtctttttgtattatatttccataaaaccagatgtacggggttgttaaaatactgcctggacatattatctaccctgcactaagtggtcctatcacaaaatccagttaaacacacattgaagtatttaaattgtttcttttttaaataacatcatattgggcattggacttcttaactaaactatttctttcactaaatgacattggttaattcaacaagccattgtaggaattctgttaacccagtagcttctactactatgttactatggtaatgacttagcttcccataaagctgcatttaaataggtgtttatagtcaccaattaccaggtatttcaagtactctttgaaaggggactgcttgtggtggggtggggggcgttaacatagatactttctcagtcacgtagccatttgaagtttttcaggtagaagacagttgatagactatttggtgagcaaatgaataactggatgaatacccatctgggaacccctaaagaactgaagatagttccctggccaccactgttcacagtcatctattatgtgcttactctatgccaagtgttgggctggattctggggtcaccaaagggaagagaaaattttcactgccttgagggtagctaaaaacttaatggagggaagctgagagcatgagcgagcgtgccaccccagctgggtgagcggcacaccttgggaacagctgggagacccccagtggtgtgtgtcttccttcgcccttagcacttgctcctctccagctcactatgtttcttttctctctggggtctaaggagcttaggcttcactgcctgctcctcagattgtgggagcaggagcagagagtgggtgcctgccacgggacagggggtcctagagacaggccccagcatgggaaggcagtggaaacccatgcattgctctctggcattgccacacgtcttctgctgcctgccttccagccctttgcttttccccagctccgtcagctccttgcctctgacatcagtgatgaaagtcaggcgtggggggattagattatttccattggccttgatagacttagacatataatagaagctatgataagtgagttagttttccatgtttgtttactgaagtttatattaccctttatgtcaccaaaacatgcccgtttgcagtcattgccagtgtagtcatgcaaaatcacttgagtgaaatagactttggggatctaatctcaggacctaaccaccatttataaagcttttttggggaaaatgtgttctggatttcgcacagccagcttacaaatgagctttggaaacacaatccacatgtaagttggagacttcctattattagcattcagccctgcgaggagagcccttgctttgttagcaggcctatgtgtcctcagccctaagttcctaaaaccagcactacttgaggagcttgaattggtgctcttggagttctttagattagttatgagacttcagaacctgcttaccagcagtactgagctcaagaggaagcctaattcatatccttcagaagataattttaagagagtgtgtatgttttcgttttgtgaacaaaggaaagttaatctggtgctccgtgtctgttttgtaattccccaagggagaaggaaagggagggaaatgattgatttccagataggataaaaaccagtcagcacacaatgggttactgccaccgctttctgataaggatcctacttcaactatctgaagagattcttcaaggtggaggatacagtggttatattagttactctcacccttgttattatggaaggtaaaattcctggatcctagatttaattttaaaatagtaatttaataatgtctggtggaaacctcttaaaaaaaacactttgcagcacatctctggtagccctgtgcttgagatgacttttaggctgccagttcagaagatggaagatataaactgtgttgatgagttggtttttcagtggaccctgttaggttccttttttaaaaaaataataatttttataatgagtatgtcttcgtgagccctcacaacccttgaagtttttacttgtttggcagaactaagggcactgaacgtttgtaagccgttcactaacacttacaggaagggcataaaagggtgctcaagtcagtctgtaggtggtgggggcggggtggaaagaggggattcctgtaggcctggatgaatcagccactgatttctgatggtagccccagctgcaaaaaagtaggaagctttttttatggacagaactacaactcctttctttcaagtttttcagccttttcacacttttccattcttcagactttgcaagtttttaaacaaaatgtttgtatttccccaaaggaaatcacacagttgactgcattatgagagggaaaggagcaaactctgtctcatctgaggaggggctcagatcaggagttgtgtagggccctcacccggttgggggtggtggagccttggctgtgtgcaggagtgactgttcttggagatgttctggttggatcatgagtttgggcttggaaagcactgcctcaagttcatcagcaggaatgaggtagaattcactacttgctgtcttaagacctttctgtctgccaagtgtttgagcaatccctcacatctcccccttgaactaaagagcaacaactggtcaagagcccagcagggatgaaaaaggttggccccttgcatccttcatctgctgtttagactaagggccgcattgtagaccactctcggccatgctgtcctgaacccgaggatcagcagaattacaggcccaatttcaggcagacgtgagcttgcatctgatgacaggcaagtacctacatgtgtctttcattactccgctgccttaggagatgctgtttaagttggcagatatgcttatttgaaagcaaagcttgttgctggtgagattactgaatttacaaaaaaaaaaaaagtggggggatcagatgccaagggagagggaagggagtgtgtagcatttaaaagtgtggtgaagccatcaagttaacaagaaaaagtagaataaaatgtggttccaatttgttgtactgggctcaagatgataatattgcaatagtaaactgtagggatgtgtgcgtgcaaatgtgattacatgtgtgcttgctttctgaatttcaaaattgtagaagttattagaagttttaattttagttcccaatttaatttactctgatagtaaattagtaattttcaagggatttactgataatcagaacaaagatttgcaatttctaggacagatccccaattttgggggtgggaaggagctactttgtatttccctgaaaccttgagttactggggccgaacatgtagggcagatattgaatgaccaatcctaatgctcttagcaactttgctaagtaaaaccccgctgccatccagtggcaattggctatacggcatggtagctgtaaaatatgcccttttctgccttttctccctcagattccacctttctcagatgctcccagttttttttcccagatggcacctgacacagtacttgacaggaaaaattgactttatgtctggcttaggtaattcagggcaagtgtgcatttatttaccttgtctcttctcctagcaatactaatttttatctacgttgcatttttattttctccccagatttgtcataacacacatactttttccttgaatatttttgttaccttagctaaagaattaatgcattgtggtatttctgcttgtcatagttttactttagagtagatttcgcttatatctttgtatttatgctttgagctgtggtttaccaatttcctagcatgtttcatgacacttatcctacatttcagacaaggatttatgtgtcccataggattcaagctggacttggagaaagagccagctagcaaatggaattattctgacttgtgaaaggttccagccttttaaaactaggctctgagaaataaaaaaacaaatattcttgggaagaaactgggtttgtgagtacttggctagaaattttaggaaaggaaagaacatttcctctggcctcgggagcacattcaatgtgaaatattgctgcctttaaaagagccaaacttaaatttctatttggatcatttacttgacttaaaaataaagggatctatttttttttaaggttcagaaccctattttaaataaaatgacattctagtaagtcaggcaagatgcccccaacatgagctattaattaaaaacagccggaacttctggaggtgttagcaagtatctactatgagcttggggattggcgaaatctggtacaagttagttccagctgcgcacatttgccttattacagttctttatgataaattaaatgcatgcttcatacatcctttggtgtagtcatattctctcagcacttgactaagcaggtggaaagcttatttagtcataggatgactgaaaacaatgaactataaacccatgtatatccactccaagaaaagagctaataaatgtcatgttttttattttcccgtggaccccctttttttttttttttttgtattttataacctttccagaatcttgagtgatttttaaatgtttgccctttggtcataaatgcagcaagtaaatgtgagtctgcacactcgaatgttatataaatcagttgaccagtcagtgttggagcaaacttctcaggattgctctgtgaactccctgttctctggcagttgccaaatacaaagataaaccaggagagacttattcccaagaaaagaatgattctgcatccttaacttacatataaactgttgagatgtttcattgttttgtatggtcaagccccttctcttgttctctctcttcatcaattagtatggaaaattggaagtttactgaaaagagtttcgaatcatgggattttagatttgaaaaggaccagagggatcatctactcttccaacaaataaaaaataaaacccccaaaggaatgaatgatccatggctgggacattggaatctctctataaaggagaaatcatattaaggtattttcatcttaggcctctaaccccaagggtatctttacaaagactttattttagtgaagccttcaataaacagtgacctcatgtcaagaattctaaagagagggttatggaatattggtttgatattaaagtcattgttatcttggagctggcctgaatggactaataagtggcctgtcaccagttgtaacttacttttacaattttaatgtgatttaagggaagacactcttggaaatgcttagttatggttcatacccataatcgtgtttcttttaggtcttaaaattttatataatacaggggagtagattgcatcagtacagtctttttctttttttctttttttttttatgatgcaaacaaagcagtatcttaaattaaatcaaggtttcttaaggttccagattcttattcctaaattttccactgagtaacctccaaattcttctcctgcctttgtccctagttgacacaagtcaggccacaattttttttctgcaaatggacgagctgctgctcagaggctgcacttactggtgagagatccttcaagggaaatgaatctggaatggcctggaacatttgtctttgggttgctccagggctttattagagcttctgagatttctaagtaggtgatgaaatttagcagcatctgattttctaaaatgaccaaaggagaattgtttcagtccctgatttgcaaagtactcactttttggtcctctcaaaatttttgtcagataaagatttttccgtgccatggatataagaaataacccactcttaccgataaagggaagttagtgttgtaaaggaacaaatggtgattcaggtttgggagactttggaggtattcattctccactaagctatatcccaataccatcattatctgggtcagcctccgattcagcctcatcctgtgcttcagcagtggggtaaaacaaatgtcacttgttagctgcttcttcatgaccttcatagactatgcattaatttgaagccctgcccccaaaaatagtgcttgggggggaaatgagttagtgattttgtgaagataatgggagttgaggaaaacacttaagtttgcttttctgagctctagcttcattttacttctcagtctcagtatttaattgtctccactgttttttctaacttggaaggaaatcagatggcgaaagtgaaacatacggctatcaatgtgaaaaagctgctccctatagcactggaattctcttgtcattaatagctcttgtagtcgacagattataatatacagagtcataaatgttcttgttgtcatttggaaaattacaaattcccaaaaagtggtgattatttggggctttgggtctgcaagacgtttcacattaaaatgctgataatatcttcaaaaaccacagagccatgggccttgcaggcttggtaactgactgcctttgtggtgtggttttattctttctactgaagcacctggttgaaaggagtgggatgctgaattcataggggcgtgttcacaaaaatctttaacatcaagtatctgtttattcaaaatagtgcatagttcaaagcaaccttgattccttaaactagatgtttttctgttctttaatgaaaacagcctgaacgtggttattaatctgagtctttctccattctgaccaccccactctgtttttctctttgaatatcaaaaaaaaagtataaaaacattttgtaattttttatttatttatttttgttgagacggagtctcgctctgtcgcacagggtggagtgcaatggcgcagtctcggctcactgcaagctccacctctcaggttcacaccattctcctgcctcagccttccgagtagctgggactacaggtgcccgccaccacgcccagctaatctttttgtatttttagtagagacagggtttcaccgtgttcaccaggagggtctcgatctcctgaccttgtgatccgcccgcctcggcctcccaaagtgctgggattacaggtgtgagccaccgcacccagcaacattttgtaattttttaaagggctacataaattcaaggtattattgctgtacttcttttctgttaccttatgaagttgattgttgttgaagcaccaacagtatgcatacatgggtatccagaatgaccatctagtctcagttgtgcaaaattcactatgtagtctcatggattgagaggggcaattagcaagagtgtgagataatggagaacaaaaaataatgccaagctgggttaaaaaaaaaaaagtttgggaaagaaaaaacaagtgctcaagacaagcctcctatttttcagtttggcctagccctagccctattgaagaaggttagtacattcacctggccagttttagctaacttggttacctggcaagtggcggggatgcagtacattagtacttgtcctgtggtacagagcatgtgtctcagggtgtggccactccagggagagggaagacgtgctttatggggcctcctcagccatcactgtgatatgtgccaccaggaacccaggacctttcatggtccagtctgaggtgggagcaccacagaagcaagagctgcctggcccagccaagcccagattaccctaaaatcttactgcttttttcccttcagcattttaaattataggagcaagtaaaagtgtacataacgcaaggcaatctgaacaggtggctgatagctgctccatccagaggaagagccatgaagttcccccgacccacacatttcaccctgtcttgtctaccaaaaatcacatgaaaatgcagacataaccatggaggagtaacccatgaacaaagggctggtaattacagtttaatgctgttctttttacccctttggctggctggctgtgcaaaggcaggccccggtaattacggtttaatgttgttctttttacccctttggctggctggctgtgcaaaggcaggccccacaggggagtaatgtatttgtgacagccagttggggtggggagagatgggctgtactacactttgaatttattatgttctgctaatacttttactcctatgctggaaagttatgttttccttcctttgttagacaatttttgcagagtagtttaacattttcaaacatttactatatatagcacttttaaaatccaggaactgtcatttccaaagaagattccatgtctataatattaattccctgtcctctcctcattgcctttttcagacatccactgtagatagcctctgttccccaggaactaacatttccaaaggaaactcccttgcctataattccctgttatcttcttgttgcctctcctgaataataatttttgattcagtaccttttagctatttataatgttatcgtataatctgagtttgggaactgcttgccacttccagtttctgacacccaaaacacattttatgcttagagaaaacaatagcaccctgactttttagaagacatagtttttccttggggatccaaactggaagcagatatttgagctgtgaacacattttttcttagaagagtcaattaggagctgggttgaagcttcagtctatgcacttagagtcaggttttaggaccaagagcaagcactgtgggcacctgttgtaagaaaacatctgacagcacgaggtgctaaattgcttcaaaatcctccgtagctcgtggggatgctacctttttagtaggagtttgaagcccagaatgcactttatattataaccaacacagttgaaaaataggttccatgttctataagaatggattcattaaactgcatgttctggaaaaaggatgtattagagactttgaatttgaggatcctgtgttatatacatctctgagccatcttatcaggaagaaaagcagctccttaaggtgcctgcctcttcctctaatactatgtacatatttcgacctctgccctctttaagttattttcatttgtcttgtagccagtatcagacatgttaatgaccactaactttgtaaatgaaattattgcagctcataatgtcaagatgtgaacctaagcaggccttaggttttctgacttaatagccgaaccataccagtctttccctgatcattgaaccttctgtcttctgcagtcagcagaccgtctctaatgagaggtgcacagacacttttgatgcttattttaagggaagccagtggcagatggagagccatcagatgaaactgttattaatcacaccatttctgaagctgttctgactccacaccctgcattgtgacaaacgccaggatgccaagttcctagtattgcagcaggttcttagtacataacaaacactatcagtgcccccagctcaacttcgactaaatgccttccaatagagttaagctgtttttatctaatacatgctaacagtaaaaggacacagaccctcttatttgaccctcttagcatctaaggaatatgatactttttttctttatacttagctgtgtattcaaagctaacacattctctaagtaaccaagttcacactaaagaaaaattgaaggccatcctctaaagccatgctgctcagtgtaggagccaccagccacatggtcaaagccacacagagccactgaaaggtggctgctataaattgagatgtgttatgagcataaaacaagagagaaatgaagactatctgcttaataatttttatattgattatatgttgattatattttggatatgtggggttaaataaaagattaaatttcaccttttgtttttgcttgtgatgtggctactagaaaatgtaaaattacatgtgtggcttacagcgagaccccactatttacagggcactgaaagtcattcttcctcttaattcctcatctaaactctactcattgactattttgtgtatctgcatcttttcttccaaaatgaatgatcagctgctagaaggcatgactatggaaacagtgtatcttctactgtgatttttcaagagtgaggaagtttggctatcaccatgggcgtgaggagaggggttctgttctcatttggtaaacatacaccagatatgctaaacatcccatagaatatcttagacaaagaaaattacagtaagtagagaaatggatcaaagagtggctattcttggactctctactttccaggtctttttggctagagaactctttttctaactttgttgcctggctcttggcagtcaatgtccaaagtagtgcattgagctgccccccaaaaggggcacagtttgtaaggaaaccatatgccctatgggacctcatgggatgacactcagttagtacataaggatctcttggaagggagctgcctttatgtcctctaaaccaggtcatctcttatcagttaaatcctggtgctgactagtacagctatatgagcctggacaaatcacttctgagcctgtttttcctctctgtacaatgacaatgatgatagaacctttcttataatgttatgaaagattatattttctgagataattttagtaaagcaacgtagcatagagcctgatacatgttaagtacgttgtgtatattggccatgattattattggcttcttggtaatgaaagcatcaaatactaagggcagcttttagtatattatttctgatcttgtgtgatcagaaataccacatttttgagaatgtattattttccaaagaattaaatgactctcagaggggaatggataaacccacagaggttctggaaatggagcagtttcctgtaagtatcatgacttccaattaagcccctttgtctgttttatccctgtcacttgtactcactgtgtagatcatgagctaattttgcttggactctcccctcccgccatctcttagagcccagcagtgctatgcatgcatgggttaaaaatttcaaactgtccaaatgaattgcatttattggcaatttaatgctgaaactcaaagagggaaaagaggagaaaaaaaatcaaagatgaagtggaaagacaagggcccttggatgcagccggacagaggttgtaatatctgctctgccaaacactagttaagtgatcttggtgtagtcaccaaacctcttgagtctctttcccacatacaaaatgaggttgatgtgtttcacaaggctgttatcatgactcaaggaaataacctaaatgactagggcagtgacagttcacctctctctcttcatattgctctcaatttcatgatcttcttctccccgcaaccccatgatttatagaagccaaattacgttctctgatttatagctgttgtaactttggaatacatttaagaacatggaattagttgtcttttgttagatccacatacagaagtcacagaaatgttttcatcattttgaattttactgttcattctggcaaagtgaaaatgtataccaaaacactattttaaaccacctatcccctgggttagaaattataagttagtgtagcccagtgaagtataattaaatgttgccattctcccatttatttaacttccttccctccatatttgaagtaattttcgcttggtgccaactccagtcattctccagatgcctgtgatttcttccagattttcaacacacagtggctaaagataatatagaattattttttaagtaatttgtgattaaatgtaaatttagtaattttatgttgggacatgtgatctccttgacattttctccaaaacacagaatttaagcactagaaatgattttaggacatctagttaaaccattaccacttcactgttatgacagtgaggcctggagacattaaatgttttgcccaaagttaccaacatgttgttggcagaaaaatctggaacatatggcctcatctattgtctaaattttttctactagtgcacagtgccttttcaattgctttttatttgataatagtgacaatcataaataggggatttaatcaatactcttttaaaaaaaaaagtcacagaaagaaagcaattgtattgaaaacccctttctagtttttccagtaggttacattaaatggccccaaaaagtaatttatgggctaaaatgaatgtcttcagaaggctaacataaaagatgaccaacagggggaaacctgaaacagccttttaggtaatttgcttaacttctagcccttttaaaaaaattactcaagctcatgttagagccaacaaaaaacatctgttgttttatttatagccacaatttctaagaagcatattctatagcagatgaaaaagtagttgacagcttataattcataaagttactgaggcctaatctgatagaacaaaatgtacaaactccctcccgtggttcagaccctatcccttccctttctgctgaagacagaaatggtgcaacagaggagtggagcataggttattacggttgttaaggaagaggcgactctgagatgataatgcagaaaggagtaccccgcagtgataaatgattgctttcacctctgggccatccaccagcctgagtcactgctactttttcattaacattgtatggactttcattataggaagccaacattttgctgtgttcaatctacagattgttaacagcgtatttccatcaggaatctaaagtgttaattaaaacgactgattgaatagttccctctctgagggaagcttttagtttgccccttcctttcaccagttagctctagtctatattgacataactttctccctgctgactcttaagcaattattagaattcactcattactcaaatatcacctctctgtatctgttggcttatttctgagaatcctttttgagaacatgaccaggcttctttctataatttttatatatatatatatatatatacacacacgcacacacacacatacactacatatatatgtatgtagaatacatatatatatctatatatgtacatatatatctatatgtatacatatatctatatatgtatacatatagatacatagatatatagatacatatctatataatgtatacatgtatacacatgtacctacatgtatacacatgtatctgcatgtatacacatgtatacacatgtagatgcatgtatacacatgtatacacatgtatctgcatgtatacacatgtagatacatgtagatgcatgtatacatatatacatgtagatgcatgtagatacatgtatacatatatacatgtagatgcatgtagatacatgtatacatatatacatgtagatgcatgtagatacatgtatacatatatacatgtagatgcatgtagatacatgtgtacatatatacatgtagatgcatgtagatacatgtgtacatatatacatgtagatgcatgtagatacatgtatacatgtagatacatgtagatacatgtatacatgtagatacatgtagatacatgtatacatatatacatgtagatacatgtagatacatgtatacatatatacatgtagatacatgtatacatatatacatgtagatacatgtatacatatatacatgtagatacatgtatacatatatacatgtagatacatgtagatacatgtatacatatatacatgtagatacatgtagatacatgtatacatatatacatgtagatacatgtatatagatacatacatagatatatagatacatagatacatatatttatatatgtacatatatctacatatatatctatatatacatatatctacatatatatctatatatatatatctacatatatatctatatatgtagaaatatatatatattctacattttagttctgctatatctatagggccttctgtatatcacagttttgtgtgttgttgttttttttaagtgcattggtttggcacaaataactatagtactatttattatcctgagcttttttgagaatgtagtgatagggttcaacatctgcccaaattgacccatctaaaattataattctaaaaccataaccagaagaagcccattaatttctttagtagagaggtgagtagcctcttgtttatttcactactgatcatagtctattgtgagatatgaagatgtattagcccaccagaattaatcacctttgtctgaagtagtgaaagtatattgcttcattttgttaaactctgattccttacacaattgttaaggattgtgtttacttttatctcaaaattgttaccttttaatatatatagtcttatatcagtgatcttttcaaacttttaaaatgaagtctgaataaatattattttcttatgcatttcttctgcaccagctgatagggaattttctgtacaatgttttcaggcctcttgcctttcttgcctttatttttctctgcaattccacacacaggtcattgctttcccttcctctccctttttgatcatggatgcttcaactcccttcatatatttgttaagcatattttactaagatttcattttgtgatgcttgcaaatatacattacaaaatatatatttttaaaaagtgatttgaagggccctctgtccatctgatgattaactagaagagtcttttgtaccttgctaaaagtgataagttagccagctatatttagctggataaaacccattacatccttggggaagaatgtgctttgtttagctttatgagaaaatatttaataaatgctgtcttgaaaatatttagcctggctgagtgagctggcaaggcttcaatactgataaagcagaggtgatggtgaaaagctggcctgccagtccaagctcaagttaaaaaaatgcacctcttgtcactaagggttgcaactgtcgccaagtgcttgtccatcagtgtcacgtaaagattttttaacctcacatatggcatcatgcagtttgtctgcctaaaaaggcaacctagattcacagagtggttacaattggctttgaagtcccatctgttctgtaaaatcctagctttatttcttactgctggtatgactttaggtaacttgtttaatttttcttaatctcagttttctcatctgtaaaatggggacagtgataatttcttagagcgttgtacagattaaatgagattaaacgctgagcagagtttcttacactaagtgttcactacatgggaattaatcagcagtagtagtgatttgtaatcagcctaacattttctgtccctccctaactcctcccaccccacaggagatacaaagagcaaagtcctcttgaatgtggcgaggtaggaaaggctctggcatgggcatcaggaggcctgggtcctcggcttgaacttcctgtgggaccttgggcaagttgtggctcacataatccctccccactcatcagtacacagtgcacagggcagcagagctcctggctgctagtctctcttttgatacctaattcgttgtggtatcagaccaaatttgatatgatagctagaccctccggtccgtcagtatcatttggggtctggtgtaagatcagcctgtgaaactcaggcatgtaggcaacaagttatcagtaagaaggtcaatcattgggattctgtctcccacaatggtctggattttctctctgtggctggtgggctcagccccaatccttgctactcaaagtgtgattgtggtccgaggaccggcagcatgggcatcacctgggagcctgttggaaatgcagaatcccagactgcaccccgacctcctgaatcaggctgttaatatgtacattaaagttggggaaccactgcctcaaacttactgcccttgggaatattctgacacgcagagggtatttatttactaaatacttacagaatttgtgtttgacattgacattttctagacaaggttccattcctctctttgggtgtagtgtactgatgtgttaggtcagggttaccatcagactggtgtttatgtctgtaccaccatagacatttagaaatctatttctcacagggtgccagtgtggttgggttctggtgagggccttctccctagcctccaggctgccaccttgtcactgtgatctcacatgggaagggtggggagaaaggtctctggtgctgcttcttataaaggcactaatcccatcgtgagagcacttgccctcatgacttcctgtaaactcagctgcctcccaaaggcccatctccaaatattatcacattgagggtcagggcgtcaacatgaatctggggggaagggacacaattcagtctgtagcaactgacttccacatctgactttaaaatgcatctttaaaaaaaatgtgctggcagataaatatgtaaataaagcaaatatgaaaatgttaatcgtagaatctaggtgaaagataatgtgggcgttcactaaacaattctttcaacttttcaggatatttaaaaatgtcagagaaaaaaccccctactctctatagttatttaaaaggaatctggtgctgcttttttctccttatttccatccaggctttcttaagagtgcttgttcggtctggctggacaaacttgcctttttggcagtttctctctctctacccactcactttctccttggtcagccagtggcctgcttctgcactgtcagtgaggtcccagcctggatccaaagcttctttctggtctctagtctgccagtagcatctttctgtccagttcctctccatccccctgccctctcctaatactaatcaggggatccttcaattgcttgtgacatcgcagcttctcaagttacattttacaactctgctttattatttttaagcatttctaacatgacattttataagtttgactctgaaatttatcatcacatgtaagtaggaaagaagtgtctccacaagtttgccctcagccagagatagtgtggttcatctggaatgcccctgcctttctctggttattaataggggctcctattgcttttccatttacagtgttaattatctgcatttcaaagtagttcataatgagagggaatatattaacttgttatttggggaggaagtacaaaaactgctattatcaagatcatttaacttgagcataatcagaaagtattaaggttattcccttgtgggattgaccatcagatatctgtgtgtttcataacacccttattacagataccttttaaagaagcgaggcttgcaggaagtgttgggaaacttactataagcttctttccttgactggcacttgtatactctggcgcagggaagacaagcccaaactaaatacataggcattacttaagagctttgtgacattggacaaatagtttccttgcctttaaactggggataatagagactatacacctttgaactgctatgaaaaataaatgaaaatatttctgtaaaatacttactgtgggaatgtggctcctagttgatgttcagtactaatcattcattcagcaaacagcctaccgcccactgtgtgtcatggcctgtgatttgtcttttttctttttgggggcttctgggtcatacttcgtatgaaatctttcttagcacaccgaaagaccaactttccttataaatcattggcttcaaaaatcctgtggactcaggtataaattatttttctggtgaggagaggaggaagtccctttcttccccatttacatcctgcctagctattttaatttgctgtacaccgtaaattgtaatcttagaatcaaactccaatttaggtgataaggatcacaattaattaggctagcctgtcaaagattaaatgtaatcttgcatttcagttacctcctaactctgaggctttagctaagcccgtcagaaacaaagctgttaggtctgcttaggtttaataagatctttgcctgctgtttgttttctataccagtctgttgtctagaaataaaacgaatggacagaggatctcaattccctttcatttgtttttagctgtgcagcaggagagataaatgagagaagataaacttaacgatattaaagactaattaggatatctgaggagatttgcaaacttctagtttaaatctgtcggcaactcttttaattccctcctgctagttatctctgaaaataatgtagttatggctgaagatttatttccacatctactctttgtactctcattttcagttgcgcatactttttttctccttcttcctccaaaaaaaaaagctcttgtttcggccacactcaatataatttagcacacagtcattccaacttcattttgtcttcacattcagaaaactgaagtctaatatctcaaatatattagtattgtggtccttttggggaaagtatgataaattgaaaatattttggttttgacttctgaagattttgagtattgtttatatatacaaaggcaaaatgcaaatatatacaaggcaaaatgcaaatgtgcttccagcttgcttccttagaaaagtattgagaacagtctaagtatgataatttctggtcttaaaacctgcaattgcaatcgggtatttccataatctaaacaataataaagattacatgactaattctaacaataataactacctattagtttgtgctttctacatactgggcacgatgcctgtcatgtttatatatatatattatttaatccttattactgcacataattactcccattttacagatgaataaatgggattcaagttaactaacttgcccaagactactgaattcagtaagtggcaaagcaaggattaaaacctaagcctctttggctttaaagctctgcttctaatcacttttttactactgattaaacagatgtgtcccaaaattaaggaagtcatcgttgttttttttgctttgtttttgcttagtcaaagagcacaggccatcatttgttgtagtgtcacccgtaaagcttaataagtttaaagttcagggtgttaatcattacaagcataaagtatgaatatgctttaaaggtttatttaagaaaagaattgggattagatttgcccaccagaatatacatttttcacttgaagtcctgagagagattcagacagaaacagctttgactcagcagcagttagcagacaaacatcttgatataatactgatccacactttgcatatacactttcttttctttgtattacatttttagaggtaagtggcagtttttcacacacttccaaactgcttccatcagtaatgaaatatttggcttgggcagcctctggagtcccagtgtttcagcttaaactttccagtgggccctgccaggcactaacttcaaaatatctttttttatggtgaatgcctccagaaggtgcaactgtgtggtggtttcattttgcacttcataacggtgttggcatcacttaatgcaaagaatgccactgtctcccacacaccgctggtgcccaaggactgtcgaggcctgtccatgttagtggtttgggaagggctgaagtttggagagaaggctctttttctattccatgtgattggctgtcaccagggcaaagggggaaaactagaacgagtggaaaatgcagcatcggatgtgtcatcaaatattcttcctacaacctgggacacctagttcattggtgttctggtcaacattgaaggctgaatcctcctttcttttgaaataatgcgtgtcttggattcactacttttaaacctttctgctgatctttatccttttcttcctaagcaatactgatttctttcaatgaaaaatgatttagctagtgaaaaactgggattgggttgtagtaaaggaatcaacaaatttgcccagattcttaagagtggagttggttctccacacttatacactgtgctacagcaagcttcacaaccaaaacccattacttattcaggtataaaaatcaaaagctgaactgtaatgagaatttaaatgtaaactgttggaggatggtgctctgttaatttgtgtttgctccataccccaccctatataattgataatatttgcatctttttgtttttagtactattattttttggtttatcaaactttgtaacatggtgctttattgtggacttttcaaagaacaccttgccaaatttggtaattcctagcaattgtcatttcctgttggaatttcttaaagtggaatctaatggaaaagtaattcttgaccttgtgtatttagtaaaattaaaggcatagttgattttaggattgtcataaaaattaatattttgttttaaaagactttttagactttcaatgctaattgatcctattgttggaagtagatgatataaactttaaagctttttgggtagaactttcacattcaccatgtctaaatattttaaagaggaaatggattgactcgcagacattttgtactaaggaatagaaaatctttgaattgctatttaaaaaaaaaaaatccctgtaaaatttaccattttaaactccagttgcaaaatcctgatcagctatgatgattcatacatttgagcgataaagcttttttcaatattacaaattcagtggggagtcactcaatacattacaaaaagagtacttacacttcctagtacccatgtgtatttttttttctttttaaagcaatctggtgtgccttttgagaaaagttccagtgttctcacagatcctgacttggtgtagcacagtgcttttcagaaacttggtccaacacctgaatgagtaatgtgtaaaacatataatgttttgtagctcaggatactgcaggtaaactaacactttttgccgaaaaaacattgaaaagacaaaggaaagcaaggaagttttgcttttttaaaaaattttttcaagcttaatgaagaaagagctggaaatccttttgtatggagcatttgccagcccagcaatataacaacttttgggtgcatatttcaatcacaattagatgaaatctttaattatcatttaatttgactttcatatttgcctgcagaaatgattgtgttgataagactctggaatgagacaaacctttattaagtaattccattttcagagccaacattaaagttttttttaattaaaaaaatgcctgtgtaatttatgagaaaaggggaagaggaattggcatgttggttgcatgagagttgcatggatatgtatttactatttaatctttagctttttgagatttggggtgtgctaagtcttgttagtttgaggggcctaaggagtgacacaataatggatcttaataaataacacttttctacatcatttctctacctttatatttcccttctattatatatgctgacaggatgatatttcattgtattcagtgtagaaggtgtttgtgagagaggatacttttgtgagttgatattaaggcaaagggaagtggtttataatttatcagaggaaatgaaatggtgtgctctttcattttataatatttcttttaaaattttataatgcttttaattggactgtgaaacctttaagacatttgtatttgaagtgcttttcagatatatttacattttaacatacagggatttgagagatgtcattgctggattttttcataggatcacccacatgaattttcttatcaaaagagtatgtcctaaagcttatttctaaccccaaacaggttactagcccattcctggatgttccgattctgaagatttagggtggtacctgggaatcagtatttctagcacgtcctccaggtggtgcttagctctggcaagtgtgggagagaccagagagaggtgaagttcccacccagccctctgcacagtgactggaaagttaatggccagtcgtttgtgcttctatgaaacctaagatgtgttacagtgatgttgcagtaggacaaagtcactcaggaaatcgagtggtaaacattgcagggctttgagttcaaatattgattagctctatgttaagatgccttgtcttcagggatagctttagagtgggatctctaacacaaagctgactcgggaatctttcatctgccattgacaaaatttgcccttgtgcaggcaagtaagactatactctctaattttatgggcactagccacctatggttgtttccatttaaatcagttaaaataaaaaattcagttcttcactgggaatggctgcattttactcaataaccgctgtggctagtcattgctttatcagagagcacagctgtagaacatttccatcatcacagaaagctctaatagtgctactgtaggattttccctcataatatagctcttctctttttatcctgggtagttgcaatggctaatagaattaggtggaaagatcatgcatccatctatgtactgcacattgcatactgaaatctgaaagaatgtttttgcaaaatgacttaatcatacttctctgagatcaaaatttaataacattactttcataacgtgaatttgttctatgttgacttttagtacttgaaatacaggcttaattaaaaatttgttggccaggtgcagtggctcacacctgtaatcccagcattttgagagattgaggtgggtggattgcttgagtccatgagttcgagaccagcctgggcaatatggcaaaaccccgtctctactaaaaatatacaaaaaattagctgggagtgatgctgtgcactgtagtcgcagctactcaggaggctggggggggaggatcacatgaactcaggaagttgaggctgcagcgagccatgatcacgccactacactccagcctgggtgacagagcgagaccctgtctcaaaaaaaaaaaaaaaaaagaaaaaggaaatttgtttaccatagtatatggcttctaataaagagctatactggtaaaatctcacagaaacaaaattgcaaatatttagtctttctcagattatataaattattcctagaaaagactgcaagcaatgaggctaataaacaggttgtacttatattttcataatgactttaatttacctttattttgcagtttcacaaatttaagatgaatatatttagctccctcttctggcataatttgagaatttttttgcttacaatggtcttatttattttttttggactgagaataaggttatcaatgtaatgttgaagaatgttatttatgagtgtcatccagttagattttttggtatcattgtaaatggttaaaacgcatgcaaaaagtttacgaaaacaccacattttaaaaactactaattgaccaaaaaatacataaacaaaggctttgacaaagttatacagaaatttattttgatatcaagtgggcagtgatcattcatattggcttctggatctgagactcagcccatacctggcatttgtgaggcttggggcaagaatgcaaaaagaggcccaagtaccctgtgcctaagtatttttgttataaatcatgtcaactgttcaataaaatctgtcccatcctttctaggcagttatttcttcctaatgaccaggaggagagatctgaattcaggttcttgggctcctgagagttctgccctagagtgtggtattatggggagagctggatcctggttcatccctggcttctccctgcacatccaaactcccatccatcctgccactccccccacctttggggcccaggggtgtacctagacaggggggtttgtcctggggagggtggacctgggggaaaggccataagaggccatttagcaggaaatcctggagcattactctgagtagaccctaggtgagaagcagtgggcatatcactttggcctggaaagtgcaaaagcccagagcaggggttcttcttgctcgggcctgatgtaattaaattattttgtacgtccttcattgtggtctaatgcattcaactatccaaattaaatacaatggtgggattttgttgtttgcagctttgactctcccggatcttgcagagcagtttgcccctcctgacattgccccgcctcttcttatcaagctcgtggaagccattgaaaagaaaggtaaccagactgctagagggcatcagttcctttgttctacccttatttcatggctcttattatttgtctcttgtgcattcattaagtaaatttcctactaccagctatgtccagatactctgctggacactcaaactgtttggggctaagtactgggaaaaatgtctcggtctataatttctaactctagattatcatgtagtttccatatggaaactattaaattcttcataatttaataaatatgattaactttcttcttagaggccagatggttttgccaaaattatcaacatgccaggtaagattaatagtaggagttgacttccaagaatatttggtacacatctagaacagatactggatggaaactggaatgtctctggcagcagcctcacaggttctccagagagctgtgttttgcatacatggtctgtggtctgttttgtgtcctaggtctggaatgttcaactctatacagaacacagagctccagcaacctggcagaattacgacagcttcttgattgtggtgagtgtcacagagctagaaatgcaaatgggaaagacaggtcttggctttctgtttcaggtaatgcacacacacaaaattgaatttaatctatgcagtgttctaaatttaaagggaactcaaatcatgtacagttctccctgccctgttatggtaacagtgcaaacctttgaaatttttctcctgagttgggctgcaagtgtgtgcacgcctccctgcaggcatgttggtcatcatcatagccatcaggccctgggtcctgcagaggagagaaaccacctcttggtgtttctctcgctctgtgtatctaccatctttccttgaccctgaatttggctacatctaattcatctgaatcaattaaaaaatatttttaagcctatgtcacttaagaaatgtctcttctgacatcctttttcttttattacctttcccttccattttccttttccgtttccctttctttctggcttgccttctttctttttttgtgttgagtgcattaagtaacatcacgatattgttatgttcagtggtgtgctgataaaccaactctctaggaagaaaaaggccctggtttgtagcatctgcccatttttgtggcatgaatattcccaccggggcttatttcaagctaaccaacatgatgtcactggatgtggaattgggaagaattgaggacagtttgttaaataacactaattaatttagccaagagggctttagtaccccaaacacccactccctcctttggcatagatgaaaaactacaaatcaatttacttgccagcattccagcaagtcatcttcttataaatctttcaagatccttcattccctcataacgcttaaaaaaattatatactgcctcacatcattttaactgaaattaggtgtttaagccaaaaagagtgaaactcagttttggactccgtcagaggtataattgtacaaagaatgcccacatgacagtaaatgagaatttgaagcatgaggcagtttcaaaatgaggcaacttctgagacttttagaaaagaggtttttttggagaaaaggaggagactagacctttatcagtatcagtaaattcttacacttgaaatgttctgaccagatgtttcaaaagttaaaaaaatgtttaactccatttttcctttgtacatggaaatcagttgcatgcgaacagagcatatcctctttgctgctctgcctcctgcacttcccacagagcaggtcattagaagttaacatgcagaacactcaaggtgaaaaggcttgtttttcggtgtttctgacagctttatcagggctttaaggaaacgctgaattttgtccttagccaattgaaatgaagacacatgtttgggtcagaaaattggtcaaattatgaacacgtttagtcacaggaagagtttagacatcagagcccgatgaagtggaagttatttgagaaatagtggttaggtttataatgtgatcaacacaaaatgatgcagtttagttatttaaaaaaaaaaaaaaactcttcacaccactcgtgagatagagtcaacaaccaagattcacgtcaatggtacattttgaccaacaggtttccttccccagtgagatcaaaacacatagaaaactggtttcatttggagtctgtgctaaaaaaaagtgaaatttgtgccccaccccaaaaaatataaataaataaatgatgtccaaacttgggagtggatctgccagatctgtttccaactcaaagatttttcaatacataaaaacattgtataatatcctggaggaagctccaaaatagtcacttacacctaaaaaaaaaaattatggcttttaactaaccttgtgaattaccagtctttgaaaaggacagacatggcagacaatagcccacttttattagcacctgttatgctagttcatccatacattaactttgtgatgtatgtcctagtaactttaactcaccagaaaagaaagctgaccctcaggtaaataatttctttcacatttttcagtgccttagtggctaatttttctgactccaaaagtccttgatttttttctcttttttaattttgccctaaaatgaattgtttctttgtctcgtgcaagttttaatgattcagattttcacctgacagtttttggtttcatttaacctaattcaggctttcttagccttggtactattgacattttaggctggataattctttgctggaagagtgggagcttgtcccgtgcattgtgggaagcttagccacatccctaacctctacccatgaggtgccagcagcattctcccccagttgtgacaatcagaaatgtctccagacattgccagatggctcatggcagagggcaggatcccactcccactgggaaccactaacctagggagagacctaaggaagaggagactccattccagggggagggagggaggagtgaagggttggagagtttactgggtacctgtcatgagtagactcagtgaaaagtgaggtaggagagaatgcaaacacctccaacccagacctaaagattatgtagctcttcaaaagtcatcgcatgacaggtaggaatagctaatggaagagcacgttaggccagtttcaatgcagaaaaggattcttagagagcagaagtcagataaatagaacagactttgtcactagctctagtagaatttgacataaggtaaggttacccaaagacctgcataggataattttattcatatactatgaaagttcttttgatatacctcatgtgttggaaaagggctttgatgaattaacttcacttgtggattgagccttctagttcaatccacaaacatttaacacgttgtatgtgctggacactgagggatgccagaagagcaggtgacagccacagtccctgcccttgacgtacctcggtctagtagggaaacacataatcccacactatgattatactccttgggaagtgtcttgttagaggggtggctcattagcactgcagaagcacagagggaaaccctgcctgagggagggatgtgtgcatatttattatcttaacgtttatactgcatcaccaaatgttttatcacatattttaggataagcaaattcggtaatattaattttccgggcagagagacattagatgaaacatgcggggcaaagtgtatgggaaaccagaagcacggccaagagtggtgaccatagagaattcctatagcagcacacacacaattttatttgacagtatttaattatgctcacaattgcattaccttcaacgtagatcctttatgcagaggatctactacagtggtattgcccctcccacacttgttaaacatgtgatatgtctctggttggttgtttgtaggacatttaagtgatttaacacttcgcctcttcaccttttaaatttaataattcttttcctcaagttgacctatccatatcctattccagacctacttttcttagagctgtgtggttgtgtgactcactttcggaacgtcggcctacctagtggggcaagtttggtttatgatgatatgtccaaggaatttttgtagtcttaggctcaacctagaatgatttgtactgtcatatttcattcaaggttatctaggatactaccttctcccactcatttatactcaaacactttgcagtaaactttcatacttcctcattctctcctaggccacagcccaatgcagtcaatcaccgagttatatgaggtctcgataatattttgtacatttctaactgcattagaattcagacccccatcaccttgattcagagaactaaatctggtagttttacttctagcagcactcccttccaatttattcttaacactgtcattagtaaagctgttacaaacgtagtatcttgcccatcagcccacctttgctccactgagtacacaagtccccagattactttcctcaagttatccttcgcattgctagtgtacatccttcagcagcagccaaagtcctctccttttctagaggcccatggtcacccctgcccccagatctttgtttctagcatccctttcttctgctgggcattgtgtctttttccaacccaagtacttagagtgccatgcgtagtgagtgcctggagggtggtattgattagttttacccccattattggatcgcttgacctgtttcccagctgagggatttactggacaggtatgctcatcttattttctgagattgtctgatatccacaggttagattagtaatactcagacagaattagggagaaacattctaaaaatgttcaaattattttcatggatattcttgagattggttgctaaaagtctgtagtatcttactgttgaatccatcactctgttggtgacatttacatgaattctgagacatatcaactcaagtcttaggaaatctgggaatatgcatttttaaatttttcctgttgaggttttaggaaacatttactatatgactaaccattcctagttagaacccttttcagtcagggcagaaccaccctcagaggatgttaggaaatgtttgggttctgtattcgtttgctcaggcagttataacaagttaccacagactgcgtggcttaaaacgcagaaacttggccaggcacagtggctcacacctgtaatcccagcactttgggaggctgaggcgggtggatcacgaggtcaggagtttgagaccagcctgaccaacatgatgaaaccctgtctctactaaaaatacaaaaattagccaggcgtggtggtacacacctgtaatcccacctactcaggaggctgaggcaggagaatcgcttgaacccgggaggtgaaggttgcagtgagccgagatcacaccagagatgcactccagccttggcaacagagtgagactccatctcaaaaagcagaaacttacttctcgtggttctggaggctagaagtccgagaaaaaagcatgtttggtttcccctgaggcttctgtccttggcttgtagatggtcacctgctcactgcatcctcacagcgtttctcctctgtgcctgtgcatccctagtgtgtctctctctgtgtcctcatttcccctcctagaaggatatcagttacattggattagagtccactctaatggcctcattttaacttacatgcagtcactttctgaggcattaggagtttgggcttagaggggtgggacagaggatggggtaggtaaccactgaagatgcagcccaattcagcccataacaaaggcattattttttgttgccccaaagtgtggaggtctgctactggcatcatgggcagggggtcaggcatcctaagtgcttgcaatatgtcagagagacctccacaggaaaaattgttctaccccaaatgcccggagcaacccctacaagaagtacggctaacgaatactttgtgtcttgtatttatcctcatattgcttccttatttttttttttttttgtcacatgtgagtcaaattgttcagaaaattagcccaactgatgtattctataaaataaatgtctgaaatatttcttaaattgtttcctagatacaccctccgtggacttggaaatgatcgatgtgcacgttttggctgacgctttcaaacgctatctcctggacttaccaaatcctgtcattccagcagccgtttacagtgaaatgatttctttagctccaggtttgttttttctcttctgggaacctcattgaacatacatggagatgtagaggtgcttgtatatgtcttgcatatatagaaatagtggttagaaaatagtagtaataacctgtccctcccccaacaataccacctcaaatttcctcctccacccaagcatccaagagaagacccagattctcatttgcttgggaagcccgtctgcatgtcagaatcagaaatggctcattgttaacctattggtcttaacaaagtttgtacgtcaatgaaggacacggtcttccaagtactagtgtcagattcaaggaactgggactagaatccagtgatgggggatgttcttgtcatctttcctgagtggccataacagaatgtgttgagggaagatggctctcagttttaggagataaggttcagttaagtgctttggggacaggaaactggttcgtaaccttcaaagttaaaacctgtgatacttatctgatgctcctctgagttagccaatcacacttgaagctgctcaatactgggtaagttgctgccagcacaccctgaacagcttgtggtttctttacacactgagctttttgcatttccatttgacctgagatttctactttctcataatgcgttttctaatgagaaggacaaatgtactgtgtgcttctcccaacaactttttaaatgactcctatagcttgaagaaagagcagaacttttctaggtgtttattcactgatacctggaagtagtcgcttactcatttctctttttttttttttttaaacttgtagaagtacaaagctccgaagaatatattcagctattgaagaagcttattaggtcgcctagcatacctcatcagtattggcttacgcttcagtatttgttaaaacatttcttcaagctctctcaaacctccagcaaaaatctgttgaatgcaagagtactctctgaaattttcagccctatgcttttcagattctcagcagccaggtaagtgaaaggagacaaacatgtattttggggtgatgagggtagtcctaaatggattggtcatgaaaatgtattctgaatatactactccagagatgcatgtgcagatgctatcacacacattcacttgagtgtatataaatgaaaatgagtttgcttttagggaaaaggtttctaataaactctctttcttacagctctgataatactgaaaacctcataaaagttatagaaattttaatctcaactgaatggaatgaacgacagcctgcaccaggtaatgctttttgagcatttaacattctctcattgttcattttttagagccttaaaaaatgatggctataaacctcctttgaagtaacacagcttcttatggaattacagttggtagtaatatgttaccttgtgatttaaagaaaaaatagctgagtggtagtgtatatgttaattattatccgagtttcaacatttgtggattttaaattatcttggttttaggtgagagtttggagagttccctgtacccttcaacatttatgcttcaggttgttgaagagatttatggagttcattttagttgttgacatttttgtttttctttctaatacttacaaagtaggggatttataattactatataatttaaagtattttagaatgtgttttttggaagtgggtatgctgagaaatgcctgtcaaaataaacattttcaataatgcaagcagtatgaaaccagtgttccctgcagcaagttcgagcaagccagacacttctttgaaagcaggctgctgttcagttagccatttaacaaagcaggaaatgtagaccatgttagcaatgcatttaatttaaactgatgtatttttcttctaccgtggaaagtctaaacaacctcattttgctatataccagttaaaagttagctaatcgacactggtcatttagaatagtaattagggtactatacgtgtgaagtttcaggaccagtaaaaggtgttgcttgtagtcttaatttatgcctggaacttaaaatgaaactccatgaatatatttattataggtaatatatgcagattaccatatttatctctgtatgagcaggcatggggactcagtttcatcttcatgcaatggagagttaagttgtgctttttcttaattgggtattgcacagccaggcttggttacttgcatctggatggggcagcctaagagaggccagggcctagactcaaaacccacctgcagcaggtaggatagaggatagggtaggtaaacactgaagatgcgggtattgggaaaggtttatgtggacaggcccaaaatgtaccaaaggtgagagagaggtatccggtatagtagataaggcaagcatgggatgttctaaatcacagcaagcagaatgttttaacaggggtgcccagaattctaggtaaactacgtcaaagaagactgtcaacaggtagggactaggacttcagtccaggggttggccaaaaggcttcatctcgtgtgagtacacaggtcactgtgaatggatttgggagctctgtgctggtgttcagaggctgcctttggacttagtggaaaagaattggggtaggggtgtggcacatggcacttaagttgaggtttatgttagagactaggtagagctggaccctgctctcagtgaagggctagtgggtagtcctgatcttttcagcggccactcctctagagagaggagacacatggaagccaaagccagacagggtttgacagatacccacaaatgaatttatcacatggaattttggagaatttctactacacaaggtatagcagaatcagtggtagagtttgattagcctgactggtgtaaactagttaaacgcctttgttagtttcatcctaattccaccaaagtaaaaacgggtatctgcactattttcataatgccacccggaaagctgtttgatatgtcaaaggaccctacatttctctgctgagcaattggtgcgcctgtttcaaaggaggattagttccatcagctctgctaaaggatgacaaagccttgaacatttgctagatcatcccagtatttatgtggcctcttaaaaaaaattaaatccaagtcggttttaaactctagtttgagccgttttcccaggaagtttgtgtgatttgtataggacctttgggattaaatggctgttttagtatctctcatgtgtgcatacattgtactgcccactccaggaacaaaacgtccccatccagaacatcttcgtattcaggaatggctccagtgcaaatgactgctatggcagcctgggttgaagaaatgattcttaggcctggtttaaaaaatgcaataatttcttagagtccttcagcattgccacagcatgtgctagtaccagacagaactttgaaagcacagcaccttacatctccagcgaatggccatttacagtaacattgttgtgaacacaaatgagtacctgaatgatgtttaagggagacaaaagcaagactctgttatagggcagatagacagcatttctaattattaccagatagaacttgaaatgacaaagcttatgatgtttgaggcaaagtatcagttcaaataagagccattagcacatagtatctaattaaatgctaggtgggagtgcacatactctaagtacaaaaagaactttagaaatgcagctggtgactttctagggtaatggagtagacagaaaaggctcatagaagaaatagggcttgaaatgtgccttgaagaataggtacaatttgaataggcaaaggagaaatagcattttgatgcatggagtttaaagacttattcaaaataaattacacagtacaaaataatggcttggtattttacaaaagcagtacatattttaagtgatagtatcacaaaaaacatcattttagagttgaaagcattgtccagctttaccaatttggacatgaggaaaccgaggcccacagatagaggttcgctctgtgctacccggccagtatgggcccaaaccgggtctgcccaggagccgcctcctacactccagcccattctatctgccatgccctgctgcctggatttttggaaacttcgtgagcaatgaggctgcttttagtgtccaatcaaaaactcctctgaagtttccagcatgtaataaactaaaaatatgtgaaattagcccccatgggtcacatatagtaaacaaagtcagggcaatgtttatacttttcaggataaggctccaaatcactccatgagctgtgcagtggaaaaaaaagtgggcttctgactcaaatagatctggattggaatctcaactctctcgagtaactcagcttttccaaattgttttccagactgtggaattgggttaatgcctctctcctggggttggtatgagatttaatgaactgataatttctctgctatctatcgcatcaactctagcttttgaggccttatgggagctgtcctcattcagcaggtctgattccttcagtccacccattcctcattagttgtgtgaatcctgtcaggcctttttccttactgacgccatgttcccagccagcagagctacggcctctaggagcctgtaggggctaaaagggacacttgggaagttgccaccctgatgtgggtacattgcttggagggagaaaggtgcctttgtatgaatatgtggcttggtgaatggagcagcctagatttcatcaccactcctccatcttgcctaggtgcctttgcacagtgcacaaaatatgcaaccatacgtcgctgccccaagcagtgccatccactttatctgcactcaagtaggtccttcccgttttatatgcaagttaagtcgacccattcagtatgtttatgcctttaagcttcctgtcaccttatgtttaactgtctatagtttttcctattcatctgcttaattacatttctaaagggtaggggtaaaggctttttctccttttgagctcttcctagcagagaactaggtacagcataataattatctaaatttttctttgataaacttccaactttcaaagaatagtaatacatcaacacatctaatacatccagcaatcctgggaaataaggattctcctcatttacagagggaagctaagatttggaaaaggtagggcacagagtaagctctctagactttgttgatagtttgctgttctattttgttactaaaaagtcttaacttgtcgtttggctttcaatatttttttcttgaatcattgtgttatctttacccaattaatgcttaggcaggtaaagtagatttctgtaggcaaaccaaggtaaaaataagtctatttaacacagggtgcctttgaatgaaacccattataagtgtatttacatatttcagatttcatggatatattcagaaatattaatgtaatataattgaagtctaatattgcaccctcaagcccagagtggaaaataaatgactctttctaccccttgcccttctacacctgtcaaagttaatttttaaccactggcacattgcaaaacattcatcctgaagagcctgattcataaatcttgttttaaatgctctgggcttggttctcaacccagactaaaggcaagcactaaggtagagggaaatgacattcaaagagttttacttgtctctgatttaatttttattggtttaaaatgtggtctgacattagagggttgcttcaaaggtgaaaaatgaaactttgaaaaattacatgtttgtagatgcgtagaactaaacgggcaagccacactaggttttgtcaaacaatagttttatttgtgtcctgagagacacaggtattttggtatgtatgtgtttaggaggggtatatagtcagttttacttttgttttcacagtgcagatgtctctttgtctcaagggacaaagatctgagggagaattgcaggggggactactttattctgctaagcagtggggatgcctttatcagaaacctggtagaatgtgtcagagtttatacatacgtaaacctgggcttatttatatacttaaatggatgttttccttagcataatgtcagttaagaccagtggatatggagcaaataatttgaattaccctaaaaggccctctgttctaagttgtcttaagttaaaattatgaagagaggtattcattttacccttagatgaagattttggttaatttttgttgtctattctttttttcatggtctttgttcataaatgatgtccagaaaaagaagaagttttctaggttgaaagctgcttgtgcaacatttgccacttgatggtgacttgtacatatgaaatatagtattcagtttgtaacttttgaacagtttaaggatcaagagacattttcctaactatatctgctgagaagtgaaacaatgggctgtatttgcctctgaaatgagttttacgaaactttgaggaaagggagaatgatacatattgttttaaagaatccagaaggtaaagttagttttccagtgtgtctaggcctttgaggtcccagagaaatgctgacattaaaataaaagttttcctacaacactagcagcttcgtgaaaactgtacttttgatttactaattagtgagtcatatagatcaagtgacagtaatacaattatgtacattagttggtgtcaaatttggacatacgaaatatacagaaagttgatggttttctcccaaagcaggaattactgattcagttctaccagcagagggctcccttttttaagctaataaagaacatgtgtcttgcagatcactttttaaacactaaaattcaacgggaaaaagattcagctcacactttcctaatataataggacctctttggtagatgattgtacatattgtgagaaatttgtttaaggcaaagtttttccaatctatttcaagactttctatacgttgagagagtactgctttccagtggcttattttcttctgaaacagaaaatatactggtggacttaacagagcattttaatcttagaaggttttgacatgaaacatcatgtgaatccagacaggtatgcttaggagactgatgtttccaatgtttctagctttagaaaggctatttttaaaagtagggcaagattatgcagctcaggatgcaagggtattctctgaactaaccatatgtccctatgatcagatggcagattcacttatagactgttatttccattgggaaagtttttcaatattatatcagttgcactaaaggaaagtttgtaaaatcactttcattgtgggtttaacagcactttccagatatttcaagtaaccctgaagctagttgctgctgttggcctgtgtggactttatgtgaccactggatcactttcccatgcagagtatgagggtattattgaaagaacctatgtcttcaaagggaatgaaatgttttgttttaatttaagcaagctaaaaatagaaaacagaaaaaaccagagttttgttaggggtgtgaaattttttgcatgtggcttaaaagattaacttcagttttgtccatttttttttacgttctctagcaaagggaagtgaggagcagggacaatgggtagagaagggcatttgaaaccatcagaagattgggttctagtcttagggctataatcttctgtaaaccacttcacctccctgggtcagatttcgttttcccctctatggcatgcaggaattgattgaagtgaactctaaattactttctggtgtaaagtttggtgatttccctggataaccttaaagctatctatgctcatgcaactgaaaattttcttagatcaaattttaattaaatagtagtcagtaatcccaagtctggtccattgccactttctcaaataaagggcaaacatccgcttagaaaggtatgcccttctctgcccttctatcctttaccccattagctggcacataaacctaatgcagagacaccttttaattagcaggtcatatggccatttaaatgcgagttgcaatcgacctcataaaaatagccgcagtgttgttttattctgaatcgtcacatgatcatggagtatagtatgcatatggtgtggggtttaatattcgtccgaggatgccctcctactacttactattgaacatttttgtaatctcctccctgcccgagttgctcacaagggctttcctgttacacctgcagggctgtctgtgctggtgtgtgggaggaggtgcaagaggtggacacgagcgaggcgctgtgttctgggttgttccaagaggttcaggcctttacaagtgaggctttgattctattttttgctgaactagctcagccacttcctgtgtttggctgtgcatagtgcctcgcttcactgtcggctacttgagccccgcgagccagccagcgcgctcagcagccagtgagactattttaggtcccctcacaatggccttctcatttcccaggcgaaaatgagcaagttggtcttgcattggccacttgtcagccgatgacaactttgacttgggctcccctccccctcccgaaatccctagctcagcaaatatttgaacctgcccaagttaatcatgaagctgcgatctttatctaagggagacgtgcgagcgcctgggctcctttcctccccgatacagtagcgaaatccagttggcttctcaatgaggagccggcagtgagcggcggtggcccggacgcactgccgggcggggcgtggggcggagggacgagccgagccgagccaagcggagctgggccactgtgcacgcccggagggtcctggcggcgcccccgctcctgcgcgcactctcggcgccggacacgagcactgcctgccgggaacaggctggggggaggtgcgggggcttggcccacttggtggaagaacagctttggggattttttttttttcattgtcggatacaggcatttcaaagggaaaccgttgaaatgcataacctgcaaagtaagttgccttgaatttgtgcacttctctgttccttatctgagcggtgcctttctgtagtttgtcttggagtacgtgtgtgtgcgtgcgcccctgtaagcgctgcctggggaggacagatgggagattaggggagacactccccctgtcctcgagggggacagtggctgggaaagatagggtttaggttggaatttcagtaagaaggtactaattacaacgtgcttggttggaagttggtgccaggccagggcttggagagaccatgggaaaatcacctgtctccctgccttctccctgagttagtttgccacagaagatccaacagccagactggtttgcaccgacggttcccaaatgcatggactggcactctgggctgttacacccgccacagctgctcggagaacttgtctccttgcttcgggggagggtcgacattttaattaaactaaaaaagaatgtttttctgaatcttagggcatacagccacttttaccatttttatttgaatttgagttcaggtaaacttaggcaaatagaaaagtgggagagggtgggaagagacaaggtgagcctgcttttcccaatactgggaaaatgaattaaactagacgggggacgtcagagaacagaatgccttgcctttggtctgctttttaatatattttatgatcccaaattttacagaaagtctcaagggtttctgtgttttttaaatggtcaaatatgtgacatacatgtgtacatagatcacagagccccactgtagttttttaaatgagccacatttaccttggggaagagcccctccccccccgccatcataatattgtgaatgtaaagagagattggttcacaatgagaatgtacagtaggctcctataagggtgacaggattatatgcagaatgactttgaagagccaaaattgatttatttatgttaagtagtgctaagaaggaatatttgtcccggagtgaggcatttgagatagagggggaaaagcaaaaaaaaaaaaaaaaaaaaaaaaaaagtgattacatcatcttcccgttcaagcagtattagtagcgaagatgggttcatcagtgaaatattttgcaaagataaatatacctccactctgcattctgatctatagcctctttctttttggaagaagcattttctttgcccagtttttttaggcagtcacattaaaattctcattaataatgttgacagacaattacgtttattatttctgctaataggcatctgcattcctattcagaattttcattgttagtctataaagtctagttttaactttggaatgtttggtagaggaggacatctatacattttcttttaactgtcctttctaatgtggtacatttgtgacagtgtttgaattctgggttttcagtgaattatggaggactaaaataccaggagtagtccgtactgcttctcttatacatgagagatatctaaggactataaaacataacttaagtatacccttttaatgcctttgtaagatttttaaaccaaggaatgactgggctatctataaacccagatgcactaagtggggagaaaagctcggagctgcagcatatcagcttttgtcaacctgccaacagcagagcgtaccatgctgcaaggagtaataaacaaggaattagaaaactcgctgctggagaacagtcaaattaaacacctttttgaaaggatgagcatgtatatattgcagttctattaaatgtagcttcttagtgaggttggcattatgttaaggctggtatggaagagaactgatgaagcaggagtggtctggtgacatttttctgacttgattggctggggcgtgtgatgtaataggtttcagtgcagccccttataggttttaaaatgaattccaagacaccattacaaagaaagccggactcttttcttataactgagctcagccaaggaaactcttgcacaaatgtacaatactgtttggaatatggaagacctggatttagaatatgccaagacagatataaattgtggcacagacttgatgttttatatagaaatggacccaccaggtaatactgcagtattattgtagagagttagttaatttcgtggctttttaatttttcgaaagctactgtaaaagatcctttttggatttctgtttttattaatttgtttcattgataaaaattagtttgctcatggcttaaaaattaaacagattgtttgactgtctgtggaagcaagcagctcaggctgtgtgtggtaaatgcttattcttacttgaatggatatgaattgaactccagtttttcactggtgtcttttgttaatcgagatccttccctgggtgagttatgttgtgggatattgtccctgtaattaaaatgatgcatcttttgtgctgcttttctctgttgccagtggatgagaacagtgtagcactttgcagtgataacacttggtactttagaaagcatgtaaaatgtagcagtgattacaactcagttctctaaatgttgagactttgcttgctctctcatattaagatattataatgaaaaaagaagttgactttccattattgttagtctttgtaaaatattcttggtagatacctgaaatcattttttgtataagttaaaatagtaacagtgctttaaaacttatgacagaatttacctaaaaatcctagatttattttgtttcctaagtaagttgttttattccaatgttagctctccccctgcccccatttaaggtattcaggaatactgcagtcttttatttgtcaccaattggtatatatgaatactgatttgacattgaggaagggggatatcatttttaatcagacctagtatatagagcacaatttatccaacagaatattaacatattaaagagatttagggcacagatgagagtttcttaaagtggcttttggcagaacagtgcctgaaatactaagattagagaaacccaattgctcctcttaaaacatactgctgtagatgagcctttttattactgcaacagagtttgtggaggacagagaccaaatttgtctttcgtaattaaataagaggaaattaaagccaactcatgttattcctgctactcatatgttcatagtttcttactttagatggatttgaccaggcatgaaactttaatataactagaatctagaagtacagaatgtcatgactctggatttactttgaaatttattcacatggccagcccaatttatttgttagtttctaaggctctctctcttttctccttttcagtttcatttctttttgagccatgctctgaaagattttttttaagaaaattatcttccatattgcatggaattgtgaactaatgctatatatttcagttactctaactttttatttttttaaagtaaaagtattcatctaaagaaatttagttctaatgtagttgggattgcgaacaactttttctttttcatctgcagcactgcctcctaaaccaccaaaacctactactgtagccaacaacggtatgaataacaatatgtccttacaagatgctgaatggtactggggagatatctcgaggtaaggctacagaaacttcattttcagagagttttagattaaaagaaagaaaagcaccagcttgctaagttccatttttaggatatcatccaacataagcatgaagcatagttggttctcttccaaagacgaccagaaaaagtcactgagcactggagaactgtgggtgctggatgccacaggaaattaaatacccgggaagtttcattattgacagagatgtcagtgaagtgccagagtgaagtggcactgcctaagaacagagtgtgaaggcactctatctattaagcacaactctaagaattcttgccttaaacacaataagaaaacaatgccattttatgttagctttgggaagggggagtaaggttggagaaactcttttgagatcatgagtttctgtgctcatttgtcagagagattgtaatgtttggttgaaaaaataaaaacttagtaccacagatacaccaatagtgaaagtgatatgcacctgtttgtgatgagactgcaattgctaacatttctatttaaacaaattattagctcttattagtgagctctgaaaatgcaattcattaatttaaatctatgtgggcaggaggaatatgggcactcactgtactttccacttgattttgctgtgaacctaaaactgctctaaaaaatagcctattttaaaaaatataaatctgtggtcactaaaccttaagatgagcattgttttgtgttttcatttcagggaagaagtgaatgaaaaacttcgagatacagcagacgggacctttttggtacgagatgcgtctactaaaatgcatggtgattatactcttacactaaggtaagccagggaatatagctgaaattagggttttgggctgatattaaaacatatttccttattccaaaatgttaatacctttatttttatattgtttttacaggaaagggggaaataacaaattaatcaaaatatttcatcgagatgggaaatatggcttctctgacccattaaccttcagttctgtggttgaattaataaaccactaccggaatgaatctctagctcagtataatcccaaattggatgtgaaattactttatccagtatccaaataccaacaggtaataaaaactgaatgaattatccagttacgatgtttagacaagatccttttaatacttagaaaacatttgaagcagatgaattacatgtaatcaagtctaaaaaacttgacactcgtaattacataattgcaattttaaagatgtttccatgtcagctattttgttaaacaattgttatttgattaaataccttatccattgaatttattttaatctttctaggatcaagttgtcaaagaagataatattgaagctgtagggaaaaaattacatgaatataacactcagtttcaagaaaaaagtcgagaatatgatagattatatgaagaatatacccgcacatcccaggtgagttttctatgaaaatcagattaaaaaataagagttctaaacttttaaagactaacatggaaaaaagaatttaaaaggttgagtttttacgaatgaggtgggggtgagagcatttatttgtgaatcattgttgattattctagtgtaatatctctaaagctttaaaccaaaaattttaagtatcagaataataaattaagttcacgtgataactgaagcagtcactgagtttcaagttgatttaattcgtgatagaaggatcctgtttagattggaagttagtaataactggaagtttcacagacttgtctaatccctgaaatggagatttaggcattaatatatatcctaccatgaaaaggaagggctatatactgctgtgcttttctagacccttattcttcactggtcactcatgtatctgggaatgccagagggaacagaaaacaacagggatgctataaactacaatagcttttaagaagataaaaactataggaaattgctacgcaatcatttttcatagattgagaaaattctccagaggaaatacttgtttctgggatactgttttaatggattttatgaatttgagtcccactctgctaataatacagatcaaatgtcctggtagtgtcttgcagtaagagattgttctatgaaaggtatgacattatctttttaaaattatgttgcaggaaatccaaatgaaaaggacagctattgaagcatttaatgaaaccataaaaatatttgaagaacagtgccagacccaagagcggtacagcaaagaatacatagaaaagtttaaacgtgaaggcaatgagaaagaaatacaaaggttggtgtttcccttgttcttgtgctagagataaccaaaatcctctaaaaccatttaaagatgatctcgctttctgtgctttgaatgatcacgtggacacaggaaggggaatatcactctggggactgtggtggggtggggggaggagggagggatagcattgggagatatacctaatgctagatgacgagttagtgggtgcggcgcaccagcatggcacatgtatacatatgtaactaacctgcacaatgtgcacatgtaccctaaaacttaaagtataataaaaataaaaaaataaaataaaataaaatatgttgagccactccaaaaaaaaaaaaaaatgacaggaagagaagccacgctttacctaaggaaaactgctgggaaaccatagtgaaacttttcataaactttggggaccgttcctgatgtacccagataataacaaatacgtttcttttgcctgcaggattatgcataattatgataagttgaagtctcgaatcagtgaaattattgacagtagaagaagattggaagaagacttgaagaagcaggcagctgagtatcgagaaattgacaaacgtatgaacagcattaaaccagaccttatccagctgagaaagacgagagaccaatacttgatgtaagtatttgaaatggaatcctatacatgaataattggtgattgctacaattcaggatgagttaatgcgttctcttttcaaaactgtttttcaggtggttgactcaaaaaggtgttcggcaaaagaagttgaacgagtggttgggcaatgaaaacactgaagagtaagtagttactaaagatggtgatagcagaagatttttctcattttaggaaaatgcatgacttgctttgtttttagaacaagtgaggaattttactgagtttggaacatcttgtaggagaaaatgtataaactcagtgccattatccagaattttaaaaaaagaaagcttagctaaggaggactaggatttatttttactcataatgctgtgaaacaactctctgtgtccataatgatgtccctgaacatctgaaaaatcccaaaatatttttggaacagtcagagaaaaaataattatgcttaatatattttaaagcttaagtatatactttgtttgaattagtcaaaaactggcaatctgcctagtcaatttcctgatctaaactggataaacgagattgttttaataccttccactctgcccaggtacctgagtgtggttgcttgaaaacagaaatagtacagttgattggtaactctttgtcctgggaggttgcactggaggctgaataccaggagaggaaaactcaggtcgggcagaggcaggcatgtgatggccagtctgactggcttggtaggggccaggagggaagtgacgggggtatgcctagggaagacagcaaggcaggctgatggctcctgcactcttcatttagaaactttctgtcctgcctgcctagccaatattcactggtggaagatgatgaagatttgccccatcatgatgagaagacatggaatgttggaagcagcaaccgaaacaaagctgaaaacctgttgcgagggaagcgagatggcacttttcttgtccgggagagcagtaaacagggctgctatgcctgctctgtagtgtatgtatctccagcaaacttttctttacaacatctcatgaagagatgtttcatttattcattcattgagttttgggggcaaagatttgacatagttttagtcttgaataagcttacagtacaataatgtagaagagaaaccaaagcagctgtaataccattttaaagtctagccagaagtgtatgttaatacagtctaatagatacctactgtttagttggaagactaggtttggattcccattcagtgctaattaatcatgagaaatcgccaagtctttttttctcatctttaaaatggaagtggcagtgcctgccttttttgcctctcaaggctactatagttagaatctgaggtaatttatgtgagaacatcacccataggaaaaatactcatcaggaacaggtgaaaaaaaaaaggattctgatcattatccttgagataggtacacccacattggatcactgacatcaccatttccaagaaattaatgtcctctagtagggaatggttctaaaagtatgttacactccatgatcacctttcatttaatgagagaaatagtcctacagcaaagaagggtacttttgtccttactgtgcataagggcacatgcagagatggagagttgtgcagacacctcaaggacagccagaaagaaggaatcctatgaatagtcataatgggagtaatagtaacactgctagtcatggagcactgcagatagttgtcctcatcatgattggaagctaccacttgttgcatgcttactgcatgtcaggcattctatctagcattttgcatgcatgatctcatttcatttctcaaagtaactgtattacatgcattttactattgtcttccctttaaaccattttaaagatgaaaatacagtcagtcagtgaagctgggttacctacccaaggcactcggccaggtgtcagttgtaacctaggaccctttccccaagttgagactgcacaataatgctttttattaaagatgccctgaagagttgtgaattgtcttggacaagctcaaaagacagtttttcttctctcctctctagggtggacggcgaagtaaagcattgtgtcataaacaaaacagcaactggctatggctttgccgagccctataacttgtacagctctctgaaagaactggtgctacattaccaacacacctcccttgtgcagcacaacgactccctcaatgtcacactagcctacccagtatatgcacagcagaggcgatgaagcgcttactctttgatccttctcctgaagttcagccaccctgaggcctctggaaagcaaagggctcctctccagtctgatctgtgaattgagctgcagaaacgaagccatctttctttggatgggactagagctttctttcacaaaaaagaagtaggggaagacatgcagcctaaggctgtatgatgaccacacgttcctaagctggagtgcttatcccttctttttctttttttctttggtttaatttaaagccacaaccacatacaacacaaagagaaaaagaaatgcaaaaatctctgcgtgcagggacaaagaggcctttaaccatggtgcttgttaatgctttctgaagctttaccagctgaaagttgggactctggagagcggaggagagagaggcagaagaaccctggcctgagaaggtttggtccagcctggtttagcctggatgttgctgtgcacggtggacccagacacatcgcactgtggattatttcattttgtaacaaatgaacgatatgtagcagaaaggcacgtccactcacaagggacgctttgggagaatgtcagttcatgtatgttcagaagaaattctgtcatagaaagtgccagaaagtgtttaacttgtcaaaaaacaaaaacccagcaacagaaaaatggagtttggaaaacaggacttaaaatgacattcagtatataaaatatgtacataatattggatgactaactatcaaatagatggatttgtatcaataccaaatagcttctgttttgttttgctgaaggctaaattcacagcgctatgcaattcttaattttcattaagttgttatttcagttttaaatgtaccttcagaataagcttccccaccccagtttttgttgcttgaaaatattgttgtcccggatttttgttaatattcatttttgttatccttttttaaaagtaaatgtacaggatgccagtaaaaaaaaaaaatggcttcagaattaaaactatgaaatattttacagtttttcttgtacagagtacttggctgttagcccaaggttaaaaagttcataacagattttttttggactgttttgttgggcagtgcctgataagcttcaaagctgctttattcaataaaaaaaagaaatgaaaaagatatatgaatatgacaaagtattgctgagtccaacaatgttgttttaagactcttaaaatacggtacctggcaatgtttatttcataaagaattgtgaacttcttgaatctagggagggggaatgtagtgaagggatgtatcaagtggggtggtgggagggggaggcaaggttatatgcactttctcatgatttacagagaagtgaataactgcaaagtgaagttgcttcttctacttcagtcttctctcactttgatttgctagttgttatcaattaatgacaattacaaacctactgtatctctaatacagtgtgactggtcaggtatttcagttcttaggaaggaagtgccaagtttgtttttgggttcctggaacagcgctcacctttgtttagaacactggtttaaagggataatcatctctgtcacattagactatccatcatgaccagcaaatactcattttaggaaaaaaaaaagcatgatctgaaaaatacttttggtggtatgttggttaccctcctagctttccatttggtttagaacataaagcaaatagacacagtcatactgtcactgctctggactgtgtggagctcgctaaagtcatggtcattgcaggaatccaagtggcagtccttctcattcattctaatcattgtatgtgcttcactacgggggggagaaggaaacgttagcatcatgtttcccatttagggcaggagtgagaggtctctcttcctgatttagatatgcaaaagctggtatgttcagtaggaactgtacatgtgttgggaggcataaagactaattagcaaccataatatggtcactaccctaatagactaaatgaaatcttgcaatttcaaattactctttctccatattagatttacccacagctatatttctgtttaagtactagggtgagggttttctgttactttgttttttaatgttgttccttttgaaagaatcagtcttgcagctgagtgaaaaatctgtggaatgtattatttgtcctctttacatgaaactactcatacttaagcaaaagtcagtcttatagcaagactgttagccctcaaacttgactctactgatctgaccatttccctctcatcgccagacaactgacgatttccctggttttagtctgcgtctctgctttaaagttattgtgatatccttctagatcatacacaagtctaacagttaattagttaacagtttttaaactaggtttgtgggtatttttttggtagcacatgtatgctattacatacaaatttttatttctaaaatataagatctgagattgaatattttcattaaaagctacagttttgtgaatctttgtgcttcaacattctttgcaagatgatacggtatttaggcatttgccttatttttgcatctcacaaacataagtgcaatagatcttttcattgaacagcaaagtaggattcatcattccatatgacttgagttacaccagacctgttctgcccaatgcctttttgattacagtgtagcttgcccaccgcatttgtcgttttagatactttgctagccggccactttggatttcatcagacagtcctaacaatattgtctgaacggctgaatatgaatagatacagcagaggcactcctgatatatgatttttatccatgcgtcagtttttcccacccagtgtagcatcctaaagataaagccagaagctaagctgcagtgaggctgtgattgggcgtagaagtgggagcattgggacctcacattacacacacgagagatcataaccatgtgaaaaggcaaaaagcatgtgtttgcaacatctgataacttcatggcctttgataaatgtatatatgtatatgtgcatggactgtgtttccagtacacctttcagccaaaacagatccacagtagttgttgagttcaagtacataaagtacataacaagcgaacgtctagtacaattcttacttatgtgtatgggatttttccctttgaggttgctttgttttgtcttacaaaggtgaaaattgtttgtaagtgaagtgagaagttcatatttctttggcttttttgtgtttttaaaagttactccttttagggagctggtctgatgacttgcttagcttggaaatccttgttttcagtgtgtcgagtcaaaatgtgtttatgtgagctgtcactgtggggaaccaattgctttgtcatatagctggttatgaactagtaacatgtttgggaagtcctactgatgttcctttggaagaaaaaatctgctggttttaacaactgtgcttttgctatgtatggtatccaagttagttgaaacgcagacactgagatctgtttgagtttagggtcatttttagaaaggggcagtttaaagcacaatgtctcacatgggacaaagttccaaaatgccaaattcttattttttaaaaagctagttctataaaatactggtattatgggtggggaggaaatagaattgagtcaattggaaagactatccaacttaacatgaaacttgtcaccatgagatagcattagctgcccaggatgctgctatatatatatatatatatatatatatgtgtgtgtgtgtgtgtgtgtgtgtatatatatatatatatatatatatatatgtgtgtgtatatatatatatatgtgtatatatatatgtatatacatatatgtatatatatgcatatatatatatgtatataaataataatcaaaacgaaaaaaaactcatttatacctgtgtattttttaaagctacaatctgttcaatgtttttaaaaatctgtttatatgacattgttaaaataaagttggtcttttgacgagagggaggatgtcacggtcagttgtaactttgccttcacaaggcaactggggtggggggtgggggtagtgtgcctccttgacatttcgttcaagttatagattcaatggagctatgtcttgttttaagttgctttaatgcattgtattagatcttcaaacagaataaaggttgttttgaaactgaagttttgggttgaaatttcacttatcacctaagaaatctttctaaaacagctaccttttggcttataaatgttgctgctatttctgttgtctcccacccactcccttttgattgttatcacagtatctcatttttgtaaagttgagaaggacattgagtggtcacatgtaagtaatacatatgagctgtctttcataatttcactgttttttgagacggagtcggagtctcactctgttgcccaggctggagtgcagtggcgctatctcggctcactgcaagctccacctcctgggtttacgccattctcctgcctcagcctcccgagcagctgggtctacaggcgcccgccaccatgtccggctaattttttgtatttttagtagagacggggtttcaccgtgttagccaggatggtctcgatctcctgacctcgtgatccactcg

SEQ ID NO: 1478 - DNA, 3358 bp, Homo sapiens
tacaaccaggctcaactgttgcatggtagcagatttgcaaacatgagtgctgaggggtaccagtacagagcgctgtatgattataaaaaggaaagagaagaagatattgacttgcacttgggtgacatattgactgtgaataaagggtccttagtagctcttggattcagtgatggacaggaagccaggcctgaagaaattggctggttaaatggctataatgaaaccacaggggaaaggggggactttccgggaacttacgtagaatatattggaaggaaaaaaatctcgcctcccacaccaaagccccggccacctcggcctcttcctgttgcaccaggttcttcgaaaactgaagcagatgttgaacaacaagctttgactctcccggatcttgcagagcagtttgcccctcctgacattgccccgcctcttcttatcaagctcgtggaagccattgaaaagaaaggtctggaatgttcaactctatacagaacacagagctccagcaacctggcagaattacgacagcttcttgattgtgatacaccctccgtggacttggaaatgatcgatgtgcacgttttggctgacgctttcaaacgctatctcctggacttaccaaatcctgtcattccagcagccgtttacagtgaaatgatttctttagctccagaagtacaaagctccgaagaatatattcagctattgaagaagcttattaggtcgcctagcatacctcatcagtattggcttacgcttcagtatttgttaaaacatttcttcaagctctctcaaacctccagcaaaaatctgttgaatgcaagagtactctctgaaattttcagccctatgcttttcagattctcagcagccagctctgataatactgaaaacctcataaaagttatagaaattttaatctcaactgaatggaatgaacgacagcctgcaccagcactgcctcctaaaccaccaaaacctactactgtagccaacaacggtatgaataacaatatgtccttacaagatgctgaatggtactggggagatatctcgagggaagaagtgaatgaaaaacttcgagatacagcagacgggacctttttggtacgagatgcgtctactaaaatgcatggtgattatactcttacactaaggaaagggggaaataacaaattaatcaaaatatttcatcgagatgggaaatatggcttctctgacccattaaccttcagttctgtggttgaattaataaaccactaccggaatgaatctctagctcagtataatcccaaattggatgtgaaattactttatccagtatccaaataccaacaggatcaagttgtcaaagaagataatattgaagctgtagggaaaaaattacatgaatataacactcagtttcaagaaaaaagtcgagaatatgatagattatatgaagaatatacccgcacatcccaggaaatccaaatgaaaaggacagctattgaagcatttaatgaaaccataaaaatatttgaagaacagtgccagacccaagagcggtacagcaaagaatacatagaaaagtttaaacgtgaaggcaatgagaaagaaatacaaaggattatgcataattatgataagttgaagtctcgaatcagtgaaattattgacagtagaagaagattggaagaagacttgaagaagcaggcagctgagtatcgagaaattgacaaacgtatgaacagcattaaaccagaccttatccagctgagaaagacgagagaccaatacttgatgtggttgactcaaaaaggtgttcggcaaaagaagttgaacgagtggttgggcaatgaaaacactgaagaccaatattcactggtggaagatgatgaagatttgccccatcatgatgagaagacatggaatgttggaagcagcaaccgaaacaaagctgaaaacctgttgcgagggaagcgagatggcacttttcttgtccgggagagcagtaaacagggctgctatgcctgctctgtagtggtggacggcgaagtaaagcattgtgtcataaacaaaacagcaactggctatggctttgccgagccctataacttgtacagctctctgaaagaactggtgctacattaccaacacacctcccttgtgcagcacaacgactccctcaatgtcacactagcctacccagtatatgcacagcagaggcgatgaagcgcttactctttgatccttctcctgaagttcagccaccctgaggcctctggaaagcaaagggctcctctccagtctgatctgtgaattgagctgcagaaacgaagccatctttctttggatgggactagagctttctttcacaaaaaagaagtaggggaagacatgcagcctaaggctgtatgatgaccacacgttcctaagctggagtgcttatcccttctttttctttttttctttggtttaatttaaagccacaaccacatacaacacaaagagaaaaagaaatgcaaaaatctctgcgtgcagggacaaagaggcctttaaccatggtgcttgttaatgctttctgaagctttaccagctgaaagttgggactctggagagcggaggagagagaggcagaagaaccctggcctgagaaggtttggtccagcctggtttagcctggatgttgctgtgcacggtggacccagacacatcgcactgtggattatttcattttgtaacaaatgaacgatatgtagcagaaaggcacgtccactcacaagggacgctttgggagaatgtcagttcatgtatgttcagaagaaattctgtcatagaaagtgccagaaagtgtttaacttgtcaaaaaacaaaaacccagcaacagaaaaatggagtttggaaaacaggacttaaaatgacattcagtatataaaatatgtacataatattggatgactaactatcaaatagatggatttgtatcaataccaaatagcttctgttttgttttgctgaaggctaaattcacagcgctatgcaattcttaattttcattaagttgttatttcagttttaaatgtaccttcagaataagcttccccaccccagtttttgttgcttgaaaatattgttgtcccggatttttgttaatattcatttttgttatccttttttaaaagtaaatgtacaggatgccagtaaaaaaaaaaaatggcttcagaattaaaactatgaaatattttacagtttttcttgtacagagtacttggctgttagcccaaggttaaaaagttcataacagattttttttggactgttttgttgggcagtgcctgataagcttcaaagctgctttattcaataaaaaaaa

SEQ ID NO: 1479 - DNA, 2175 bp, Homo sapiens
atgagtgctgaggggtaccagtacagagcgctgtatgattataaaaaggaaagagaagaagatattgacttgcacttgggtgacatattgactgtgaataaagggtccttagtagctcttggattcagtgatggacaggaagccaggcctgaagaaattggctggttaaatggctataatgaaaccacaggggaaaggggggactttccgggaacttacgtagaatatattggaaggaaaaaaatctcgcctcccacaccaaagccccggccacctcggcctcttcctgttgcaccaggttcttcgaaaactgaagcagatgttgaacaacaagctttgactctcccggatcttgcagagcagtttgcccctcctgacattgccccgcctcttcttatcaagctcgtggaagccattgaaaagaaaggtctggaatgttcaactctatacagaacacagagctccagcaacctggcagaattacgacagcttcttgattgtgatacaccctccgtggacttggaaatgatcgatgtgcacgttttggctgacgctttcaaacgctatctcctggacttaccaaatcctgtcattccagcagccgtttacagtgaaatgatttctttagctccagaagtacaaagctccgaagaatatattcagctattgaagaagcttattaggtcgcctagcatacctcatcagtattggcttacgcttcagtatttgttaaaacatttcttcaagctctctcaaacctccagcaaaaatctgttgaatgcaagagtactctctgaaattttcagccctatgcttttcagattctcagcagccagctctgataatactgaaaacctcataaaagttatagaaattttaatctcaactgaatggaatgaacgacagcctgcaccagcactgcctcctaaaccaccaaaacctactactgtagccaacaacggtatgaataacaatatgtccttacaagatgctgaatggtactggggagatatctcgagggaagaagtgaatgaaaaacttcgagatacagcagacgggacctttttggtacgagatgcgtctactaaaatgcatggtgattatactcttacactaaggaaagggggaaataacaaattaatcaaaatatttcatcgagatgggaaatatggcttctctgacccattaaccttcagttctgtggttgaattaataaaccactaccggaatgaatctctagctcagtataatcccaaattggatgtgaaattactttatccagtatccaaataccaacaggatcaagttgtcaaagaagataatattgaagctgtagggaaaaaattacatgaatataacactcagtttcaagaaaaaagtcgagaatatgatagattatatgaagaatatacccgcacatcccaggaaatccaaatgaaaaggacagctattgaagcatttaatgaaaccataaaaatatttgaagaacagtgccagacccaagagcggtacagcaaagaatacatagaaaagtttaaacgtgaaggcaatgagaaagaaatacaaaggattatgcataattatgataagttgaagtctcgaatcagtgaaattattgacagtagaagaagattggaagaagacttgaagaagcaggcagctgagtatcgagaaattgacaaacgtatgaacagcattaaaccagaccttatccagctgagaaagacgagagaccaatacttgatgtggttgactcaaaaaggtgttcggcaaaagaagttgaacgagtggttgggcaatgaaaacactgaagaccaatattcactggtggaagatgatgaagatttgccccatcatgatgagaagacatggaatgttggaagcagcaaccgaaacaaagctgaaaacctgttgcgagggaagcgagatggcacttttcttgtccgggagagcagtaaacagggctgctatgcctgctctgtagtggtggacggcgaagtaaagcattgtgtcataaacaaaacagcaactggctatggctttgccgagccctataacttgtacagctctctgaaagaactggtgctacattaccaacacacctcccttgtgcagcacaacgactccctcaatgtcacactagcctacccagtatatgcacagcagaggcgatga

SEQ ID NO: 1480 - DNA, 96599 bp, Mus musculus
  misc_feature (4189)..(4208): n = a, g, c, or t.
  misc_feature (9652)..(10001): n = a, g, c, or t.
  misc_feature (27805)..(27824): n = a, g, c, or t.
  misc_feature (54062)..(54139): n = a, g, c, or t.
  misc_feature (88386)..(88405): n = a, g, c, or t.
ggaatgacgctttacactacgaggtaggcaaggagatgcggatgaacacatgcggatctctgatgcggatgcacagaagtttgtacccaggaggctggagtgggaggtcccgttttttggtggggtaagggggggtggggcaggggtgaggtagggtctttctattacacatcatttggcagtccaggaacttgctacatagaccagtgtagccccaaatttgcagaaatgtacctgcttctgcctcctagtgcaagcactgggatcaaaggcatgcgctcccacacccagcaggcactcacagttgtaaagcctcaagagaaatgtatcaataatatcaaagacaaaagcaaagtgtacatttgaaaattaacatccgcgaacttaagaacagtaaaggaaggtctgttactcataaaatggagatttaatactagaggtttactttctaaaggtacttaactgtactcaaggatcattcgggataaaagtcaaatgctacaacaaacaaaagctaagactctcattaccattcagattatataaaaacctcggaaagagtgttgcagacagaaggtattctatcaatatctttttgatttaagaaatgaagaaatggaaataagatttatcactaaatatcctaaggagacagcaagacagcattttactgcaaatgggtataataaaaatgtatacggcaatttaacataccagaaaatgtttatgtgataaatggatatatgtacagagtcttattaaaaacctgagcaaagccgggcatggtggtgcacgcctttaatcccagcactcaggagtcagaggcaggtggatttctgagttcaaggccagcctggtctacaaagtgagttccaggacagccagggctacacagaaaaaccctgtctcgaaaaaccaaaaaccaaaccaaccaaacaaacaagaacccccaaaaacccaacaacaacaacaacaacaacaacaacaaaaaacctgagcaagatctagcaaaaaaaatttttttctcatgaattcttattacctgtgaactatgatgtaaaacaatccataccgaagtatcagaaaatactttgactttcaaccatacatgttcaaaaaaattaagaaaaaacaaaggattgattgataaggaattcaccttaggcattataactcaagaaggctatttaatagagtaatagtagtgacacacacagcagaaatgcctgtcagagcattccttagaaactcgccagatttccataagtgtgtatttgtataacttcttttgaaaatttcaaatgtacagaaatggtaaaaaggaaacagcagtataaagattgctatattctttacttagttccccagttgctaacatctgttatatttctttttatttgttcagtttgtaacaaggtctcatagagcccaggctagtcttgaactttctctgtagctaaacctggccttgagctgatcctcctgcctccatcttccaagtgctggattccagacatgtgtcatcgtatccaaaggatgttctctttatcaatttttttctgaccaatttaaagtaagtagaagacttactatttcaatcctaagcatcagcgtttaccttataaattaaggattttcatattaataattaatactaattcacaaccatcactggacaaatcctgtttaaattttcttcattaaaacaaataaataacaaacaaataataataataaaaaccagaacaaaattgttctgtagatttctatccagaccttaggtaagtttcttttgttgctttaggttcttttgtcttttaaacagcaacagccccctacccttgattttcccccctgaggttgagtttgatgtcatctatcctgcataacgccccatggtctatgtttgtttcctgtggttacaaacacactgatatactttagctcaaataacagatgatgcatcatcacatccacatgacgtggagtttagtcctgttggtgattggtgatgctaaggctcccacataacacacacacacacacacacacacacacacacacacacacacactcacacacacacacacacacactcacacacacacacacacacacacacacacacacacacacacacacacagactcacacactcacacgcacgcacggtggttaagtagatcttacacagtgggaaagaattctgagaaactgtcatagcctagctacttgcaacagtaaaaacctatactcagaaaactctattctaattgggcctagagtttgcctgggatctcaactactccaacagcagaggcaggaagatggcaagttcaaggctagcctaggtaagttagcaagaccctgtctcaaaatgaaaactaacaaaaggacaggagatacaactcagtagtaaagcacttgccaaccgtgagcaaagttcaatctccaatactacaaataattatgacgcaaaaccctatattcaaaaagtaactgaattaaaaaccctacattcaaaggatatttgagttaataatttcctctgtacaattatcaatttagtatacaattaggtccattttttcatttctcattttcatctatactctgtattctttttaaaaagtagttactactattctctgtatgtgtgtaggatatatgaaggtgagcccacgggtgccacaatatggaggggagagtacatgttttggagttggttttctcctaattttacaagggttcttagttttgaacttagggtgtcaggttgcacagcaagcactttgctagtacaccatcctgccggtccttcattctattctgacccatccatgccttctagatactattattcttccaaacccatatatacacatagctgttttcccttatccatgaaaaatatgtttcaagtctcctaggagaagcctgaaactgtagatagaagcaaattttatattacttatttattgtaatacatgtacatctctgacaaaatctaagcatttaggcaaaaataacagagggtaaatagtaactaaaataacactattgtaacaatccactgttactaatttgacagtctccttttgggtctctaagtaaaataagggtgaattaaacatgatcagtgtgatactttgacagttgatctgataactgagccagctactcagtgactcatgggtcacatatcctttatggatgtgccgtgcaaagggagactcccattccagctctcattccaggttagacagaacaggatggtccaaagggctataactctactcgatggaatagaatttaaaacgtgaattattgagtagtggtgcacacctgtaatcccgatactcagaaaaaagtcaaaggcaggaagatggctccaagttcagggtctgcctggcctacacagtgagttccagagcagctagggccagaccctttctcaacctctctcctcaaaaaagaaaacaaaagcaaaactcttaaacctgatggactctttatttctgtaatttttcatttaatatttaaggccacagatgaccacatgtagctaaagccaaaggaaacaaaatttcagaaggcagtcaggaggaggttgctcttagactatagtcctccctcccctcctctgccaagagataacatatcattctatgccttcaataaaagcaagcaaacaaacaaaaaacttagtataggagactagagagatggcttagcacttaagaccacttactggtcttgcataagccccaggctggggtcccaacacctacatcaggtggctcacactgtctgtaactcctattctaggggatctgatgccttctcctggcctcctcaggcatctgcagacacacagtgcacacacagacaagcatgcatacacatatgtaaataaaaataaaaattaagcataaaaataaaatcacaaagaatatttttaagaactctgtggtggtttggatatgaagcgctcccaaaggttcggagatttgaatgcttagtcaccagggagtggaactttttgataggattagaaggataagtaggtgtgaccttgatggaggaagtgtgtcattggggggtgggttttaatgtcaggctcaatcttgttctcttcttcttcttcttcttcttcttcttcttcttcttcttcttcttcttcttcttnnnnnnnnnnnnnnnnnnnntccctctccctctccctctccctctccctcttctccttctccttctccttctccttctccttctccttctccttctccttctccttctccttcttcttcttcttcttcttcttcttcttcttcttcttcttcttctttttcttcttttttccccccaagttgaatatactaatgtggggtccgatcatctgactagtaggattatctaaggtccatcagaacgcaggattcaagatggaaatactggctagacataaactcatttgcaggggagacaggtgaggcccagcagagcctggcctgtctcagtcatctgctggaaccacatagggattactctggcactatctacttatttgcctgcagtttcttgtggcggtgtgactgcccaagaggtgcagtggggttgagacatgcttgcaagagctgttgaccaaaaaaatgtctgtaagaatttaaagtgcacggttgtactgtcttgatgttcacacaacatactacaacacaaaaggaaggtgttctgtctgtctagatcacattcttgcttggctccttaagaacagcaaaaacaatgtttggggcaaaagcttccagcatgcctacccacatatggctacactagactgtgggagggagtacccaagaacagacaggctgtgttcaatgaaaaaggacttgcgcctactttttcatgaggtgagggctcagaagttgaaaagataaagggagggtatgctccttaggctactgagacacagcttggtaatgccccacagcagagcagagagaactggacttgcgttcaatctttttgggactgattgagaggaagaaagcacactcagttctacagaggacatggtccattgttctaagaaagacccagggtagttttaaaacaagtctgagccaggcacggtggcacctgcctttaatcccagcagatctttaagagtttgaggccagcctggtgtatatagtgagttccaggccagtcaaaaagtctcacacagtgagatcctctcaaaaaacagaacaaatgaaaaaagctctacagtatccagaagagaaacaagagagaaagtgcaaactttggtgtctaaagttcaggatgccagtctgccaacattttcactacataatctcataatgggtaaactccaatccctgtttattgggttgtttgccatggcttatttgtattgctttgttgctattgtttttagatagcatctcactttataatctgggctgggggacctccaattgagcatcctcctacctcactttcctgaatctaggattacatgccactctacctggctttgtcttgttttttaatctaataataacaatctagttaagatagcttatctagcaatgacaagctacatcaaacacaacaaagaaggatttaaacttatctattatattacagtacagtgaggatcagatattatagtcttgccttttgcaaactgtaaaaattaccttcaaaattcaaagtaaactaaaggtgacttatctctttgctccatcacgtctggggcttcagcagaaagactcaatgcctagggctatcttcatgattgaggactggagagctcctgaagacatatttactgacgtggctgatcattaaactggaaccaagctaagtatccatacacaattgcactaccttcacgcactctcagcttcctcagtatggctgcttcagggcagtcagacttcgggcctctacgactgtcacatgccttctgttgcagtagcaagttgaaaactgtttgattctttgtggtctagatcccaagggcacacagtatcacatctgttgtgttttattatatacaggtaagtcactgagtctggttcaagagggactatgcatcctaccttctgatggaagttggatcaaagaatttccagccctttttgtgttttctttccgatttttatgacaggggtttctctgcatagccctgactgtactggctgtggacagtcaggggggaatctctgagattaaaggttagtgtacaagcccccacccccagcttgcttttatttatttattttcttttttaatgatgggactttcaaatggccccccaaataccggatagctaaaatttgaaggcaactatcctactttgctttctattgttgtgataaacaccacaaacaaaagcaacttagggagaaaaggttgattttagtttttaggttatagtccatcgtgtatgaagctcgggcaagaactcaagctggaacctggaggggaagacgggatgaccacgaaggagtgctgctcagggctctgcttcccgcgctttgctcagcctggctattatttacgaattatgtattattgcagaggaagaacagcttttattagaggaagtagacaaatatatgtagcaggtatagagaaaaatgtcttacacaaaactgatcccaggctcgagaagctgaaaatccatgtcttcttcaggtctcaggcttttcaagtttcggaaaggtcttagggctggtcagtttgcagaaagacaggggcggctgattggcccacatctattgtgtaaacctgtccagatctggccttgaacttgttaaaccagtccatccgcagtggggcatgctggcaggagaaaggcccacaaggcctttgttttaagctgtgatgcttttgtctcaggtcagaagggcgaggaggaagaagccagccatcttgaaagttcaacatctttattacttagtcatggcccttctccctatatgtctgcctaccaaggactctgtctaactcctagtccttcatgctgtcctttgaaaggtcaccctaactgctgttaggggtttgggggacaggcttctcacttgctttgagctgaccaaagggatgagaattgaggggcaacagtcaaagtgcctcagaggaggcctgacctaagggctcaggataaaacttaaccactggcaatgatctagaacctaaaacagcctttggcaatactgtatattctttttgtttgtttgtttcttgtttttgttttgttttgtcttgtttgagacagggtttctctgtatagccctggctgtcctggaactcaatctgtaggccagaccaacctctgatttagagaggtcacttggctctgcctcctgagtgctggggtttaaagggatgtgccaccagtgctcagctggtagtatgtattcttgaagtgtcacatgagagatgtatcatcagcagtagacatctctgcccacgtaccagaggtaatgtccaatggaagtgggctacataggccaaatctgagtgacatgcagattctatttgttaaagtcactagacatcagcatctaagtgacaactttgatgagttggtggtcctggaccagaaatcctggacaaggtctcaaaaatgttaacaatcggggtctttatttacttttctctgccagttaaagagtaaaaggcaggaaagatcttaagcttgtctggtagcagtggagaaatctcaaacatagccagcaggagcagacaggatcagcagttgaagaaaggcctttactgagggtgaggaaacacacacacacatacagcaggaacaccattagttaacaaaactaaccaacacacaaggaaaaaaaattgaatgagtggaaactaacagaatccatcttaaatggatgaggccagccatcctgtgaagaaataatcacataagacgtgatcactgtatagactgatgctgataaggatgttgtttaaaatggaaccatggaaaatgtcttagaggcagggcatgggggtacatgcctttgatcccagcactcaggaagcagaggtagtcagatctctgggaatcaagttccaggacagccaagcgctgttacacagagaaaccctgtctcaaacaaaacaaaagagaaatgtcttagaaattttaatgttgtaaaaaaaaatgttataatgatacattcttagggaataatttcctaaagtaaacctggacagttagggactaaacaacaacaacaaacaacaacaataccccaaaaccccaacagttgtgtttcagacaaaatcaaggaggaagtgtcccttgcctggttgttggccctattttagtatgcttagacattatgtatttatggtttttaaaaactgccttaaactagcatagcttgataatatagtctctatctgtgatcatctccttcactcgaatctgtcagatcatcttctgacttaaatgtagctctcaggggaatgtccctgcttggaagagaatgtacaatgtcattggcaaacacagaatagctatttgattggtggcattttttttcaatacacaagaacgtaatgctttgattcaccaagcagccacacgtgcactgcttaccttgaagcaaagcatcagttgccgggcctgtgctgatcagaccaaataggcagacatcctattgtcagaagctttctacctttcaactcatcctaaatgcaataaagaggttggtggcgaccatccccctttccattaatagaagtgcacacacagacacacagacaactcaactcaagagttaaactggaaattcctgaatagtgttggtagcttctgtttttcactcctgttttctctttttcttaacacacttcctctctccattatttccttctttggttaaacgtactttaaccatgtaatttacataaagaaattgggtttaatttctgcaacttgggcttctctgagatgatttaattctcttctcccaattctttttttcatatacagtttgaagagaatgccttggatcagtcaggatctacaaaatattttaaattattttctttggaataaaaattagctatgatgcataagatgtctaaaatggtcatgtgttctcctcaggtcctagtgcatggaaggagccaattgatagtaaatgactgaaactaggcaataaataccctgaagaccagctttagattttcatttatacttcaacagatcaagtcctttagggacaggatacaaacaccatactgagaatttagctgctccaagacagttctatgaaatttggcttggctgatgtttcaaccttggcgtttaaggtcttatttttatgacacccagagcttctttgtaacggcagtaataagtactacagactttccggccttcttccctctaggattttaacttctttaaaacaccaccccctgctcttctagtaaatcccacatgacagaacaggctgagaaaaaataggaagccggagccatggaaactgtgcgggtagaaacgtgtgagcgcgagggtggttggaggagaaggaacactcccctggcgacagcggcgcgagggtgctcctcggatgacgtcacgcacccaggtgacgtcacgaccgtgacatgcgggtgacgnnnnnnnnnnnnnnnnnnnnnnnnnnnnnnnnnnnnnnnnnnnnnnnnnnnnnnnnnnnnnnnnnnnnnnnnnnnnnnnnnnnnnnnnnnnnnnnnnnnnnnnnnnnnnnnnnnnnnnnnnnnnnnnnnnnnnnnnnnnnnnnnnnnnnnnnnnnnnnnnnnnnnnnnnnnnnnnnnnnnnnnnnnnnnnnnnnnnnnnnnnnnnnnnnnnnnnnnnnnnnnnnnnnnnnnnnnnnnnnnnnnnnnnnnnnnnnnnnnnnnnnnnnnnnnnnnnnnnnnnnnnnnnnnnnnnnnnnnnnnnnnnnnnnnnnnnnnnnnnnnnnnnnnnnnnnnnnnnnnnnnnnnnnnnncggcgctggcgccgcggcctcttcggctgccgacccggccattcctgaagaggtgagtggcggcgccatccccccccagtgctcgcgcgtcaggggctcggcgggccagtgtttatgcgagggaccgaggcagcagaaggagccccggcagtgcttggtagccggcggggaggtggttatcggccgagtgtccccctctgtcttgtagctcctcgctacgtaaacacacacgatggcccaggggggttccccggcccccacccagatgggattggggcagtgggggcagagctggagccttttcagagggggcgaaactctgggttggagaaggtcacgcctggctgaggcttccagccctgcatccctgagatgttttcctttttgctagccggcagggacggcgtcgaggatggagcttagtggccagggcagtaccccttggtcccctagccctaggaaccgccgtgtgcgattactccctgatcctggggatgacggagcgcatctttccactctcctcactatcttccctttgcaggcccttgtccccttcccactttgctacttgtttgggggatttttcttttgaccggtttttgcccaggggatgatttttttttttggtgtagtctttactttttcagccccaaattttactgttccgaagcttttcccatcctggtctctgatccccgaataatactgtttgtcagtgctcccttgctgacccgtaaacctctatcctcatccaccaccccgctcatttctcaactgtacctacttgcttctaaccttagtttccacggaagagcatttttgctcttctcttgccctagtccccttgagtgcctctacttcattccactgcaccgtcaccttgtaatccgttgttatcttcacaaatccttttggacactttgcaagctattcactccctgaaccccaaagctgtcaagattccatcaggtttcacttggccctttgctcccttgcactgctggcagtttgggttagtctttcagtgcacatacacacctcagttgatatccttcgtgggtttgtttgtttgtttgtttgtttgcttgcttgcttgcgtgctagcttgtttttagtgggtttaagtgatctggctcgctcccattttcgtcccatctttcgtgtttaccagtctttagtacttggcttttggtagtccttgtatcattcaacttattacattgtcaaattacctaatttattctcttttctctgtatgtaaaacttactacatttaccatttgggcactgtatcgcataaacaataccatatcttacaaacaattggctagaatacggtattttacaaacagttgtcgagagtgacttgtttctgttgattttacttgaagataaattttgtttaaagataaacttgctacttaagtttcccagttctcgtactacctccttatctctacagtgttctttttcctgcttcattatatttacttgggatgttcatcctccactctccatctatcgttagcagtctgtttgcaataatgtttgttttccatcttttgataccatctctacccagaatgtgttcagtaccatcatttgagccaccctacatttctcacagttttttttttttcttatttcttaatttgaaataattccaacgtaccacttgaattcatgctcaggtcagtttccatttgcatttatttccctcggcttcttctccagtctaaggataacactctttccctcatccctttcctagctcccttatccctagttaccatccattccgtcttgtttcctggcttttggtacttcacttgctgacacttcctcttgtcttccccacacctccacattccatcttatttataaacaactttgttccgttgacatggaaatttatttttaggatacattgtttttaatggagaaatgctaggggtcacatctgccgtctattttctccaggaatcggatatgcctttgtcttactaggcacaggtgtctctgggttttactatgctgcacatgcttggttgtcttgaactgtatagatgtgtgaggaccaggatccaagtatgggcaggttgatggatggagttagacaaggataattctgggatgtgacactgacttgagaactttgcgtcagggtattaggacagttggcatttctgtttggaagattttgctatttacttgggagagctagagcactggggtgggtcccttaccttggcccctcctgtcttctttctgaagtagtgagtattagggttgttactttctgtttgacactttctaggcaatccccatggaccacactgcctgaggacctctaggctagatgaagttaaattaaatcaccaataactgaaggcatgtttgtatctcctgaaactgtattctttatttagttaaaagcagatgtttcccattgcccccttcccagggtttaatgtttgatgatgctataaaaagagaaaatatgacaaatatacataacaaaataaattcttccggaaagtagtatggtggagcccaggcttgtcagaaactctgtgtggctgaggctgtagttaaaacttctgatccttctgccacttcttaaggctggaattactagcatgtgccctctacccaacaagtttaaagttaacatcaactcagaggaaactgaagtatcctgtggtcttttaattaattgtcttttattatgaacttaaaggaatatctttagttactaaagtagatggaaagatgaaaatctgtgaatgtgtttaatgacattttattatacatttttatcttacctgggtttaaaaaagtttgtcaaagagaaatttcagctgtaccaaaaagtaattacaaaaggaaaacatatccattattgaaaaattagggaaaaagtacaaaaagtgcccataatatataattgctataaatatttgcatgtattacaactagtgcttgcacaatgcattttatatatagacttgtaacttttgaaacaatagtacagcaaaacttatgtgtccctacataaagtatcatttaactgataacttttttggacattaggttattattatttttagttgctgttatcaagcatcttcgacatagaatgtagacatttgtatgtaaaattatgttcgagaataaacagatttcatggcctatttgtattactatataggtttccaaaataaaatattctgataaataacaagagtttactaaatgtttattcagtatcttataatcttactgttaagcatttaattctgaccatttatatttccttgatggtacttttttgtgactatatggtaaggcatggcacatggtataatattaccagatggttaataatgtatgtattatttaaaatgtgtgatacaagggtgtgatatttattacctgtgcctttcatgctgtgttttcagagaagagagtttcttaaaactgtaatgcaattgcaactgtattattttttgttttcaagatctcttagccagccttggctaagctgtataattataataatgcattggctagggaatattctaggatgggatctactttataatgaggcccactgtattaaaatacatctttgtgaaccctgccaggttagattgcatcatacctctggaaagtggtattctcactaaggtaagaaggtgtgtgtgtgcacagtaaattttagctgttgctattaatacttgtctaggtatatgcaaagatttcctttggagggggaagctatgaagtggcttggctgtcttcagcatggctgtgttccttcctttctgaacccatttctttttcctgacttaacaccttcctttaggcatccattcacccttttatttaaaaagagttatcttgtatcagttgcttatatatgctggcaatctattttaagtcgaccaaaaggaatgttggactggacacttggattatggaatgtcttaaatgtaattgcagatttgatttaattgtgtttggaggccagaaagattacagtagtacagcagacgagagcaatcagactctgcttgtttttctctccaccgttttacgatcaggacaaatagtctaatggcagctgaaaagccatgttctcagtgacaaagaagaaagtccgtgttgctttcactgtgctctggtgttttctaaggcttgttacctaccaagtcacacaatggagccgagcgcctgctcattcttctttcccctttatctccaatcataaacgtgttttctcctttagagctgcagaaatgtgttttgtttcgttgacaacttaatattgatttaagtgagtacttcgtgaacctcttgccataatccccttcgttttagaaatcttgtttgctcctattcctggattcctgttaggataagcctttttgtcagcagctcttgctagattttgccttcctcaaaagttaaattgtttgcagtcccgtattctttcctcttgcccagttcacctatgctggttcttctggaaagccccagttatagatcgttacagaacttcggaattcagaagaagtgggcctgtcggaagctttttctagttgttgaggtcatgctgtgctttctttaccatagtgctagagatcacttcatgttagtgcatcaaggcatgcatccttgttggctcccacattgcttttttaaacattttgtagatgcaatgacagtcttgaaggcagggaatggttttttgttttttttttttttggtttttttttttcagtctttactaaccaatttgctagcatacttagtgagccatggtagtcttaagcaacttgacagtctatacctaactttaggcagttatttctttctccctctattgttatcttgctttctgtgttttctcttgatctttatttttatttatttgtttgtttgtttacttattttgagacatggattctctgtgtagctctggctggcctcaaactcagagctccccctgcctctgcttcccaaatgctgggactaaaggtgtgcattaccaccgcccggctttctcttgatctttagttagtaagtaagtaagtaagtagataattgttgttgttacttccaatatcaagactattgactatgtagtatcaagaaattgatgccaagtaattttaccttcctccctgggccctgtgattgccttatacagaatgtaaaaattgttctgagctcactaagctttatttcttctgaaagctccgtaatatcaaatcaaacctcattttcattctttttttttttttttttttccgagacagggtttctgtgtgttaaccctggctgtcctgaaactcactctggcctcgagctcagaaatcctcctgcctctgcctcccaagtgctgggattaaaggcgtgcgccaccactgcccctcagtttcattcttactatgcagctagttattgacagcacttctggggaagatgtaccatagtacgatggtttcccagtaactccagtgctacactggctgaccagtgggccctggggatccttttgtctctgccttccagctttggcagatgctaggaatccaaactcaggtctttgtgattggcaaaaggaattttacctcttgttgagcccgctccccagccccggagttactttaataagttcttgatggtacagtttttgataatgtataaggaatttaatattcatttttaaagtatcctattttctatgaaggccacatagttgtttttataactcttttggtggtgttaaaagtactatcttgctgggtatgatgatggtgcataccttcaatcgcagtcctcaggagttggggcaggtagatctccgtaagtttaaggccatcctggtctacacagtaagttgcagaacagccagggctatatagagtgatcctgcttcaaacaaagcaaaacaaaaatactattttaattacttccaagtaactaattggtttcagcttttgtttctctgtggggtgaaggggtagggagctagaggagtgaggaggcagggaaccctgggctctgtatgtcataggcacaatctgccatgagctgtacccacattctcattcccccagcatattactctccttccagagctcatcaggtagggaacagaatataattcagagaattcaggaggccttacacaggggtattctaagctgttggaagtatccatttctcttcgtttttatgtgattgcctatatttcatccatagagtcttcctacacatggcttctcatattagcagaaagttatacaattgcaacagtttctttatatgaatacataattcattcacagcaagctttttgctggcacctcttgatcttcccccacgcctccgtatgctgtgcgctgcacttctgttagtccaagtgtggcttagaagactgccgtgggaataaagtgaggtaataaatatgtaaaactgtcactagtattttttctgctgatttgcaagacaaaaggtacatataattaagacgtttcttccagaaatctttgttgtatatgtttgttttaaatgaaatccagcaatagacaacttaggctctagttatgaaattttgacagtccttaggattgatctaaaactgagtgatgactacattctgttaatgttgtcttgaaactatctttgaatccaagaaatacaaagtggcaacatattattgacttactggataaacaattcaaggataagaggattaatgcgatagtacaaggtctaactatgtttttatgggtgataaactgactgtgctttggcattttaaaaactttgatgtaatagctttgctggcacctaaaactacattgctgacttttgcattgagttatttcatagaaaaaaattcttatattcagtaaatacttgagagcctacaatatgtcaggtaatacttttgaaattaggaatgtatttcaaaacaaaaatctgtatcctttatgtagtttttttctgacagagaggcacatgttaggatttgtgggacaacaaataagctcataagtagacaaaaaggaaatctgtagtctggctgtggtagcacacacctgtaatcagttctgatgctcaggaggtggaaggaagaggatcaggtgttgaaggctatccttggcaactctaggcagtttgaaaccagctggttctacgtgagactgtttcaaaaaacaaaatgaaacaaagccaaaaacctgtccaagaaacaaaagtatttctttaaaaattatttttgatgtattttatgtacatgagtgttttgcctgcgtgtatgtatgtgcacactgtatgagtctggtgctaatagggatcagaagatgtgttggatcccttgggactagagttacggatgattctgagcttctgtgtgggtgctgggaatcaaacctatgtctctgtaagacacaaaagagcaacaaaaattcttaaccactgagctgacaccccagaccctctttttaaaactgtttagagtctcactatgtaattaattaaggctattttagaatgtgtgctctgaacccaagctgtccttgaacttaagatagtcctgcctcagcctcttgagtactggagctaaagacatgcaccatcatgcctagcttcaaagaggaagttatacagtatgtttgaagatactaagttcagtggaaaatttcaaggaaagcagagtaggcctgggaaggtggactgaggtttaaaacaagggagagcaaggcagacctcagttgtagaaggtggcattcgaacaagagttgggagaaagaatgagagtgcattcctgtagaactaacacacttgtgtgaagaatgtaccttgcttatttaagaaatagtaagaggccagagttactggaataactcaaaagaattgaaagccagtgggagatgaaattccagagggcttgggggcatggcccaaagactgttgtaaaggagttttaacattttaaaggaaaaggaaagccctatttaagtttcagtagccagagctaagtgatctgatcgaacaggtttgtgtgtttatttgttcatatgtgcatgcacatttgtatgtgtatgcacacatgtgtgttcatgtatgcatgtggaagctggaggttgatgtcagctgtcttcctcaattctgtccaccttattttttttttttgagagaaggtctcttagtgaatctggaacttagtcatttggctagactgtttagccagcaagtgtcaggaatcctctctattacagggagatttcattatggacagtattggctgtctaaactgggcaagtactttgccaacaagccccagttcttctcacatcttgataggaatgctttggttacagtatagagaatagactaacagacaaggtaagagaactatggaggacagagtcgtatcaggagagcagataaaggggtcagattttgaatggtttgaaagtagctcaaatctgatgtgttttaccctgcccccagtaacagtggtggtgatttaacccaaggcttcacatattctagcagaaattgtaccactgcaccacatcataagcccttgggtttgttgatagactgaatgtaaaatgctggggggaaaaggagagagagatgtcaatgggaaagagaagacccaggtcaggaattcattgtgtgggatgctaagttagaggcagatagcaaatgctgtctaagattttgtataagtaattagatttgtgactctggagttgaaacgaggccctggggcaaatactgttcatgatagccatattttattttctttttcatacacagcaagttagcatttttactttgtagttaggtaggtgtgatggtttgtatatgcttggctcaggaagtggcactattaggaggtgtggccttgttggagtaggtgtgacactgtgggtatgggtttaagaccctcaccctagctgcctggaagtgagtattctcttagcagccttcagatgaagatgtagaactctcgactcctgctgaaccatgcctgcctggatgctgccatgttcccactttgatgatattggactgaacctctgaacctgtaagccagctacaatgaactgttcttataagaggtgccttggtcatgctgtctgttcacatcagtaaaaccctaactaagacagtaggtatgatcaaagaattgggttccagttagtaggatatggacacaactgatgtgtgccatttctagatgtggcacatataaatagcctccattctagctgggtattgatggctcgtgcttttaattaattctagtacttgggaggtagctgcaggcagatctctgtgagttcaagggcagccagggctacacataggaaccctatctcaaaaactttcatttgagaatttaggctgatagaaaacttatcatttttaaaatggcttggaatgaaggtataatagctatcattccagtcccagcaaaggggagggagcatgaaatagaatgaaggatatttgttttgtttttgagatagggtttctgtgtgtagccctggctatggaaatatagaccactttaataactggttgaactatgtattattgttttaaaaaaaacctaggaaatagacttcagtgcattccttttgtgtattatagcagttgtgacacaatcagaggacaatacccgtactctggttctatgccatttaaaccctccatcattcagaattgtaaatcaaataactcttttttactttaaaattattcacctcaagtattttcttatagcacaaaattggttaagagatcaagaactggattgggacaagtgagggaaaatagaatcaagaaattatgtttttaattttaattaattatttttgtttgtttttgttttttgttgtgtctgtcctggaactcaatttgtagacgaggctggccttaaatcctgcctgtctctgcctcctgagtgctgggatcaaagcagtgcccttccacctaattaattttttaaaggtttttgagagaaagaattgttctatggttcaaattgacctcagattcataatcatctttcttcttattgtaggtgttggaattgtatgcatgtgttcccatatagcctcaagcaaaaataaattttgtttggtgatgaaaatcataaagttgtaagaggctagaaaggaaatattagagcaaaacaccaactatttcaggaaggataagaactgctgaagcagtgtttctgtaagggcaaaaagaaaacagggttagtgtataagtaggaaggatggcttcaatacgatcctctaggataaaacaatacctcagagcctttgacagtaatctgctcagggtctgtttggctcgtgtcaggcgtcgtctcagagtagaaagtttcatcccagaggatcctgatgtttcaggggaagtgagtgttacaattcagcgcagcccaggagagaagggagtagaacagatcgtaaagtgggtgcgcagtgttaacctaggagaagctaggcagcactgtggcttcctaacctttgctgtcacatctgcacggttaaatgtaacttgacaagccagtttaaaggctcggtatgagtcactctcattttgactcaaataaaacatgaattattactgcatgaggtatctataactcttctgtcatggctttaagcaaaattgtgagagatttggtgactgatttttctttttacgaaaatttctcttctgggagtggtaatgtacgcctttaattccagtattcaggaagcagatgcaggtggatttctttgagtttaaggttagcctggactatgtagtgagttccaggacagtcaggactacatagagagactctgtctcaaaaatgaaaaaagaaaataaaaaaaaaagaagaaaagaaaaaaagaaatcctatattttatgtagagcagcatccttatcattgcagtttgtcttttatgctgtgcagtgaagcagttccctgtatttttaaaaattatttatttatcctatgtatatgagtacactgtagctgtctttagacacaacagaacagggcaccagatcccattacagatggttgtgagccaccaagtagtcactgggaattgaactcaggacctctagaagagcagccagtgctcttaaccactgagccatctctctagctccctttcctgtacttttttacacttcaaattgtacttggttttgtttacacttttcttattgcccgaaatatgaatcccacctctcccctctctgccctccaaacctccatgcttcagtgacctgccatctactgtaggaagtatccttaatcccctcctaagcctgcccaattaggtgcctttgcggcagcatcctgtatcgttttattcaccatattgcaagtttgtttttatttttgttttcacttatcaccttcctctagactaacacttgtcagtcactgccagactttctataatgttgaaagtgtgctttcttgcccagtggtaagctgctgctcatctgttcattcctttgcctgacagcactgatgcactaaatttatgtaattttcagattagacagtctcgtgtaatgaggagctgttccatcagtgctctgtgagagcattttatttctttgcagttttatttttagatctttaaactaactcactctctttctctctctctctctctctctctctctctctctccctctctctctccctctctctctctgtgtgtgtgtgtgtgtgtgtgtgtgtgtgtgtgtgtgtgttctactgtgtggctgtaaaggtcagaggacaactttatggagttaattccttatgcctttatgtgggttccaggggtttaactcaggatcctaggcttgtgcaccaagtatttacctgatcccaatgctcttaatccaaagagctagcactaatccggggtgtgctagtcttcttctccaaagttctgtctttaactgtagttttccagtttgttctgaattgtgtcgatttatgcagctcttaaattcttctgtaatgattggagttttgtgttgtaagaggttcagcttttattaagtgctctttaccattctaagcctggtgtgtgacacatacctgtaatcttagcaacatgagaaaatttagttaggagaatattaaattttgtaccaacctaggctgtttacagagtaagtttcctacccattctggattatccagcagtcccctttctcaaaacaaaaaggctccttgggttgatagaatattttaatcagttgaggacccaaggacctaagtttgatccccccaaaaaacaatttaaacccatacatgtgaacacacacacactttttcaaaggaccctagcacacttaccagcaatcatgtccaagcagcttataaccacctataactctaggtccagggggtttggcaccctcttctggcctccaaggtaccttcactcaggtacatacacatccaacatatatacatatttaaaaataaacctttttgtaaaagccaggtgtggttgcttgcattcagtcccaaaactgaggaggcagagaaaggtggatccctgagactcactggtcagctagcctgacctacttggcaatctccaggacatgagtgactctgtaccagagaaaaagtgtgagtgatgcctgaggggcctatgcacacatacgaaggagttctttccactttagaaagtctcagaattgatgacagcaccacttacacagtatttgtgactgaaatggtttccatggcagtctgaagttgtgtcaacaaccacagtgattctttgtataagtacaagcaactctcatttatcataatcacctgtacattcttgacttatcttcttaaaaatttatttttgctgtagttcatagtagaattagcattagtagatattactagctcttaaaattgtatccagctaaattatctttgaaataggatttacagcagagattggtttctgtttttataatgatggagtgggctttgtttgttttaggctctgtctctcgtaggccaagcttgccctaaacctactatgtagctatatctatctatatctatatctatatctatatctatatctatatctatatctatatctatatctatatctatatctatagcttacattcttccttttgagtgctacaagcatgtgctaccaccttggtaggaatgttattttaaaagaaaagaaaaagaaggaaaaatatgaagatctgaaaagatagcaagaaatttgctctgccaaaatctaggaaaaagcaccccttccaccccccaataagtagctggaatcgcttttgtcttaagggcagtgtgctggttagttattgtcagcttaagctactcaagtgagaaaatgctctcatcggattgacttataggtaagtcgggggggggggcgcattttcttgattgatgtttgatgtgggagggtgcagcccactgtaggacagatggtcctggggtatataacaaaataaagtgagcaagccaggaggaacaagcaagtaagcagcattgcttcatggcctcttctttagttcctgtctccaggttcctgcctagagttcctactttgtttcccctggtgatgagctataatgtgtgaacaaaattctttcctcccaaattgctcttgcagtagaataggcagtgtgcatgttttagctttggtgtcagtggacttcataaattgaagagtacaaaagtcaacacctaaagcttatattaagtgagagtcaaagacagtttcttttaggtaggaccctgaggattccttcattaggtttgcctttgaagtagaactaaattatctactaagtcccacatttcagaaatgtgagactctagagaagcttgattagaacagaggaatcaaaaggaaagtaaaaaaaaaaaattgtgactattggtttttccttcatattgacttttagagcagtttttgtttgttgtttggtgtgtgtgcgcgcgcgcgtgcgtctttgcatgcatggtatttggtctgagtggtcctgtagctcagaagctctttatcctagttcctagttgcagagatagtactcgtccaagctttggtggaagaaaagggaagtcacctgtggagaaaggcccgcccttactagggaattgttactaataatttttctttttaaatttacttattatttatttttaatcttctgtatatgtttgtgggtctgaaatgtgatacatgtgatgcataccgtgtgtatatgagtgcttacagaggccagaagcctatatcagatgccctgggactgaagttacacacagtgaccttctcctacccatgtgggtggtggatattggaaactaaactaggaacctctctgcaggagcagcaagtgaataagctaatacattgttaaaagtaaccaagaacagttttaaaagaattaagcaaaattgcacgtaagaaaacacatattctgagtcaaaaaaggtcttattacagtataatttaagatttatgtaattctccttgaatatatacctaaaggtaattaaaacaagacaaggcagtgttcactgtgtagccctggtgttctggagcatgctgtgtagaccaggctggacttgaactcaagatgcccacctccctttgcctcccgagtgctagggttggaagtgtgcaccaccacacctgactccctcaaagtaaactctgaaaagaaaaaacactaataaaaaagcatggattcaaatgccagcgaatatggcagttaccaaatttaaaacaattgctgattcattttaaaatgaagataaactataaaaatggcttcatatatttttagaaaaaaaatagaaattctggagatgaaaattatcatgtatcaaatacatgagaagcttaacagattatttttgggtgaagaagtggttgcttagaagataaagctgaagaaatatcaaattaagcctacagtcaaaaagattgaaaatgctgaagagagcataaaagataagaagattgggaggtgggttggagtctaacattcagtcagtgttccagagtaaaatattgcaaagttaatatttgaagagtgggttctgagtgaaaattttctagctctagtaaaaaccagctgacaggtgtaagaaatgcactgaatttttaacagtataagaaaaaacaagtctatacccagacagatcatatagtaaaacaaggagaaatcctgaaagcagtcaaagaacagaaagacgtcctttaaagaagcaactctggggccagggcagtggctcagcaagcacaggcacttggtatggagcctgaattgagagaaggaaaagaacagactcttcactgagctctgacctccacatccacggcatggcagcatacgaatccatctacacacagacgataaataaacataatgaaaacattttaaatcgaagcaactatgagcaagcaattgtcaatttagaattggtaaatatcaggagtacaaatgtagttcaacgaatcatcagccctttgaaattatgaagtacataattaaagtaaaaagtctgagatgcaaggtggagtgaagagcaaagaggagcatgcataagtgataattgcataaagcactaaagacccttaatggagatatacaaataaaggcagtgttctaagacttttatttgggagaaatagcaggttttccagagtgactacctctagtcaaagttgaactgtgcattggggatcttgtccttttgtaggaccaaacaaaccatgaaacaaacaaacataagaactggaagggtagtgaagcctagcatgggctcagtcctggcaccacagaagatggggaggaaaggaaatagtgtggtgtctgcccaagtgaagatcagaggtggagggagtatcaggggttttccatagcatttgtatcaagtgaattaatagtaagacaatttctttgttatatttgtactgttgacacagatacctccaaatatggaacacaagtatgctttctttaatttatgtctccagttctactaatttagtcttctagaatatcacagaacaatctttctcttctaatttcttatttttgtactctcattatttagtaggtaggcacacaagcaaatctttagatatgccttgacactggtaacttgagtttgccttcatgtgtatatgtatccaggtcaccccaactccaaactaaaaatacctctgcttgactttgctcctatccttttttttttttttttttttttaaataaccacagaactgaagatgttgtacatgccaggcatggcctctcttgctgcttttgtcatctgtttctgattacttactacctgcgcttacagagttctcacttagaacttacttcttgacagtctctgtgtttcctaccactttgttcttttaaccatcaggctacatgtgcactgtaatgagtatctgcctgcgttttctgtatttcttggtcttagttatttgagtgtttcactaacatcacaaagtcagcaattcagttctagacccagttatctttgcctttaagttgaatgaatctccctgtgtcctagcaaacttatcacttagtagaatttacgctggatgctgcatagtaagtttctctgttctgcggtcctgatttcactatagagtaagcacccaaaccctttgactcaccatctgccctgatgcttctattttattcatctcaatcactctagtttaagccctgattatttttctcttaagacccttttatttttgttttgcccatagtttacttctattttttgatccattatacctattttctggtcagtcttaagctttagctattaaagcttaaggaatttagtaacatagtaacaaacaccctgttgtttacaaattaaacaaaatgtattcaccttcattcactccgcaaactttcctgatctaataatcacagtcccgtctgtctttgttcgtcttcctgtgttttattctgggacaaaccataagaactttagagttctgagcatgctgagctctcctgtgattgatttactttgtcgttttgtttggtttggtttggattttctagacagggtttctctgtgtattcctggctgttttggaactcactctgtttcaaggctggcttgaaactcagaggttctcctgcctctgcctcccaagtgctgggctcactgcccagctattttctttaggctttgctaatatttttaacacaaggaggactagaagtagagtaattctgcttaaaataaatctttcatagagtattatttggactacagatttgttattgaaagagaagagaatctactgctgaatgctcctcacagtcagctgatcttggggagagagggatgaggctctaaaggatcttgtggacatggattttaaagtgtagcctgtagaatatctgagaggcttataaagagaaaagggaagatgaatacaaaaggcaaatagtatgcagaaaaggttgtggatggactttatatgcttatgtaggggtactgacttgctgggacagtttcctactctaaggagatggctcagcaggtgtactggctggttttgtgtcaacttgacacaagctggagttatcacagagaaaggagcttcaatggaggaaatgcctccatgagatccagctataaggcattttctcaattagtgatcggagggccccttgtgggtggtaccatctctgggctggnnnnnnnnnnnnnnnnnnnnctgctaatatgagaacccatgtgtaggaagactctatggatgaaatataggcaatcacataaaaacgaagagaaatggatacttccaacagcttagaatacccctgtgtaaggcctcctgaattctctgaattatattctgttccctacctgatgagctctggaaggagagtaatatgctgggggaatgagaatgtgggtacagctcatggcagattgtgcctatgacatacagagcccagggttccctgcctcctcactcctctagctccctaccccttcaccccacagagaaacaaaagctgaaaccaattagttacttggaagtaattaaaatagtatttttgttttgctttgtttgaagcaggatcactctatatagccctggctgttctgcaacttactgtgtagaccaggatggccttaaacttacggagatctacctgccccaactcctgaggactgcgattgaaggtatgcaccatcatcatacccagcaagatagtacttttaacaccaccaagagggatgccgggtggtggtggcacgcacctttaatcccagcacttgggaggtagaggcaggcgaatttctgagttcaaggccagcctggtctacaaagtgagtgtcaggtacagccagggctacacagtagaaaccctgtcttgaaaaaaaaaaaaaaaaaaaaagaagggagggagggaggaagcaagcaagcaagcagagcaagccagtaagaaacatctctccatggcctctgcatcaactcctgcttcctgacctgcttgagttccagtcctgacttcctttggtgatcgacagcaatgcggaaagtgtaagctgaataaaccctttcctccccaacttgcttcttgctcatgatgtttgtgcaggaatggaaaccctgactaagacagcaggtaagggcatttttggataccacaaggtggccaaagaccaatttatgagagttgtcttctgacttccactcaaagtaaacaacaatctcagaaccttccaactccattttgttacttaaatattagcttctggtagattaaattttaaaaaggcaaagctgaaagtaaatgttgtataaaattaacagagttggggactgaaggaagagatgactcagcagttaagaatactaattgctcttccagagaacctgggttcaagtctaagcacccaaatggcaactcacaactgtaactccaatcccagagaatccagtgccctcctctggcaccagatatgtatatgatgcacagacatttacgcagacaaaaatgcctgtgcacacgagtcaatcattttatttttaaataagagcataattttatgagctcaagacattcttttggtttgtagtgctggagatagattcttgggccttaagtatgtactgtactgttgaggcatgcttctagcccaataaagaacttttttttttttttttggtttttcgagacagggtttctctgtgtagccctggctgtcctggcactcactttgtagaccaggctggccttgaactcagaaatccgcctgcctctgcctcctgagtgctgggattaaaggcgtgcgccaccacgcccggcaataaagaactttttaaatgatttaaaacctctaccacacacaaaaaaaaaattgatataatgtgaccacattagaaatagagggccagagagatggctcaccaggtaaaagtgcttgttgtgcgagtctagtaacttgaatttgatctctgggactcaggtaaaggtggaaggaaagaccagatgccagaggtgtcttctgacctccacatgcgcactgcagtggatggactgcagtgtatatgcttatccacaccaaaagaaagaaagagaagatagaaacttctctttataaataccttattaaggggcctgagaggtagtttagtgcataaagttcttgccatgtgtggtgttttaaataagaatagcccccattcatgtgtttgaatgctagtccgtagggagtaacactgttaggaggtgtggccttgttgaggaagtgtgtcactgtagaggtgggctttgaggtctcaaatgctcaaactaagactagtgtggcagtctcctgttgctgcctgcagatcaagatgtggaactctccgctccgctcctgtgtctccctatgagccaccatgacgataatggactaaacctcagaaactgtaagccagtcccaattaattaaatgttttccttattaagagtttaataatttaataattcccttcacagcaatagaaactccttttttttttaaagatttatttattttatgtatgtgagtacactgtagctgtacagatgtttgtgagccttcatgtgtttgttgggaattgaatttttaggacctgcttgctctggtcaacccggctccctctggtcaaccctgcttgctcagtccctgcttgctctggcccaaagatttaattatttattattatacataagtacactgtagctgtcttcaggcacaccaaaagaggacatcagatctcattatgggtggttgtgagtcaccatgtggttgctgggatttgaactcagaacctttggaagagcagtcagtgctcttacccgctgagccatctcatcagccctagaaactcttaagacaccatgaggatcagagtttagattcccatcatctctttatataaatgcctaatggacatggcagtttgcctacaattccagcttttgaaaggttggcatggaatctccagaacaagcaggctagctaagtgagcaatattgatgagcaccgagttccattgagaaagattcctgggctggagagatggtgcagcgtttaagaggaaggttgctgaggtcaacctcaggtctctctctatatatacatgtaccaaggtacatatgaacaggcatatatgcaggctcacataccacacacatattcatgcagaaacaacccccaccttattaagagactaaaagacaactgttgtgtccggccagcagaccacaacctgggttctagcctggaaaggcattttggaaacctggaagagaagaggggctaggtggcgagagaaagaaatgcagctaagacaggctttctgatcaaagctcaattttactgttctgcacgcagttatgaaggaaggggaaggggcccgattcccgccaattagtcttggagtccaatagcagggtgaccatgtgcacagctccgaacagcaaagcggcaggttctagcagtgggcatggcagaacgattgagcgggaagctccacccctgagcaagcaggtttcaggctgggggaggggagactacagacaagataagtgaagattcttgcaatccattagttaataagttcttccaaaatttagtagcccctagtattttcaaaacataataaaatagcaaacaggtcacagtttctgtggggcaggaaatcagcaacttaactggcatagctctgactctaggatctcacaaggctagaattaccaaggatgtaatcatttcaagtcttgacctagtgacagtcttctcccatgtttcctgatatggatatagcagactgcagaagacccacttccagatttactcacaagggcctcttcatggcacaacagccagattttcagaagagagtgaaagttttttgtttttaagatttttttaaaattttatgtatgtgcatacactgtctatctcttcagaaacaccagaagaaggcatcggatcccattgtgagccaccttgtggttgctgggaattgaactcaggacctctggaagagcagtcagggctcttaacctctgagtcatctctccagccctaccattgtctttttattgcttaatcttggctgtatcctgttagaagcaggttaataactcttaagcctacactcaagggattcaggtcattaaggacattttggaggattctaccaaacaaaaagaatggactaacatgaaaaatatacattaagaatcagccataggagatcaaggtctagggaagagtaatgacaaaagctagtgagttggaacaaaataaggactcagttatgtaaaaatgccacagtaaaaaagactgaggatacaaatgctcagtggtacagtgcttttcttaacctgtgtgaggtcttgtgttcaggccttaattcttaaaacaagaacaaacaaaaacttagaggaggattgagcctggggagttgggggccagaccctggctcaatgaaagccattactttgtgtgctgacctactaggttttaaagtagctatataattatgcatgagaaaagaaacgtatttactgttttctttgtgctcctagactgcctttatgaagctgggaggtgtgcctgtagagagttgtaaacagacttaccaggagcttgttgagcaaattttctaagttcttccatcacttgagaatgtgtagactagagagactcttcaaggaaacactcagcatgactcagggcatcctacaacttgtcagccaatttgtgtctgttagagagtgttgtctgctgctcagtggcccaaatgcttctggatgccatcagagctggggaggaaatcaggtgctcctaccttcatttggagagggcttaaggggtgagttcccttgctcagccgtttgttgtattgttttctgtttttgaggcagtcatgctttatagccctggatggcctagaacctgtgtagaacacggttgtgagctaccatttgggtgctgggaattgaaactaggttctctcaaaggaagacgtgaccactattttattaaattgtattatattatattatattatattatattatattatatttttaaccactcttaactgctgatccatctctttagccactcttgttcaaccatttaaaaggctaatgaaaatgttcaccaatgagtagcaaattagctatcctaattctaattattacttactattatcttgactagaaagtaaagtaatgttattgaggaaaatcactataaatcactataaaatttttactataaatgtggccaagaggaatgatgcaaactgtaatcccagcccgtggaaagtcgagacttattgggatagtaagacacccccctaatccccactctgaattaatcaaaaatagagaaaagaaaaaagtgcttggggagatgttcagtgggtaaagtgcttgccgttcaagtgtgaggtcctgagtgagtttagttcagtcataccagtgtttgagggtgggggagatagatggatcccaggagcttggggctatctagtgtaactgaaactgagaggttcagtgagagactgtcaaaaacataaggtggagagcaatagaagacacacagctcgatctctggcctccactccaatgcacgagcacataccacacacacacacacacacacacacacacacacatacacacacactacatacacaaaaaattaaaagtggtctttacatcttttcacagctaaaaaacaaaaatcaaaagaaaatgcagtaggtaggtagataggtaggtaggtagataagatagaaggataggacatgaccagtaaacattaggaatgtttttttacttcaggaacaatcaggaaaattaaaacaataagactattttatatagattagatttgtagaaatgaggacatctgacaatatagatattggtgataatatggagaagtaggggtttctttgatttctagtgatagtgttcattagaaaactaacttaggtgacctacaacaagcaatacttcctgtagacagttatcttactccaactgttttcaagcttgaatgtgcataagaattgaaattgttggactccactcctacagtttctgattaaagaggacttgggtggaaactgataatttgctttttaagttcccagttgatgctgatcctgctctcaacccctgaatcctgctttgtgcttcaatcttttccctagagcagtggttctcaaaccttccaatacaagccttcaatataggtcctcatgtggtggtgacctccaaccataaagttattgtgttgccatttcataactaattttgctactgtttaatataaatatctggtaggtgactcccaaaggtacggtgacccacaggttgacaactgctgccttagagaaatgaaagcatatatttaagaaggcttattgaggggctggttaagagcactcagcggttaagagcactgactgctcttccagaggtcccgagttcaattcccagcaaccacgtggtggctcacaaccatctgtaatgggatctgatgccctcttccggtgtgactgaagagaccaatggtgtactcatatacataaaataaatttaaaaattaaaaaaaaaaaggcttattgaggtcaggtggtggtggtggtggtggtggtgcacacttttaatcccagcatttgagaaacagaggcaggtgtagctctgagttggaggccagctggtctatagagtgagttccaggacagccagggctacacagagaaaatcttgtatcaaaaaccaaaaccaccaccactaccaacaaagaaagttgattgctattaaccaccaaatacaaaaattcagacactcattagtagaataaatacatatttgtgtgcttacttagtggtatattatatatttaattacagaatataaagctagttcaagtagattagaaatacaaaacaggaaaaaagcccatggatttgaaagagaatagatgtgttggggtacctgagaggtgttgaagagaggaaagggaagaagggagatgtaattgtattttaatctcaaacaaaaagttaaaacaaaaagatatacaaatcttagtcatctcttgtattagtatgtatgaatctcacaagtatattagtcaggtattagaagatatggtggtgtgggtttgtaatcctaatgatggcaagatgggaggcagagccttaggtgaatgacatctggaactctgagcacttcagatgcttacctgtaccacatgtgcacacctctctcgggaatatcacacacatacatttacaaaaaaccaagatggaattaatgatgttgtttaggaatgcaaatataggtaatagaattataagaaacaaattgtcagaacagtgtgtgatagtaatcaactcatgggaagcaagattgtcaaggccagtttaactgctaacagagggtttgttttatagttatttaaactaacatttttataaacttacgatctcctttttatttccacctctgattacttttaaggtcagatttggttttgtgtatttgttagcctttggatttttttcttttattatttgtggacatcttaggttgagatatctgttttaaaattttattttgaaggaatggtttattgtggacacaatataacttatttgtctttttatttagaattcttttttgtttctttagaaaatttgctccctagtgttacattatgttactatgttgcatctgatgaatttaagtttacaaaaattatgcttttttaaaatttatgcagtcttgtgaagatatgaagctgtctggggacatgtaattatcctaacaccatgtttgcatatgcatatgattttgttctcattgatttgtaaagcacccttgagtatataccagattctgtttgtcttttaatagtgtcatgtccacattactattctttttttatatagtgtcttggtttttgctaataccagcctctttgttgattttgtgcaaatctatactaacttactcttcatgagaccattagaattaagttgtgaagatctacacaagtccttttgggattgttttagattttaatactgtgaagagaaaccatgaccaaggcaactcttataaaggcaaacatgtacttggggctggcttacagtttcagaggttcagtccattatcatcatggtgggaggcatggcagtgtgcaggcagatatggtgctggaggaactgagagttctacatcttgatctgcaggcaccaggagactgtgtcacactgggtgtagcttgagcctaggagacctcaaagcccatgcccactgtaacacacttctccaacaaggccacaccccctaatagtaccactctctttgttttgttttgtttttttaaagatttatttatttattttatgtacataagtacactgtcgctatctgcagacacatcagaagaggtcatcagattctcattacagatggttgtgagccaccatgtggttgctgggaattgaactcaggacctctggaaaagcagttggtgctcttaactgctgagccatctctccagcccagtaccactctctatcagccaagtattcaaatacatgagtctacaagggccatacctattcaagccatcacaaggattttgattgtaattttatatgttcatataggttgatttataactaaaattcagtttcacaactcatgaacatggtctttatctttacttacttaagtgtttggtttttttccttaataggttttacctttctatccagtgctcttcagtttggatgagggtgtagtttttattcttttaaccttttgtgctgttgtgaatgagatgctttaaatacttatttttattatcatttgtatatgtgtgtttatgtgagtttgttatgtgcagatacccaaggctgtgagaatatgtgtcagatcttctggacttagagttataggcagttttcagcagtgggataaagtcacttcctctgaagagcagcaagtgttgttaatcacagagtcatctccagtcttgagataataaataaaaatagataataaatgaatatgaatgaatgagtaaataaaaattaaaaaataggggctggtgagatggctcagcggttaagagcgccgactgctcttccaaaggtcctgagttcaaatcccagcaaccacatggtggctcacaaccatctgtaacgaaatcttatgcccacttctggagtgtctgaagacagctacagtgtacttacacataataaataaataaataaataaataaatattaaaaaaataaagttgtatggaagaagctgttgagtggctagcacttggattttatatctagttctgatacagtgcttagtatttttcaagttcactattacattgcagctacagtgtacttacacataataaataaataaataaataaataaatatttaaaaaattaagttgtatggaagaagctgttgagtggctagcgcttggattttatatctagttctgatacagtgcttagtatttttcaagttcactattacattgccaggattttaaaataacatttacatgtacaagtaatggttgttttatgtagttattattattctaatacattagctagggccttccatatatagtcataaatgatggtggtcatctttgtttttcttttcttagaaatgtatctttgggctggagagatgatggctcagtgattaagagtactggttgctcttctagaggacttgggttcgattcccagtacccatatggcagctcacaactgtctgtaactccagttccaggggctccatcacaccaggcatgcatgtggggcacataactgtacatgcaggcaaaatattcatacatgtaaaataaatatttttaaaaattgtattcttagtgactttttgtaaatttcttatagatattctatgtgaagttttagactgtttcttgatttgtagtctgctatgcagttcttctgaatcatcatatgagtattgaaattttctataccacccattatactgaggtgatcatatcacctgttgatgtaagtcatttcattattaggcatcctatttttgactaactcttggattactggatatattttattgcactgtttttaacttattttgaaagagagaaagctcatgcagaaaagagaagggaaaaagtgaaaagactaaaatgtccggattatatattaaaaagcctcaaggtgatggaaggacagcccagtccctgggctggaatatcattgttgtagatatgatattccaggtggggactgagatgcttggagaacctggaggccaggtatgtaagatatgcaactcagctgtatgttcctttgtttcttgatttgtagtctgctatgcagttcttctgaatcatcatatgagtattgaaattttctataccacccattatactgaggtgatcatatcacctgttgatgtaagtcatttcattattaggcatcctatttttgactaactcttggattactggatatattttattgcactgtttttaacttattttgaaagagagaaagctcatgcagaagcagaaaagagaagggaaaaagtgaaaagactaaaatgtccggattatatattaaaaagcctcaaggtgatggaaggacagcccagtccctgggctggaatatcattgttgtagatatgatattccaggtggggactgagatgcttggagaacctggaggccaggtatgtaagatatgcaactcagctgtatgttcctttgttccagggtctgaaacccaacaattagagctgataagtctttcagatctatctatatcttgtatagttttattctagactagagaaatgtttctctgtctgtctgtctgtctctctctctaagattgagtgtcactatattggtctgtctgtctgtctgtcctggaactcagtatgtagaccagcctggtcttaaactcacagaaatgttcctcctcctgcattctccaactttatatttcttgactgttcagtgggctttaaaagtaacctctgagactacacctttctttcaactctttatgatgatttttagtatagattttcccccaaggcatatttttatgtgcatgtgtgcgtgcattcgagacagacagacagacagacagagacaaaaatacagagtgcacgtgtgcacgaatttgccagaaggcaggcacattatgatacagaggcagtggaggagcactgcttaatggcttgctcagcttgctttgttataatgtccaggactgccaacccagaaggggcagtaccacagtgaactgggccctcccacatcaatcaagaatatgtactataggcttgcccatatgccagtatggcaggagtgttttcgcagttgaggttcctcttccagaatgactctagctctagcttgtgtccagttaacagaaaagtacaggcagttgtgagtcccgtagtggtggcactaggaaccaaacaagtcttggaaaagcaataagtgctcctaactgccaagccatcccaccagccccaaattaaagagaagaaaaggtgtgtgtgtttgtgtgtgtgtgtgtgtgtgtgtgtgtgtgtgtttgagagagagagagagatcacatgctatgacacattgacacatacttgaaggtcaaaaggattacttgactagcaaatatggtttcttcttccactatgtgcgttccagggattaaacccaagtcatcaaagttttgcaaagagtgactttacgtgcagagtcttttgaaatagctttcttctgcttccaatggttttgggccaaggcgtttattcagaaggatgatgagtccacccaaggaagagataggtgaggcttctcgtgaatgggactttagatagagacttgtttaatgatttgatacttattttcagtctactcagctgacttaatttcttttctgttattttcagcatttattcttacttactaaggaacaggtcaccaccagaactgtactcttccatcctgttctgccaaccctgagtctttaattcagtgtttcctaaggtggttctgggcctacagggaagcatttgaaatgtttgattgtcatgaattggagctgctacaggagtcagggagtgccatgcactggcactctttcatggcaagagttacccacttcaaagtgctgcttacggtctctatgaagaaccttaaacattgaactcaaattttttcttgacatctatcatccatctatttttgaggcaaggttttactttatagcctagtctgacttcgagctcatgatctctgcctcagtcttgagaggtctgggattggaggcctatgccaccatatcagacttctgaatttattaacttttaaaaatgatgttgtgtctgtgggtacattactgtgtgtgggtggggtcaagccatgatatgcatgtggaagtcagacgacagcgttgtagaattagttcactcttttcacctttctgttggtcccagagattgaactcaggtccccagactttcacagcaagagcctttactctttgagctgtctggccagccccattaacgtcatatttattctttaaagtttagttctggggcagtgaggtggctcgttgggccaagtcacttgctgccaagcctgacaacctgagttcagtctctgggtccagaaagagaaaacagactctggaaatgtgtcctctgattcccccccccacacacacaaaataataaataaataataaataaacaaatgtaaataatgatagtaaaatagtaactatttagttctagccagtcatgatggcatgcgtctgtgatctcagcactcagaatgcagaggctagcagatctctgagttttgaggctggcatggtttacataacaagttctagctagtcaggactacaaaatgaaatcccgttttaaaaaagcaaaaacaacaacaaaaacactttgattatcttttccagatgtattaatcttttggtctcttctcctccccttccccttctcccgccccacattcttcctgtttgcttggtacatcctaacatttttatgtacatctctattacttgaagtaactatcttgtagtgttcttgattaagacactatacctgtaccttactgtgagctcaaatcattgaggcagagacattttgtattcttggtccatggtatatgtaattttttttctttttaaataatgtatcctacaaataagtcatatatatatgcatatatacatatatatatacatacatacatacatacatatatatatatatataaagagtacactgtagctgtcttcagacataccaaaagagggcattggatctcattacagatggttgtgaatcaccatgtggtttctgggatttgaactcaggacctctggaagatcagtcagtgctcttaaccactgagccatctctccagcccccgaggtgtagctcttaaaagccctgctttcttagagtccattaataatcttgtacaggtatagttgtgggaaataatgaaggactcactttacacacacactgtattatttactttcctcattgttgttatttaaatgcctaacagaagcaatttaaggctgggatatagtagtgcatgccttcagtcccaacacttgggaggtaaagaaaggcacacatctctgagttcaaggacaacatgatctacatagtgagttccaggacagccagggctatattgagataccctatctcaacatcatcaacaacaacaacaaaacaccaaataaataaataaacaaaacccccaaaacaaaccacagaatcaacttaagaaaaggttttattttggctcacagtttgggcaacagtcctcctggagcaggcttggtggcaggagcttgagggaactggtctcattgcatatgtggtcagcatgtagagaccaagaaatgctggaactcagctttctttctcctttttactccaggttcctttttgattattccacaaatcaacattctatggccttagccccttgatgcttacaagaagacagcaagcacatttttaaaaaccaaggcaaatgaatacggagatctacttgtctttgtaagcagagacaataagctagctgggtgggatctggctctgagatcaccattcctgctacatctggggctaaactagctctgttctaggctgaccttgagttcaggagtctgcctgcctttgtaagcacaaatgaaaaaaaccgtacctgggtgggatctttgtctgtgatcaccacttcccaaattgctttatctccttccttaatatctttctgacaagctcactcatagtgcagctgcccattttcttttaggtccatatatatcccctcatatagccaatattgcatgcttatattgtgcataggtgagaaattatacattcttgaactcatgttttcaaagttctttctcactatcctgaaggtcacagcacttatcgttttgctaaggacatagacatatcctcaccttccagactagtgctgtctctgattattatggagtcattaatcttggcaggagaacacctcctgaggaaggagcataaagaaattatgtacattattatgcaaacaagtttcatccctggcaacccatgaacactcctggaggcccatgccctgctggctctgttccaggggcaaaccatgtcactctgtaccttttaggccatgccagactcagcatcatagagctgcagaaatcctttaatacccagaaatgttttacagtgataatgtgttggcttcattttattgttagtcagattgaggaattgagtgcttaattcagttgtatttcagtttttaacttattttctgataaatactgagaatctctcaaatgagctctatgaatgtgttatgcatgtaacacatgaataaagattgatatgtcaaaaaaccttagaggagggtcagtggaaactggatgatgcgacagactaacttctccagggtcatacagctaagtgacaaaactggaattagaggtttatagcctgtgtacttatataccaaatactaagcttttctcaacaagtcttgagaggtagataatataaattctgttttgtgggtgaagtttgttttaaagcatatacaactggcctggggcaccctgcctcttgaccatatgttcatgtttctctgatactaaccccaagtgaggtttaaactatttgaagaagctgtggtttatttgtgtaatcaactgtaaaaaactgattcttcttaatggtttatatcggtccaaatactaaagaatttatttagccagctaacatctctgcaaaaagagtatctcaacttgagaatatacccattatgtagatcacaactttgaccattacattgtaatctattgttggagccataatatttaaaaagaaattttttgctctttgaattgaaattgacctaatcaggttatgttggttgtccaacggaaaatatattttgctattaggttaaatgtcagtcatatttaatggaaaatcattgaccttaagaatttagaatgttcattttacagttttaatgttttatgtgtaaggtctgtgtttgctttttttttttttttcttcattttgttttggattttgagacagggtttctctgtgtagacctgcctatcctgtagctttgtagaccaggctgacctcgaactccgagatcacctgcctttgcctcccaagtgctgggattgaaggtgtgcgccgccatgcttgacttctgtttacattttttactgtgatctgatttaatttatcagccaccagacataactgactggcggaaggggcttcttttacattcacatgagtggcgggcttatgaggatttattttgaggttgggattagaatttctcttaatagtctcagtcatctaagtgcagagctggaggactacacaaaatgattcttcagtccccctttggaatacttgcttgctctctgaaccttggcgcatctttggtgcattacaagtttgtaagagtattaaatctatccacagaagttcagactcttcctatgctttttgctgcttattgtagtgtgctttaatgcacttgcctcccttgtgtacctttatgacctatgagttaatctaagcattattgtcagagtaaacagtataaaatataatcctgaccagatcaaaagccacttcataacagtaaaagattgaattaatatttttattgaatgtgcttgtgcttacatgtggtctctgcaataagatggccataaaacacattacaaaaaaatatacatatacacatatggtttcgaaattgtgatacattccaaaagcgagcttaatgaagattcagtaaagattgagagaaggccctcttaggaagccggagttaattaattaatttatttatttatttattgcttaatttggaaagctgctgagggaagaatgttcagggataaggaatagaatgtatgaattgtgtggggtaagagatgaagggaccagtgcctgatgagacagaatgaaacaatcttgtaggtaagaagtatggggatctaaactctgtaagcaagggaagtaaagtggtgagatgtgttctagggattcccttctgaccagacaatggaggaacgatagcatggaactaagactaaagaaatggggcaattgatacctttgtaagtattttagagagagaaatgataatagggttttttgttttaaactaatcaaggcatgaatcaaggtaacccaggaaatgattggttgtctcaattaaaaaagaaatctagattagaataagtagtgctggggagatagcccagtgatttagcatagtagttgctttgtcagttcctagcacccacatcagatggtttacattgcctgtacctccagttccagttctacacgcatacatgaaggcacacgtacatatggataaaaagaataaactctaaaaatttagtcacatagctcttttccccacatgtatgtgtgtaccacttgaatgcttggtgcacaaggaggccagaagagggggttggattcctggaattggagttacaggtagttgttagctgtcatgtggattctggaatcaaacccaggtcttctagaagagcagctgatgctcttaactgctaagcaaactctcaaaacaaaatctttttttcagacaagatttggaagtcagatgtggtggcacatgcctttcatactagcacacaagcagagacaggtctgcctgtctctattagtttgaggtctgcctgatctatatatacagcaagttccaagccagtcaaagctacaaacagacaaacaaacaacaacaacaaaacataaaaaaataagaaccaaagaagggccagaaaattgaatatagttgttttagatatttgctatttggttctttaaatttttcaattgtatgaattttgggtgttgttggttatataaagcatattgtttttatctttatttacattgcaagaaaaaaaaagaatatgtaatgtacagaatattttgacttaggaaactttgatagagatttcactgaatctgtatattgctcttgatagaatggccatgttcataatattaattctaccagtccatggagatctttccacctaattgcttcaacttcttttttcttttctttttttttttttttcttttttgagacagggtttctctgtatagccctggctgttctggaactcactctgtagaccaggctggcctcaaactcagaaatccgcctgcctctgcctcctaagtgctgggattaaagacgtgcaccaccactgcccagctcaacttcttttttcaatgtcaagtttttaatattcaagtctctcacttctttgaatgtcctcattgtctgttgtagtatgctactttcatctctaattttattgctctgagactctcttccccactgttaatttggttagagggtaggtggtctggctaggcaagcactttactccagagctatatcaccccagttatgggtgagggcatctttaggatttctttttaaccttacacttacttacctatggtgtatgtggtggttgtgaggagtggcacacgcatgctatggtgtgtgtgtgtgtgtgtgtgtgtgtgtgtgtgatgcatgagtatagaagcacatgtaccatggtgcttgtgtttggaggtcaggggacaactctcagaagtggcttctcttcttgcactgtgtgatctacagattgaggcattcctcacgactgacttagttagcctctgtggttcaaagagtctgactcaaacagttcattttagacatatttaaacacaggacaattttggaaacagttttctggtgacagttatcacagtaaagcctagagtgtgactatattgaaactcttgcaaaacgtgtctgggacctctctcataaaaatgggttctgttgactgagaaacaacactcaagagtctaggaagaatctggataaatacaacagtctaggggattcgggccctgcaagtagcaacgatcaccaggttactgctacatccattcccagctttctgggcagaaacaggtatagatccctatctcaggaggcccttgtactctggcctttcatttgttctcatcttagaagggttcaaccttcatgtgggtacattgtaagacagctggagttaagctctccaggcacaatatattcttccatttttttggttttggtggttttgtttttcaagacacggtttctctgtattatcttggctatcacttgtagccttggctgtcacttggctggaactcactctgtagaccaggctggccttaaacttactgagttccatctgcctctgcctcccaagtcctgggattaaaggagtgtgccaccaccacctggccagtatcttctttcattaaaaaaataataataataaaagtctactcaagggctggagagatgactcaactgttaagagcactggctgctcttctagaggtcctgagttcaattcccagcgaccacttggtagctcacaaccatttgtaatgagatctgatgccctcttctcgtgtgtctaaagacagctacagtgcacctatacataataaataaataaataaatctttttttttttaaaaatccagtcaagtttatactgaagattaaccatcacaataacaaactcaaaaaaaaaattgctttctggtagggagatccaaatttgatggaagattaaaaatagattttcatgatttattctgtatatgtatgtgtgtgtgtgttttaattatatttaattttgaatgtaggttccacagtatagaaaatataatgtttgtatttctgagtctggcttattttatttaatatagtaattgctagttttgatggtttattctaaatactcaggtgtttgaatctcttatagatagggatgcaatactagatggaaaaaggttagtacagttactataatcataaaccccactcaattgtctaaagccccgagaacactggcagttactgcagtctgttgtctacattaaaatagttttaatccctatgctaagtgatctttatttagattcttttacttttttaggtatggaatatcaagcaaatgattaagttgacacaggaacatatagaggccctattggacaaatttggtggagagcataacccaccatcaatatacctggaggtaagttttgagtattactttatggtaattttgagagaaaaatgtattaaaatgttttatagtcatagttttggttatttagagagcaggattggaaacattggaagaatttactttgtcttttttttttttttttccttagtcttgttttcattcacttgttgcaatctgcatgtattagttttatttggaaaatgtcaaaactgagaggaatgtctcctataaacttcaaaatattgcctgatgggctggtgagatggctcagtgggtaagagcacccgactgctcttccaaaggtccagagttcaaatcccagcaaccacatggtggctcataaccatccgtaacgagatctgatgccctcttctggtatatctgaagacagctacagtgtacttacatataataataaataaatctttaaaaaaaaaaaaattgcctgaattttaaaaaaaattactaaaaagagagaaagaaaaagcacactgttttggtagtcagcagaatgagttaccatcttgggaaatttggatggttttgtaaaatatctttttgagagtaagtttcccagagttgttttctcctttcttatagatagtttataatcttggaatggcccagtactgctcagtcttgctgcttagtgatgccttgagatttgtatcatctgccttgagtgagattataaatctgtagttagccattgttcttaatcctgtgaggcagtaggtactaggtagtcatagataggccttcttgcccttagtttccttctaaaagtcagtcagtccttagcaagcaggctctgtgggctcgacaagactgcttgccacagctttctactgcctttctccagtaacgcttgctcagctataattgcatgatggtatgtgctgttagtcccaggtctgagactttgaggtcaacctgggctacatagtaagttctaatagagacacctaagctacacaatgagactctgtctcaaaaaaaataaaataaaataaaataaaacaaagaccaagtaagcatttggcttcaaatatcagagattttaaaacatggtttgaacaacttgtaactaaaatttctaatttaccaatctacttttttttttaagaattatttatttactttatgagtacactgtagctgtcttcagacacaccagaagagggcatcagatcccaatacagatggttgtgagccaccttgtggttgctgggaagtgaacttaggacttctgaaagatcagtcagtgctcttaactgctgagccatctctccagcccctcaattatttttcaaagaaaaattaagtcttcattattttgtgagaaagttaagtttgtgtttataaaacaaaccttggaactttggaaacaccaactaaactgttcttctcttgtcttcctcatgacttattctggatcacactgctgcttatgctataaaatgtaggactagaattctatctgtactttcagttgtgtggtaggagccaagcaaagaagtaagaagtagtcttagtatagtcttaatgaaagtgctcatttttgtttatcaaccatacaacagaagcaacagtttgtctctgtctattgggcactttcccacatttgaatcaatgaacatgttatttatagtcatgatggattgtttcagccagacacatactcttcagacatttgaatacttaaaaattgattagtaaaaagaaaaacatttgtgcttattcttattctatgccctgtactgtgttaaatgcttttattaatacttacaattacttttagcaaattcctgcataggtattttatttctctttgacaggctaaatagagaggttaagtaacttacttcaagtggtaggtaactattgctgaagggagaaggcagatatctagcttacaaatctatgatactgaccactgccttattctacagctttgctatcctgttgtgtctctgccctcgtgctaaacatttctaatttctttatctattttttgttgtacaaaatgtggacttttttttcaaatgtatttaattggattggtttctttttacaactatgcatacaaacttgaatcatatattcaaaaacagtgtaacatcaaagcaaagtttaatgggttttaagtatgtgacaaagtaatagattccatatgtactaatgacatatagctatagtgaatatttatgaaacatttagaaaaaaattaggatagtattatatgtaatagtttaagaactattttatagttacaaaatagcatagttcctgagatatgctaaggttctacagataggggtactcactgaataccctgtaatatttatactgtttgcagtgatatttaaaaaaaaaaatgtgccgggtgtggtagtgcacacctttaatcccagcactcaggaggcagaggcagatgaatttctgagttcgaggccagtctggtctacagagtgagttccaggacagccagggctatacagagaaatcctgtctcaaaaaacaacaacaacaaaatgtttaagagccaaaaatctgtatcttcaaacagattgtgcttcagagcagggagggacttatagacaatgaccatataaagcacttagaatattattaatattaattagcatttgatacaccatgaagaagactgacggatgacaggatgcttgcttgtggaaagctagctgaccatcccaagggaaaagactcagggactaaactttgaaggccttcagtcaaaagccagttcattctcctgatgactcccaaggtgtgccattcttcagggttttaggttcactctttaagaacagttttttcctagaataaaagatacattgaatttaccactttaaaaaataaatatttagggttggagagatagctctgcagttaagagcactggctgctcttccagaggccctgagtttaattcccagcaaccacatggttttaccatctgtaatggataccctcttttgatgtgtctgaagacagtgacagtgtactcatatacatagaataaataaatttaaaatgaataaataattttttagcaaattcattttattttgaaaccatcaacacagtccagaacttttcatcatttaagactgatcttttaggccgggcgtggtggcgcacacctttaattccagcacttgggaggcagaggcaggcggatttctgagttcgaagccagcctggtctacagagtgagttccaggacagccagggctatacagagaaaccctgtctagaaaaaccaaaaaaaaaaaaaaaaaaaaaaaaaaaaaggactgatctttttactttacatattaactaccagatccacattttcttctgattatgatctgtaataacaactacatactcctgtgtctgtgaatttgactgttttaaaagaatcacatcatttgtccttttgtgactggtttattttacttagcatgttttcaagaactatacatgttgcaacatggataacacgtgtgtaaaaagtcccttgcttgctagggggaatctcgtggtagaatgtttgcctatttttggctgcttgaattgcaaaaaatgatgaatggccatgggtgaaagataattgaattcttgctttcaaattttaaaacaagggttttttgttgttttgtttgtttgcttgtttgttttcccgagacaggatttctctgtatagccctggctgtcctggaactcactctgtagaccaggttggcctcaaattcagaaatccacctgcctctgcctcccgagtgctgggattaaaggcatgcgccactactgcctggctttaaaacaagttttaaaattatatttgtaaactttctgcacacatgcatgtgcgtgcacatacacataccacagtgcacatgtggaagttaataaacaactgggaggagtcagttctcaggtcatcagggttggtggctttaaaatctctcatatttgaagctaatggtaacctgatgatttgtaatgtaggcttatcttctgcataattaactagtgattacagctgagctaacatttatagaaaaggcagaggaagtgtggtgagcagtcgcattgttgatcctgagcaaagtcgggtccttaggcttaaacagctctcatgtctttgaacttatactcagaatcgcagaatcatacagtgattgtttcattatttaaagggactcacacacctttttatactgtgcctacaccatgttacattcttattatcaacgattgcacaaggattcttctctctccgtagcctcactgacactgaacattttctgttttgtctttgacaatccccattttaatgaatgtacagtgatattctattgtggctttgctttgcatttctccagtgactatgacggtgagaccgtttttacattttattgtttatttggacatcctctttggagaaatgtctgttagctctttaatttttaattgaattgcttacattttagttacttaggtgctattttaaagttaattaatttatttttttcatcattcattcattcaattttaaagcatctcgcacgcacttctatagagaagatattcaagttcattgagtataagcaggaaaattaaagaaacagaaaaatcattcattcatatgtgtgggccaaaggacaactttaaagaatttttctctttccaaccatggtgttaaaacctaggttgtcaggacagggtttatattaccattccacaagagcagaatggaggcatagtgacaaaatccaggaccaaagcaaaaccaaaccctaacagtataaaattctatatgatgtttgggacttgagtgtcaaaggagtagatggctcagtcccaccagctttgctgcctgtgacatacatctccctcttgggctgattccactccctatatgcaaccgtcctcggcaggtaggtatctcacagctctgacattgacaacatattggtctctccagtacagttcaggcttcactttcattgcttcacaatttgaaatttatcttgtttgctagtctctggctcactcattaactaccacaatcctaaggaggaaaagatgggtttgcccctgaaaattctgtccaggatttttctgtttctttaattttcctgcttatactcaatgaatttgaatatcttctttgtagaagtgcgagatgctttaaaaattgttcacatatctttgttttatgggcgtgtgcacttatacaaatgtctgtgcataaatatatgccatgtagtgatatatggaaaacaggacacgctgaaggagtcagcgctgtcctttcatcacgtggatccccagcactgttctcggcttgtcgtgcttggtggcacgcacctctgagtgctgagccatcttgctagcttgagatgcttttctccttgtttttgtacctgatatatggtgtatggactaagaagcaaagagaaaaatacggagccagaacttagtattctcttcaaaggcagacctagtcctgatactcagtaggcagaggcaggctgtgagattcagatcagccaggactacataattaaaatcctccctcaaaaaaaaaaaaaaaaggaaaggaaaacaaatgtccctgacatttattatttatagcattcttataatgcatggcagtctttttcatcttgagatgtcaaattagaaacagtccagacacatttcatcaatttctgcaatgaaaagaataccagcatgtagatcagttcattgtatatatctgtgtaaagttaataaagtttcattagataatgagattaaattcagtaagaataagcttaatacttactctttttgtttgtttgtttttgtttttgttttttttgagacagggtttctctgtatagccctggctgtcctggaactctctctgtagaccaggctggcctcgaactcagaaattcgcctgctctgcctcccaagtgctgagattaaagctgtgcaccaccacgcccggcaatacttattcttaatacaggtgttacatacctgtaatcccaggtctctcacagactgaagcaagcaaattctaagctaattcatgcaatttagcaactctgttttaaaatttagaaagaaattaaagggttaagtatagttaagtgagagtgtttagctagactgcacgacattcgcggttcaattactgggacagaaagagggagggatgaacgtaatgactcaggtgcaggagatctgtgaactgtggaagccattaccataaactctcaaacagtattactttcagtattactcaaaagaatttctttatccattagcatctgttccttccagtcctcggaatgactgatcttttgattgatgataatgttggaataataatccataaaatatgggaaagagtacagtatagaccaaagtctgggaagatgttagaaatattcatgttgacctgaaacctattcgtgtgctagtgagatgtaaagtcaaggtggagtagtgttcattcaaggttgtgaacgtcccagagtcagactctggcatcatttcaatcttttgtaaagcctatggtatgaatatctctgggtcttgaagacagaatggaaataaatgcctaaattnnnnnnnnnnnnnnnnnnnnnnnnnnnnnnnnnnnnnnnnnnnnnnnnnnnnnnnnnnnnnnnnnnnnnnnnnnnnnnctaagaaacttgaagaggtaagagtgtatttgccctctgtatcctgaatcacagcccgttgagggaagccaaggcaggaactcaagtgaacaagaatgtggaggcaggagctgatgcagagacacgccatgaaggagtgctgcttactggcttgttcctcatggcctgctcagcctgcttccttttatttttcccccttttattaaaaatagatttatttttcatataatctatcctgataacagtcaccccgccctctactcctcccagatcctccccactttccccctcatctgaagccactccctttctgtctctcagtagaaaacatataggcttctcaaggaataataatataataatataaaacaagaactaacacatcaaaattttaaaaaaaaaacaaaacagacagacagaaagaaaagagcccccaaaaggagaaaaaaaaaaacctaaaaattcagagacccatttattcgaacactaaacccgaagccatgatatatatgcaaaggatcagtacggtaaaaagagagaaaatataaataaaatgaaatacaaatttttaaaaattaagtggtgagggcactgttgctatagagacaaggaacttccagaaaactcagtgctattgaggtttttgttttgcttttgttttctgttgctcatctactgccaggcttgcagcatatccttaagagaagtttgtttccctcaatgaaactcccttgaaaaaacaaaattttcattttcagcctgctctttttatagcatccagtaccaagtcagggggtggcaccacctacaatgggctgggccttgtgcaggaaatattaaaaaagaactggctcgttcccgagattgtgcctgcaactctgccctgtagggctgaccagccatcccccctgggccctctctcacctccccctcctcttcttccgtccagcccggaagtctcccctacttacccagtgattttctcctttactcattaggggataggtgacaagaagtcaccagtatacaagactccattctccctggagagtggaattagcatcaaaatacaagcaacccctgggctatccaccaccgggcacttctatatctattaaggaaatgccctacaggcttgcctataatctgattttaggaaggcattttctcagttgggattccctcctctcagatgactggcttctgtcaagttgacatacagctaacaagtacagcactgaatgcagccgaagtaacttgttaaactgaactgtgagaatgaaaaaaactattgataatgtggtgaagtgatagtttgtaatctgtgctgaagaaattggtatattttcaaaatttaacattaatactttgataagggaagaatatttggaaaattcattgtttccaataattcttttttataaggctaattttatataataaccatgtttgcctaggcctcagtaataagaatatttgatttatgtaagaaagaacttgtctcccaggcatttctaaacctttaagggtaagaattgtctgccttgtctgtttttgtagtctcagcataaacgatgccagtatagagataaacaacgaatatttattgaatgaatatagactcaataaatgaagcatattgagaaaggcacccttattaattagcctcttgatatgaaaactaaacagaaagatttgaattgatttgatggtaactctctattctgttcgtgacagttctagactacgaaattgtcaaaggggaatttttccagagttcaggctccttacctcagtactttcactatattttctcctttcaaaagttgttcaggaaaaaaaaaaaaaaagttgttcagtaagataaatattcagtacaccagagtgctgtagcctttattgaaatgagattgctcttgcattctccccttcctcaggtaattcctgcggtataatttctgcttatgaaatacagatttcctagtgtggtccatatactccttgcactttccaacacattacctgacattcagtttagaaatctgtggggttccccccacccagtaccttaaaatatgttctttgttaaaaaattctctgcacacaggcctctttttaaagtttttattgtgtgttgttttatgttgtactcatgaggctggggcatgcacatgcatgtggaggtcagaagacagctttcagaagttagttctttcctttcattgtgggttctagggatcaaactcaagtttcaggcttgctcagctagcactattacctgctgagccatcttgctagcccagtaaacttcttgagaaaaaggaaatgtcatattataatccttgattctctcttgtagaggttcataaatgtttctagtactgcatctgtttgggatgttagggaacaaaagggctaaattactctaggctgaggtgatttccattgtctgaaagaactgtggatatgtatattccaatcaatgccatctctttactttcagtatcattctgttcctttagaatttggtatttaatatggtaagccattttactttatagcttttgtcaaatgggatgtttaaaagggtatactcctagtggtccagagtttcctatggttgcagggtatcaaatcaatttttacttgcttaagcagcatttgatggggaaggagataataaggaatactgccagagagcatgttgatatccaggatcatagctgttacaggagacagtgatggcatccttggtttgtgctgtccccagaggctgtctggatgtctatgatctatgctgctgctggaaactatgtgaaagtccatgcatgatctatgctgccattgactgctatgggcaaggaagcttctgcagtggtatcaatgactccagactcataactgagaatgagagatgttgaaggcttctgtgacactccctacccacccccctcccccccaaaaaagcagtccagacaaatagctattgaaaagactgcttacaaattgtgataaagatggtgaagtgtagctcatcacagttgatagcttctctcagtggggttgggaaaggactctgtcttttttaggcagctggccagcagagtttgaccatgcttcagtgagtacatgagcaacacaaattggacttggatttttctttctttcttacattcttagttagggttttattgctatgaacagataccgtgaccaaggcaactcttataaggacaacatttagttggggctggcttacaggttcagaggttcagtccattatcatcaatcaaggcaggaacatggcagcatccaggcaggcatggtgcaggagctgagagttctatgtcttcacctgaaagctgctagtagaagactgacctctaagtagttaggatgagggtcttaaaatctctctaacaaggccacacctccaaatagtgccactcactgggctaagcatattcaaaccatgacattccactccctggcccccataggcttgttcaaacacctgagtctatgggggccatatctagtcataacataattaaaaagtacatttagtccaacttccaaagtccccataatctcgagcagcatcaacaatgttaaaagttcaaagtctcttctgagatctatcaaatcacttaactgtaatccccaaatcaatacaggaaaccatctgggtaaactccaaattctgcatctctttgtctgatgtcaaagcagttttcagatctccaactcctttttcatcattgttgactgcaataaacttcttttcctgggctggttccactccctgttagcagctttcctcaggaaatatcctctagctctggggtctccaatgagcaatgttcaggtcccatgtgaatctcctttattttgtaggcctatgaagagtacaccagcaagctagatgcccttcagcaaagagaacagcagcttttggaatccctgggtaatggagcagatttttctgtttctagctctgcatcaatggacaccgttacatcctcctcctcttctagcctttcagtgctaccatcatctctttcagtttttcaaactcccacagatgcatcacggaacaaccccaagtcaccacagaaacctatcgttagagtcttcctgcccaacaaacagaggacagtggtaagtcagtatttatcatcatccttttgctttctttgtgttgaacatcatcatcactgcatattcagagccatgccaatggaattatccattttaagttagggtagaaaagacatgattattttatgtcaagtctatatacagagttcttttttttaagatgcattcattcattcatttgtttgtttgttttatgtatatgagtacactattgctctcttcagtcacaccagaaggcaccagatcccattacaaatggttgtgagccaccatgtggttgctggatattgaactcaggacctcaggaggaacagtcagtgctcttatccgctgagccacctccctaacccttctttttaatttttatttgtgtatttgtgtacatggcttcactatgtagcctcggctgtggaactcactacatagatcaggctggcctctgactaacagcgaccggcctgcctctgcctcttcaagtgatgggatgttagcatgcctaactgatcaaacttcattggcacttaaatataagtactagttaaacatcagtcaggagccaggcagtggtggcacacgcatcccagcacttgggaagaaaagtcagtcaggagactgaagaggtggctcagcagttcagagcactggctgctgctgcagaggtccttggtttggtctcctgcactcttaggttagtccacaaccatctgtaataacattttgaggaaatttggtgccctcttctggcctcaaagaataccaggcatacatatggtgaactactgaacaggcaggcaaagtacgcataagaataaaataaaaacgaatgcatctttttttaaagacgagattagaatttccagatttaagcttgtatcaggtaagattctttcctctgtgtaatctccagcctaaattacctttcagttacctttcagtgtgctagtgttttcctcttgtgtatgtaactcctaaaaattgtcacaaaattgttagaaacaatgtaccagtaagaaacatttaaagcagagaaatctcctgagtcctcaagtaaagcacatattgtcaagttcagccttcataattaacgttcctggaaaacgtaagccatagtgctttcgtgtgtgtgtgtgtgtgtgtgtgtgtgtgtgtgtgtgtgtgtgtgcacaagagtgggggtgctcacaaggccagaggagacattaggtctgcagggactggagttataggtagttagttttgagtcaccggacaagaaagatcctggggactgaactctgtcccgtagaaaagcagcccgtgttcttaaccactggtccatctctccaactctatatgattgcttcgaactttaattagaagagttgcaagtcagctaaaatcaaagtagtttctctttgtttttgctgtgagacaacagaaattcaaagtacagtgggtgttttccagtattccaaaactccttttgacttttaaaaaatgttactataaaagcattttgccctagagtctagaattcctgtgttaatgatcggattaggaactagcagagttgccaactacccacatatttttggattttgaccttacttagaaaatactgtttttggtctgggtgtagtggtgcacgcttttaatcgaagcatttgggaagcattagcaagcagaactctctgtgttcaagaccagcatggtgtaccgggacagccagagctacacaaagaaaaaaccctgtccgggaacaaacaacaaccaaaaaaaaaaaggaaagaagaaaatactgttttctaacactgttaattatcaagagtagatttttacacactttcttcctgccctttcttccaggaagagttgattgtgataaagcaaacttggaattacttaatttttgcacagaataagctcaatttctaaaacaaatccagttttgtcctcttcaaaaaccaggaatgtaatgtaaaattatttgtaaatagctattctatctctgaagcttaaaaagtgagtggacacccacccccatctctgtcttcattttgttgcctatacttgtgagaagagcgtgggccggacagatgacttggtggttagaagtactggctgcctttgcagagaagcccggttctgttctcagcacccacgtggcagcttacagctgtctgaaactccagttccaagggactgaatactgtctctgatctctgtgggcactgcatgcacgcgatgcacttgcatgtgatgacgtacatgcaggcagaacacacagagacacaagatgaaaggagtttaggggattggctacacaatagcatgaagattaaccttgagcagttcacttttaaaaataattaggataagactttgttatgtgtatactttaatacatttttaaagggacagtatggtcataatacacaaagttaaaatatctctaactaagatgacccaaccatctattttgaagtgtttttctgagcatgaaaaataatgatttgttttgttgttctatttctcataactccaagttcctaatgtccgtcaacaagtaaattgttaaattggtcctttgtttacatacctaaaacccagtggtagctcagtgtaacttcaatgccgtcctgatttgtgtatggagttctcggttagttggacttacagaaagagaccccatctcaaaagttttttgttgttgttgtttttgtttgtttttttttaaactaaaaacaaaaagtcagggatatttttgaaaaaaattgtgtagggctttggagatggctcaggagttaagagcactgtcctcttccagaagacccaggttcaattcttagcacccacctggtagctcacaactatctgtaactcctgttctaggggatccaactccctcatacatgcaggcaaaataccagtgttcacaaaataaataaattaaaaaaaaactgtggtatatctatatataaagaacatagtttgatactaaagttactgatagtcctaacacccaacatagatgaatctcaagaaaaatatgctgtagaaaagaaggtagacaaaaatagatgcatactttgtaattccatttatataaatttctaaaatgaattcttggttatatatggtggtgaatacatataatactctcacttaggagatggtggcaagagaattaggggttcagtcatctttggctacatagttaagtctttaaaaacaaaggcaaatttttctatagtgacagaaagatgtttagtatttgtctagaagaggattaaggaaggaaggaggtattacattgaagtacaaggaaacttgcagaaaattatgcatatgttcattattgtaaatattgtaattgttttagttgggatttcaatttctataatgcaacactatgaccaaagcaagttggggagaaatgagcttattctgcttacacttccacatcactgttcatcctcaaagaggtcaaggcagtaacttaaacggtaagaacctggaggcagaagctgatccacaggctatggaaggcttctgcttataggctcgctccccatgacttatttaacgtgctttattacagaactcaggttcaccagcaaggggtggcactgttcacaatttactgagtcctcctaagtcaatcactacataagaaaatgcctacagcccagtcttatggaagcatttcttaatcgaagatccctcctgtcaggtgactctagcttgtgtgacagaaaaagtagccagaacaggatatgtgtggttatgtacggtgcgtattaaactgggttctccacatcactgcagtttatcccttacctcattcttggttttcattgtgaacctttaaaaatgctgctcatcctattctgccttgtttgtttttattttctcttattttattattactattttagatgcttgtttatattctgatgagagagggggttatagatttgatttgggtaggtggagaagtgggaaggagctggaggaggggaactgaaatcagaatatattatatgaaaaaattattttcaataaaaaacaaagaatgctgttagtcatagaaatatatgaaatagattttaaggaaaacaattaaggacaaggagagatatattaaaaagcaacttcaccagacaattagaatactaagtattgtatttaaacagttctttgtcagttatccattttcatttttgatcttttaagatgaggtctgtattctgtgctgatcttgtacttaagatctttctacctctaccccatcaagggctgggatttcaggtttatcccagcatgtaaagcctagatgtcattcttaatatattacaggtaggtcctgtagacatttaaaaaaatatactttttcaggacacttaaagtctttactatatttttagcaataaggaatatccaaaaatgcaaattctctgaacatactgcaattaaaataaaatgaataccaatagaaaagcatggtttagaattgtagttactctcagcatagactaaaaaattctaagggaaattagaaagtatttttatgaataataaaaataatgcataaaattgtagaatatacaaaaagcaatataaaatttgccttttaataatttatatgagtttttgaaacacctaaatatgaatgagaaataagatcaaagtaatgttaacaatcataataaagccctaactactgtacagttatcaatttttaaaattacatgtaataaaggtctgagagagtagctcaggagataaagcatttgttgctcaagcctgagctggaggactggtggtcagagccccagaactcttaaggataacccgcattgtggctacctgtattctcattacccagaagatagaatatggacccctggtgcaagctcaccagctaaactagcaggaatcctcgtgctctctcttttgcaagttacctagcttcaaaaaatcatgtggttagcaattaagaaagagttaatgaactttgggcctctatacaaacatgagcccatgacatgaacatactcatatactgacaccatacacacacacacacacacacacacacacacacacacacacacacacacacactatgactagggctgaggcagtaactcggagggagtacttgctattatattctgggtttgatctccagtagtactagaagtaaataaaagttcataacttgaagtataaaattcagaaacaaaatggattcttgggtttgagagatatatatagctcagtgctagaacttttacctagcatgtgtgaggtcttgggtttgattcttagcaagatacatatatacatgcacacacacacacattttcaaaagcaaataaaaaaagaaatagaaaattgtaataaagtgttgaagaacatgaaggtaagagaaacatctattggggcagagattcaagggagcaagaagggaaactggtgatggtggttatcaggacatatttgtatacttgtatgaaattgtcagaaaataaatatcttttttaaagatggaagaagccttgtagctactgaaagttctctttgtttctgaaacagagatcctggaaattagactgtgacatttgcatcatgacaggcatatgttttatttgatattaacattgttatatgtatgtgaagtcataaaaagtgaaatcccagcaagtaggtagacatgagaaagtatataccattcaagaaagaatgttgtaaaactgtgtcactcaacgggtgagctttttagtggcagtaaattataaaaagataaatatgtaaggaaaattaataaaagatggtttcttctcataaagtacaagttttcctcatgtcataaagctttgagttctccaaggaacaagaacttattgtatcctatcagaatttaccctttatatcagataaagaaaactgtgatgtttctatctgactgttagatgttattgattgtctagtttcttcattttcatgagagtatatagtgtacttggagcatatttctctcacactccacttctcacctggtttgggatgtgtgggtaggtggctttatgttcctgtgtgtgcacatacacatgtaggcatgcatgtggaggcctgaggacatcctgaggtgtgtcaggagtcatttaccttgctttttgagataggctctctcactggcctcgaactcagcatgcagggtaagctggttgcccagtaagccctcaagatccacttttccctgccttcccagtacacatgctgcttcatccaacatgtttgtttgcttgattatgtagaccagactggcctaaagtcacagagatccacctgcctctgcttcctgggtgcttgggattaaaggtatgcaccactgttattcctgactcacatctaacttgcttatatgagttctcaaaattcacctcaagtcatcatgcttgtcaagtaaacactttactaactgagctctctcctcagcccttcaagttttttgaaataggatcttactatgtagtgttttattcagggcaatccttctgtctcaacctctaagtattagaattataggcatgagccaccatgcctggcagaagacttcgtcctaaatcattttgaatttgatagtttttttatggctataataaagaccatggccaaaagcaacttgagaaggaagggtacttccatgtcacagcctaagaaggtcagtgcaggagctcagggaggaacctggagggaagagctgcagcagaggccatggagaaacagtttgctgggttgctctccgtggcttcctcaatctactttcttaatctcatctaggacttgcctgatgtgtcaccacctccagtgaagtaggtcctcccacatcaagcattaatcaagaaaatgctcgcggttcaaggcattgcctcagttaatatttttttcttctcaaatagttctatatcaagttgtcaagaaatcacccagcatgctgctgccaaaaggatttctctgaactccacatgtgtacacatacatgcccactcacaacgcatcatgtgaaatcaaaatatataaataagggaatgtaatttaaaaatgaaatcatgccctacttgtatttatgaagtaagaactgtttgtggagtcgagagaaataagataaagttgttttgattttagccattttgacggtgaggaagtaatagtagaaacttaaattattaccagtacaaataagtaagtgtatgaagtaggttaagaataaaaggatattattaaataggatatattctacagccccaggaaataatcctccctctatatttttagccacagtgtattttgcttaccagttttcagtttataaaccattctcatgtgttctcatttgtccccacagcaagtttgtgagggcaagtgctgagtgcagcactgtggaaccaggacattctaggttccacggaggtgctaataagcctttccagcagtggaagggcttcttttgtccttggcacgttttttaactgattaacctattttggtttgattagcagtttagtagtaagagatacaacctttgtaaatggccctggttctttgcaagttaaattccgtttgtctaggaagtactttaattctaacgtcttcactctgaagtgtttttagggtataagaatcctcttaacaagactgtgttgtaagcatagcatatcatagttttccttaaaaacaaattggtctgacagccgagaaagatacaacttcaagattaattgtcataaaatcacaaagctatgtcttggtcaggcttactattggcgtgatgaaacaccgtgaccagaagtgacttggagagaaaagggtttatttggcttacacttccacagtagtactgctcatcattgaaggcagtcaggacaggaactcaaacagggcaggaacctggaggcaggagttgatacaaagaccatagaggggtgctgctactggcttactcttcatggtttcctctgtcagctttctgacagaacccaggaccaccaatccagggatggcatcactcacaacacactagacctcccccaacaatcactaattaagaaaatgtcttagaggtttgtctacagttcagtcttatagaaagaagcattttttttttccaataaaggttcccttctctaagatgattataccttgtgttaggttggcataaaacgagccagagctagctgtatatttaaaattgtgtccgaatctacatattggtttgcatatgagtcctatgctagtttacttaagagctgtttcgtgtttacatataccacaaacttgcttctgtaccaccaagccgaccacggtgtatgtgatctgaaatgctgggaagcaggaaggacaggagtgcagagtatgggtatgtaagtttaaggccaagctgggctatatgagatcctgtctcgaaaagaaagagaaagagagaatacaatatcacacacatactagcacaaataattcagtgtatgacattttttgatgtccaaccaaatctttttttgggtgggggaggggtttgagacagggtttctctgtatagccctggctgtcctagaactcactctgtagaccaagctggccttgaactcagaaatccacctgcctctgcctcccgagtgctgggattaaaggtgtgtgccaccatgcccagctgtccagccaaatcttaaagtgaatccttaaagttttgtaaaacattgtactatagaagattttaaacacatgcaaaggtagtgaatgacttctcatggatttttaatcaatactcatttcagggttttttaaatttttttataataaagtttgaacataactgttttgttcaagtgtgaattgccctgtggtaaatacatattcagacaaatatatatagtgttgttgactccgtaacatgaactcgtggctaacatccctgtggctgaggcctgaattaagtttccccaacacacacacacacacctccctacctcttccctgccagacacattacagtcttctctgggcttaggagctctaaactgcacttaagtactgtgctgggaaaccatctgaaacagaaagcacataggtttatgtagcagtaggtaggctgggaataggaataggatacagatttgtattctgaaagcagaaaggtaaactgttactttgttcaaccttagctcagacagtacatgaataggtttttcactgatcttcatgtatccataaacacaataaagttttttatattttccagtgagtagacaaatacacacataattcctcacaaataatgagggttgcctatatgtctagctatatcttgaatacttaaaattatgagaccctgttcccttatgacaaacttaagatagggccgcactctgttaacctggctggcctggaactcacagagctaggtcctcctgctttttgcgtcccaagtgcttggattaaaggtgtgcaccatcatacccagcaatagtttcagtgataatattaaactgtgcttatttctaaacacaggtcctacctagtagcttaaagtaattaaagtgactgtagcagtaatcttctattacctaaaacacccctccttctgacttccctaataaaagctgtactccctgtaatctttctgcttctctttagtcttgcaaatttgccaggtagatgaggcatgggaagggctaaacaataggattaaccatttgccttgccctctcctcccagtgttacttctccttatatgagctttgttctatcaatagatagtgatatcttgatattaatgttctaggaaatatgtatcaattggcacactcttaactacactaaaacaggagcatctctcaaccaatgtcatatgtcacttcaaataagactcaggtacaatttagaaggtcatatatctagtcctggacctattgctatcataaggaattagcagctgattaacatgtacatcattgaatactagaaaaagctattgatagccccaatagtaatatgagattctagagaaggtcgagttcccagatagagacactagggaagtaagtatcgaatatcagattgatgcctgtctctgtatgtgtgtgcctgcctgcctcacctgcaccctcacctgtctgtctctctctcttggatggtggtgcatatgcacatgtgtatgtctgtgagtgcatgcacttgtagagatcagagatcaatggcagttgtttttatcactgttcaacttgtttttcgagacagggtctctcttgtgaaccagttggctgaccaaatgacacagccctcccccaggtccacactggagttaaagatgtgcactgctacactcagctttttagtgggtactgaggacccaactcaaatccttatgtttgtacagcaaaagcttcacccactgagcatccatccagccttcccatatagcctaagacacacattttcttctgctatattcagagtccataaggcatctcttaataatcatcagtgtaaccaaggacttattatacagcttgcacctttggtcaaaatagatgtttacatctagacatagtagtgtgtgcttacaagagttgtgaggctgacataggaatatctagagaaccaggcaagcctaggctacaacaggcactgcctcaaaaagcagacagcaacattttttattttactttgagtgttgacctttaagtattttcagtggtggaaccatactatattggtatgtgcaatatagtggatattatgttttctattcatgtatatgtgtatgtagttttaatagaagatgtacacatctttttttttctttgtttcaagctgataaaataatagttacttggtataatttcctttgactaatgagtaaattatagacccaaggaatccatatgatattttaaagatgttataaggtaaatgactcagttttaaaaaatgatttgaaagaaaacctccttcctttacctcttgcatgtatttatgtcataggtacccgcaagatgtggtgttacagttcgagacagtctaaagaaagcactgatgatgagaggtctcatcccagaatgctgtgctgtttacagaattcaggatgggtatggtttgtatgtgttgtgtcattttctttgaaagaaaattagacataaagctctggggttcttttgtagtctttctgcaaatctctggaatggagaattaactcaaggactggagaggtagctcagaacccacatggcagctcatagccatctgtaattccaattccagggatctaaaatcttgttgtctcctcaggtatgcatgaggtgtacagacttaaatgccaggaaaacacccatacacattagaaaaagagagggtatttattactaaaagatttagaacatcaacttaaaaaattgtactaatactactcttgaagaaatcttgaagactattgataatttatttggttttgttgtttattcctatgacaaatgcctttattagagtttataatttccttaatttgtgaacaattaaaacagcagttctcaacctttcataggggttgcctaagaccactgaaaatatagataattatttacagtgtgattcattacagtagaaaattacatttatgagtagcaacataaatgtttttatggatgggggattgccacaatatgaagaactgtattagagggtcacagcattaggaaggttgagaaccactacattagaatgtgatctgtttagataatgtgcatttctatagtcttcctttttaaataccaagctcatagttccacaaaaagttaccaaaatttacattttaatattgaagtgtcttttcataaagtaatattgttccgagatggttatgttttgaatctacatcttgaggcatgttgttccttggatggtctttttctctgaattggatggtaagaccatacctgtgtgtttgtttgtttgtttgtttgtctgttttttaaaccccaggaacaatttggttttgactgttgtaggtttttctggaccgacttaaaagtaaatatatttatactgctctttgtttaaaagtaatacatttattaaagttaaacttaaaaattaagactttaatttctaatgattgaaaagtacagagccaaactttcttaatattagttcctctgtaaccatatttgtatacacacgtatatactgagatacagtaatcaagaaaggtttttgccttcctttttttcagagagaagaaaccaattggctgggacacggacatttcctggcttactggagaggagttacatgttgaagtactggagaatgtcccacttacaacacacaactttgtatgtatctattcatatttgaattgtcaaagctggtcagtttcttttgaatttttttatttagtgaatattaaatacagatgaataattttgtgattgataattggcctaaattctgttctctaaaatcttgtatttgaaaagttaatatttattctttctttataacttaaaaaacatgtactatgtctcttaaatgaacaaataaaaaccaaacaaaattagtctgatatgaaaatctgcctatgaaaatgaacttttcctagaaatcgtcatgtgtatagatgcaggtaacaggatagttctctatgtacacaactccagggcagtgagcacagcgtacttgcttttcccttcattacttcccattcctctctctctttcaggtgaaaactggggtcatgctgtgtgatcgtcttccttttaattttctcctcagtaggatttgcgggtgttaattctatttcagtacggctagctttattcttgtaatgattgcctagtagcctataagaagagaaattgaggctttttctcttatttttatttttataaaatgtaacatgtagagttagactgcctatgtcttgacatacaaattgttcgcaaagattaagggctgggtaggaagcagcagagttgggtattgagttctccttgagactttatcttgtcttttttgcctttggtaaaacctagcttaagtttgtcaccagcccgcaacagcctcctaaccaccccccactcaactaaaacatctttaaatatacttagagtctgttctaaactaagcataagttatggccagaagaaataatagatctttttggttcacctttattcacaagggtatctttatggtttgcataaaatccatctttagtactgcatacccagtaccttttacccttctgctgttctgctcccgtctctcattctcttcctctcccctgccccacccaacccctgtgtacctcgcctgcatgggcgtgtgtgtgtgtgtgtgtgtgtgtgtgtgtgtgtgtgtgtgtgtgttgtttcctgagatagtggtgcagtactaaagatgcttaatttggcaattaaatatcaaagttatttcttatttctgtataaccacaggcaactggaaaaggggaaaggtagaaacaaacatttgccttttttcacatgctttttcaagtgatgggaaaactgaagacagcacaccctgttacgtaaaagttcctgaaagtccagaatgtattatgtgccagactataattctcagtagctattgattaaataaatattttttgaagatagaaatttgagtggggcacagtggcacactgggaagcagagacacacaaatgacggggaattcaaggacagcctagcctggtctacatagtaaggccctgtctcaaaaaaagaaaaagtttgagagcagatgtggctttccatagctggaaacctctattgggaggcagaagcaagaggatggttgaaagttcaagaccaacttctgtcgcaaaaaccatttaaacagaaagagaaatgtgatttggtgttaaaatcaaatgtatcgtgaaaagcatttatacataataaaggatataaaatgctaagctatgcttgatgtaagtgctgttatgtaggttgaggtatatattaggtcataataaaagaatacatttattacttatttgattgtggttttttaaatgaaattcaagatggttgaaaatataaaaaagccatccttgccatcaacattctgaaatagcagtgttagcaggttgtgtgttgttctgcccatacttactgcagcacatacacactttatatcatttctgcctgggggagaaaacgttcccgtcatacactgcaatttctttgatccatgctgtacattaagtcactgataaacttttgatacttttgaacatttatttgttttgttatatgaaggagcttatctgaaagcatagactaaaaaataagttcacatcagacattcttccagaggtgtcctaacaatatgttaaagtctgaaggcagaagttttctttcctattagccaaatttcagacctaaactttgagaagttgctgaatttagcagtaatacatcctgtgttacaaacaattcacttcataattttgtggtcagataaaataatcccaactacaccttaataaaattacaatgtagatttcatgaagccattgataatttttaatagtttctgttttaagctcttgggtaattatttttatattactaaatatcttttgccatgacttcttgttttatcaacttgacacctcgggtggtgattgctgactccattaggagtggcttgttgccagattatagcattctttctcctctcgctgttctgtctgagaactggggttgaataagtagatctttgtgtctcgaactgtcgcactagtggtcacctcccttagcttccttccttgtgtcgggattgagtgatagctttgtttgcattcctttcacctctagctcttctttttgtacttttactttttttatgctgtcaagcttgaaatcagttactctttttaactcaatttttaaaaattttttgagaatttcatgcatgagtccctttaagtattgcttgttgtccatttgaaattgggtaacatatcagggtctcaattctttttatttgttgtatgccttgatttttgagcttttatattggatattaagatgggatagtatttcaagtcccttggttttaatattgtgttttgatgtgtgactttttatgatacaaatatataaaacggattcttgcaagtatctgaaaccctgtatgattttcactttgcaggtacggaaaacttttttcaccttagcattttgtgacttttgccgaaagctgcttttccagggtttccgttgtcaaacatgtggttataaatttcaccagcgttgtagtacagaggttccactgatgtgtgtaaattatgaccaacttgagtaagtaatccacaaagaacctctttcctattactttatagttaaattttcatactataaaattagtgtactttgaaagtcgtgagggacgttttgcccaatgcaattgctaaagaatttttaaaagaacgaatagtccacgcaactcttctccctcagatgaatgaacagtggctctggtgcacataacattttcactccatactctttctaaagtaacaagtactagcccttagaaatcacttttatgtaatttggggtggacatagactactgtttcagtcaagttaactattgtctttcaggacaatgagtctgattcagcgacctagtttaccaattatgttacttttctccctcactttccacctcacccatatctgtttgtttcatcttatccctgttccctttatttaagggaatacttatacatttaagttatttctttcgaaaatttccttttttctctattttatagtatgtctaatagatatactagatgttatcattgtacaataatctttctcgataactctttttgttgctgctgaaatggaatttgactttaaaattaattataatgatatatccaacttagcagctaccaaggaggcagaggcaggtgaatctctgtaagtccaagaccagcctggtccacacagtgagttccaaggctacacagtgaatccatctcagaaaaaaacaagaaggataatctaacttaccactagatatttttcttctagtttttaaactagatgatttctccctgtgatatatagaaactgactgacaacaattagttttagagctgagcatgcccttgaaagtataatataatttttttaaaaaaaaactttcaacaaaaatatatgtaattgaactttaacagttgtttctgaaagtaaaacttgatcccacattttctcactacttctgtgttctcgtgtattgaagcttctgggttttgcacaagttaggtttgttttgttttgttttgtttttgcctcacagtttgctgtttgtctccaagttctttgagcatcacccagtaccacaggaggaggcctccttcccagagactgcccttccatctggatcctcttccgcacccccctcagactctactgggtaggatttgattcttgctgtctaatgatatgctagctgaactgcctttctttgggtcttttgtgtaattgtaaaccttttcaacacaggaactgttaaattatagatattttcctccaataatgtattttatcactaatgtacatgattacagcattgaagcatttacgtgcatttggtacagaatgggattaaaagcctggtgttagagtaggtcacacctttaatcccagcactcaagaggctgaaacaagcagatctctgtgagtggagcctgaccggatctacacagtgagttactgtcttgaaacacacacacacaatcaatcaatgggattaaagttggtgtagaccgttataagatcaattgtgaagaaagtcaacataaaattcttatgcctagtcttttattcaccattttatcaggtaatggtatgacctctccttaaaaaatattaacatatgagttgataatttttcaaaactataaatcataatagagtatattaaactttgtgataagaacataaatattttatatttatagaatgcaaggaaataggatgtactcaagaaagcttagtagagttgtgatttaaactggtctttaaagaattgctggctgccgggcgtggtggcgcacacctttaatcccagcactcgggaggcagaggcaggtggatttctgagttcaaggccagcctggtctacagagtgagttccaggacagccagggctgttacatggagaaaccctgtctttaaaaaaaaaaaaaaaaaaaaaaaaaaagccatagacagagagagatgggggaaaggggggagggaggtggagagagagaatgagttgctggaagctcaatgaactcagggagtcagagcaagtgtccagagaagagagcaggtttcagagctagtcacaaagcttacctaagtttataagtagtatgtgagagactgatatgatgcacacgtctaaaatcccagcactctggaggctgaagcagaaaggtggtgagtctgagcctaacctttgctacagagtgagatcttaatctcaaataacaacaaaaagttggaagaagaaaagtaccatatgtgagaccatgtagtagagaatcttgacattttagctggtatttgcttgagatatgaaggtgtgggagaataaagattttcaaacaagctaccaatgtgataaaaatgatttggaagggaaaatttacttagcagtgaaatacagatggacatggaaagcctacggtgaagaagacagcaaagcctaaagttgagggaaggccgtgtgaagagaagcagggcattgacaaaggacaaaaggcaagtggtagcagtcctattcatttaggagggaaagcaaacacttactctaaaaatatctccaaggcattgcattcatagtagaaaaagagacaataatttaagctggctcttgaatgtttgaataggtctcttttgcttttcccattgggttaagtcctagaagtatgtggtttttaaaaaaaaataaaaagtttctctgggtagtggcagtgcacacctttgatcccagtactctgcagtcagaggcagatggatctctgtgagctcaaggctagcctgttctacagagctaactccaggatagcgagggctacacagagaaactcttatcttgggaagatccagtgggggaggggaaggaggtaagagatgttgccagatagcattctgacctagaatagttctggactgtttagtgccggggtatttatttcactattaccctcttcctccgattcttcacagtgtgttatttctttagaccctcaaaaacttatttatttatgattgattgattctgtgggcagtgatatgtaggtatttgtgtgtatgatataccctagtacgtgtgtacctctacacaggggacagctttcatgacgcagttctctcctttcactgtggaaccagagatcgctcaagtggtcagtcagggatcgctcaagtggtcagtcagggatcgctcaagtggtcagtcagggatcgctcaagtggtcagtcagggatcactcaagtggtcagtcagggatcgctcaagtggtcagtcagggatcgctcaagtggtcagtcagggatcgctcaagtggtcagtcagggatctctcaagtggtcagtcagggatcgctcaagtggtcagtcagggatcgctcaagtggtcagtcagggatcactcaagtggtcagtcagggatcgctcaagtggtcagtcagggatcactcaagtggtcagtcagggatcgctcaagtggtcagtctttcatgacagttgcacacactgtcatcttgctagcctttatttctttagacttaaagaaggttaacattaagttgctacttataattgacctgcaatttttattgcaggcttgcaatctagttgaaagaactcgatttccaggatcaaggagagacccttcctcagataagacagaaagcaatagagaaggctacctggtaccctcctcccccatcacacatagaattggaatgtgtgtgagatgagatgagatggcttaataggtaaaagtgcttgccataggactttgtaaatttgacaaaggctaaatgtggtacagctgtaatcccagcattcatataataggatggaagatcatcccatcaacaaaagtcgatacagcatagcagtaacaagagaccctacctcaaaaataggtaaaaatttgttttcttaccttcatgtgtgcatcatggcatgcacacacctgcaaacaagcacataataacaacaacaacaataataattatagtaatagtaataataacatatataatcatattacctttttatatcactagaaaatacaactgtattgtcagattgtaatagttatctctgatggctttgccattagttgtatgacttttttttttttgtagatgatcagatcaaaataatgtttgggattttaattaatcctttggctattgcaattctcttaacagaatctatagatctgtaatgcttttctaatgacagatgccagttctatgaacagagttacagaacataaaattagcatggcctatctgaaggatcataatggtaacagtacagattgtcttctagtgaagggttgctgtttctaagtgaagaaagcatttgcctctgccacatgtattttttcttaactagagggaaatggatctggtcttgaaaactgtgcaagattctctaaaagttaatttcccaatgcttttatgtcactgtgtaaaattacctttgtaaagttagaagccaattagtcaaggttctctagaggaacataatttatataatgaacttatagaatatgtgtatatgtattatgtattatatttttatatatgtacatataaatacacacatatgtgtagacacacacacactactagaatggtttacagattatggtctagctagtctactaatggaaagtccaacaatccagtagttgttcagtccatgaggctggatgtccctactggtcttcagtatctgccagaatcctgaagaagtaggctgactctaatgccagtaaaagaatggacttgctagtgagagtgagaacaagcaggcaaagagagcacgcttccttctccatgtcctttatctacgctgccagcagaaggtgtggccagatttaaaaagtgtatctttctacctcaaagatccagattagaatgggttttcccacttcagatagtttagttaaggggaaaaaaaagatccctcacagattcattccagacgtagtcaagttaataacaaaaagtagacacatcagttatattcaatatcacaatatttgatttgttgcttgttagtgcaattttaaaagtaatggtatttcttttttcctggctagctcgcacaaaaattaaacagactataagatttatttaatcaagctttatagcacagtatttgaacatttattaatctattttaatcctctaaactaatctggctatcttccagccaaaatccccaagacacttgtattttagtattgatgtgactttttctgctccaggtgtattcccatagttgtcccctcagctctcctcatggctgaattctcccttctcttctttcttttcccctcacctctctggaatcagaagtccagccctactctctcctctgctcagccactggctatcagcttttattgacaaataagaggataaatgagaacaatgtttacacaacattgagtcaggagatactgagaatagccatgtctgaattgcaggcagatatggggacagaaaaatcagcatttgaataatacaaggataatctttacacagtgttcagtaacttgcctacagttactagttctgacaacaactataacagtcctaagacaagtatgggcataccaagaaattttctaaaattaatacattacccagtttagaatataaagagataattactttctttttatcacttacagaaagttactgtgcttcaaaaaaattttaaatagtgtaacctaaaacttaagcctaaattatagtagttttctaaagagtgttagaattaaaattctgtttatttttaattttaaaattttttaagtttagttttaagaaggtatgtggaagggtcagtacaaatatatacctgtgggagaaagccaattaggtgatggccaagatccttcataggttagttataaattgcctacttcaaggaaagagtccacaatatgcaggtatggctttataagttttccaaatgatgacaattaggaatatactagttaagttgagcaaaatcagaacaaagaatatacatgccacctaatccagacttgtgtaggatgggcccactcttctttggaaagacagtaatgagaagcaaaattatagttagaggattgcttttgttaagcattgaattaaaacatacagatgggtacaataatgaaatattgctcagagttaccatatacttgccttcaagggtagagaagttaactttgaactcaggcataccttcaccctccagatggtattaatacatcacatggattttgtgtttcaagccctcttcttttaccagattaaatacagggttttatttctccttgtttctgaatcactgtcctctgaaaacagagtttttatttcttacccagttcatatttctgtcatagtttttactgagtacatttcaggagtagtttatttcctctctctctcaatgctaggtcacatattatattaattagactattctatacattctagttaattcaggctttcccagattttagtcctgaattaaaggcactattgtcctaagactgtgagtagcttaacagtttttatttctgaatacttattaactaataacattcttgtaatttttagctctttgaaaattccttagcaaaggaatttttgtttctatttttatttagctttataaagcaagaataaggacagctttaacaaaatttctcgataaccagatgaaacataacttccctcaaatccagttccattaattgtagttaggcttatgcccgtttcttttagagaatagtgtttgcatcctgttcattgaagcagactcgcatagtgaatatgaatgccctaaaatacatttctttccttatccttatatcacgagcttcctagcctgatgacgtgctttgtttaaaagacttttgttactcttaagctttgctctccaaatctttattctacccttttctattgctttttttattatatgtatttaatatgactgtgtgcatgtgtgtctgtgctcatgcacatgctgaggcacctttgtggaagttagaagacagctttgtggaataaggtctccttccaccacctcggctcccgggtcaatcccaggtcatcaggcttagtagcaagtaccttttgatccactgagtgaccaatctcattgtcccctcctactgtattttcttaccattcttttatgatttcccttgttatctcaacaatgtctttcttgtctaataacaaccaaatattgctggttagcttttatactatggggtaaaacgctgagcagtatgtgaagagaacttggtccatgttggactttccatggccagttgacacttaggctgagccttactgtatcctcccgaaagcagtaatcacttctctgctcctgagaatcttttctgaggcagctacaatctttttaggagtttataatctagcctctggccaggctctttaggccagaactcatagattttattatctgtatcaaaaatgttaattagtaagtcattctataacctattaaagtattttaatcaaaataattttagggctgggaagatgactcagtggctaaagtccttgtcatgcaagcttgaggacttgagtttccatcctcattgcccacctaaaaagttgggttgtgactgttgttgaaacccatgaccccagtgttgcaggatcacacttggaaccccaaaattgtgttatttactggggggaaaatttttcagttatgtatggtgtggctcaggccttagcacacacctttaatccctctggctggaatatagacatgcccttagtacacatgtttaatcccaaacaatgagataaagttagtttgtagaaggaagcactcatgtttgaaagtgatgactcggagaaggatttgacagaatagaatatgcccaacttgagacattcttgcccagagtccctgcagcttcctgcttcaactgtgcttctacagaactgggtgcccaacccctctgaccccagttggcttttctgagcctgagccctttgcaaattagttgctctgctgcaccttgccctgccactgccatgaccaatgctgctcccacgaaagtgttgccgaattaccatcaggatcaggaggctgctggcaaccatcagatcaactcggagttacatgcctcctgcctctgtctgtggcttgctgttttgaccgggatgatgcgactctgaagaactttgccaaatactttctctgccaatctctgatgaagctgtagaaccaatgaagtggctgaattttcctgccggatataaagaaaccagactgtgatacctgggagagccggctgaatgcagtcgagtgtacactgcacttggaaaggaatgtgaatcaggcacaactaggactgcacaaactgactatggacaagaatggtccccacttatgtgacttcactgaggcacattatacctgagtgagcaggtgaaatccatcaaagaacagggtgaccacgtgaccaactatgcaagatggtagcccctgaatctggcatggcagaatatctctttgacaagcacaccctgggactcagtgatgaagctaagctgacttccccaaagccatatgactttactggtcactgaggcagtgcatatatgttgggctgcctttatcttttctgtaagttgcaccaaaacatcctcttaagttctttaatttgtaccatttcttcaaataaagaattttgatacctccctcaccccaccccaccccaccccacccccaaaagaatacccaacttacaagagaaaaaacgaggaaaaagaggcttcttaagagagcagcatggccgggcgtggtggcgcacgcctttaatcccagcactcgggaggcagaggcaggcggatttctgagttcaaggccagcctggtcttcagagtgagttccaggacagccaggactgcgcagagaaaccctgtctcgaaaaaaccaaaaaaaaaaaaaaaaaaaaaaaaaggagagagagagcagcatagagagaaaaaaggagggaggtagttttactaggttacagagagagaacaaacttgatcaggtgatgagagaatgagaaagagccagaaaattagaccatgttgccaaagttagtatgagttcaagcagagcaattcaggagaggctgcgagagaagccagattcagtcagtcagcttggagaagagttttgaagcagaacacctgagttgaaccagtcagccatggttcagaaagaagaaggaaaaagtgagcttagtcagcagtaaagctcagaggctgaatacgttcaaggcctaaagtaagactgcatggaggctagaagtctccatgactaggcctagcttagccgactgaggccataagcctccgagacaatttcttccagggaataaaagatacttttacaccccagtcctgggaagacagagataagaagattttcggagtttgctggccagcagtctaataaccaattgtaaattctagcttcagtgaaaagaccccgtcttaaataagtggagataaagcaattgacaccagtttctggcttccatgagcacctcacaactacaataccccaaatttttttagttattttaaatatttgcttcagtgtttaatattttatggttcttcccccctctctctttggtctctggtgttaatgagacatgaaaaacattttgaaatatggacaataaatggcaccatattgattatcttccaagattttggagatggtatttgatattataaaaaaattcattcaatactggtattaagtagtaattctatctttagggtcctaaaatgtacaagaatattctcaaaattacttgtaactttctaactaccttcttcagatttttatttcagtaactttaaattatgaaaaatagtacataagaaaacggcatattttattcaactagtctctacctgaaacattttaattctatatataattttaaaggataattaagaacttctactgatgaaccacaggtaatttctagccatttgtagattcctctggagttttctggtctgcttttgagcaaagctttggcagtactagttgtaggtatgttttttttaaaccaatgctttttgtaaagctattactactggaatttcgtttctttaaagcttatcattttaaatacaacaatcttataactttcattttaaatattattattaatataattgctccaactcttatcttccccatgacttggtttttccaggccccaaatcctcaccagtccatctccttcaaaatccattccaattccacagcccttccgaccagcagatgaagatcatcgcaatcagtttgggcaacgagaccggtcctcctcagctcccaatgttcatataaacacaattgagcctgtgaatatcgatgtaagtacagcactgctagaactaaacaattggagtgtgtttctctggttttctgctgtacttttaatacagattggacgtaaatgccacttttcatttatcatgtaaatgttgggctcctacattatagctccaacaccctgtcacggtctctaatgacagtaagggcttcaccgttaccaagttgcacttattctcacttttttctatgacactatgtctgaaaatggttttagttaaaatgactttatcttaatttaaatttaagaatttgaatttaagaattaatagatgcccatgggaattcatgaattctctaagatttttgtgcaattaatgtgttatgaaaatgacattaagaatttatatttttttctgtcatgagtttagcattagaaccaacaaaaacaattctaaatttgtatttttaaaaaatcttacagttggaactataacttaaactttattaactttcaaagtgctttattataaattttatttaattaccaagataaatcatgaataaaagattataaaatcagactttcttcctagtttttattaggtgcccccctatattttagagagtacgttcatataagtagctttttcctagtatcctttttaactaagacctttctctctctatgtagacctgaacacacaggaagagacaagtgggaaagggagatatgggaggaaggaggttggagaataaggagtcaacggtatctgtaggttaggtgtgttcttgatgtgttcaagctcagagcttcatctttatttgaaaacaaaccgccttttaaactcttccccttttctctgcttgtgactgtcctcctggtttcttgggcttggctagttgaagagtcacttcatgccttcctcttacccttttcataactgccataactgtttttccccattatgtcttagactctgctgacttattgacaccatttgcctccacacccttcattggaacctctgaatgcatttattcccacacatttccacctcggtgctctcaccgggatacatttttatgatactttttaaaaaatatttaattggggctcacttacagtttcagaggttcagtccattttcatcatcatgaggagcatggtgacatgcaggcaggtctttacatcttgagccgcaggcagagagacagagtgtatgagtttgagtctggtgtgtgcttttggaatttcaaagccaacccctagtgacacacttcctccaacaaggctacttcctggtaactaagcattcaaatattatgaagatatggggatcattcttattggaaccaccacatagaaaactagtagaaagaagccaaccaggcattgtggtatgtgcctttagtcttggcgctgagagctaaaggcactagagaatcagaagtgagaggccagcctatgatacatggtaccctggagaaggaaggagaaaggagagagtgaatgagtttagcaattacagctgatcctacttgtgcagatgttcatagatagcaaaggtattgccagaagctctttagttggtttcttctatgatgttgagtcacagggatgacagacaagggactagaagagattagggaacagttgaaatcgttttaaaatactagagtatcctatttaatctaggttctagtagacagatgaactgggagctttaagaacacgtgagattgagaagtgtaaatgtgtgttggacctggcaggagtggaaaagccacattcggctcatctgtaggtgtggggggagtttcagagctagggtaggaaacaggaaaagggatgtaactgttctcttgtggggccatctatctagaaagccccttgtttttatacatgcctgtccattcttcacagcccgttctcaggtttcttcagctgcttcaccaatgccaaaatactagtgtcatttcttttgcactatagtcaccaattctcatagatgtggaggctggaaggccagtgtcagatggctagaacatcatagtcttaatctatgtcactaaaagccttgtcaataccactacatggtagtaaattataataaactgatgtatctctcttttattctgaaatagttacttatttttcatgtgcctacatctcactgtgtgtttgtaagctctgaaaccaaggaaaagtagtgaaaccacaaagacttttgtgtgttgaaggttctatgtagtacaccagtaaagaattcactttttattttaataagcaaaattgtgcctatttgccactaacctttttagagacatttgtggccttttaatcccttacacttaagttaagctgagtaaactaatccgtgttctgtagactaggatccaaatttcattacatatggaatttcccctcctgccaacattactgtaaaagctgcattttaaatatagagaccaatttaaacaaaatccttttttgagctattttaatctcccctcctttttaatgtttcttatacatccacatttttatggtagtattcagtgtgcttttaattttgtattttttattaaatgtaaacatgtttcatgttttaagtttcataattgcttggtaactgtgtactacttcataaattgatacaccataaccataatatgtcaaaatgcctatcataggggagtaattatttctgatttttggtgtgatggataatgctgcactaaacatctttgtgcatatcattttttcttctgaattatttccttaggaaaaattcccagaagtggaattacaggatcaaagggtatgaacatttttatggctcttaatatgtgccagtaggattttctttaaggatttgtgaagccactgagtggactgaaatggatttcagcatttgacaaggactaataatcctttcacataggtctaggttggcaagtgcttcaaacgttagtgtttgtcatgtacactagctaatttaatagtctttgctttgtgaaataattataagacaggtattgttttgaattaacccttctgcttatgcatagtagaaaatccgttgttgttgttgctgttgttattacttttttaccatgtgctttgaataaacatattttactatttgtttgtaggatttgattagagaccaggggtttcgtggtgatggaggtaagtagtgactttagggttgttgttttattttgttttgttttgttttgttttgtttttgttgttgttttaaggcaaaagtgcaattgctttgctgcttgtctcctttatggttgctttttctttttttttttttttcatgaaacagacacagagaaaaatgtgtagagaaaaccaaagggtttttggttttttgtgtgtatttttttaatcgtagttatcatttattggtagcagaatttaaaattatccatgacaaggagagaaaatgagaagacatggaagaaagtcttaaatgctccccttccaatcttaggtactccaccaaggagggtccttaattcctttgtccactttttaatttttgctgcctccaaagctggagtcactaaatgtcttttggcctacaccaaatactcacagatagagcttagaatcaggttaaatcattctatatcattctttgggattgcctgccacatcccctcaatttgtcagactttttcaagcatttcccacccactttatagatctatttggaatacatatttatttcatggaatagacccataatggaaaaatttagtcactcccttgttggtatagtaaaaaatatatacaaatgagagattatattcatagaaaaatttagttatccccttattggtataataaggaaaatatacaaatgagagattatattaagattcttacagaatttccatctagctttccctctagtaaagataatattgttttaagaaaatgctttttgagccaaatgtgatagcatatgcctgtgatccgagctgaggcaggaagaacgtaagtttgaggctagcccagtatacatagtatggctctctcaaaaaaaaacaaaacaagcaaactctgtaataatgtaccacgtatgttttctaaaagattgcatttgagactgtcttcacattttcttgcaagagctcctctgtgctttccttctcagctgccttctgtcttacaaggaagactgtaggagctgtacaccatgcctagagctgggttcttcactgtgaccttctatatctgcaaaataggtccaagcccagactcgatatttttatactgaaagtaaacattgtaagccatattttgttatggttctgtactctgtgaagnnnnnnnnnnnnnnnnnnnntaacgagcctaaattatgtacttaatattgactttatcacatattcaagagtttgtgttgtttgttattccatgagcctgccaattaatgttgctgccagtttgactttcatatgtcttagtaactgtggctgctgataattttgcccaatacatccagcatttaaatgtttccatcgtgttagcatcacagttaacttagtagtaaacagcctgcttagtacctaaagtcaagtggcatttcttatttttgttatgagtcactttgaaaaaattaattggggtttttgtgaaaatataagcagatttttaaaatatcatccagaattattttgtgaagcaggcttcagttcatctaatttattccccatgacttctttcatttcttctgtgtgtctgtcttcctgtgtttgcctgcccctctctttctcttctaacagcccccttgaaccaactgatgcgctgtcttcggaaataccaatcccggactcccagccccctcctccattctgtccccagtgaaatagtgtttgattttgagcctggcccagtgttcagaggtagttgggctcttctttcttgttctcacccaagcaaactaaatataagatacagactctgtttgtgcctccctcacagcgtgtgtttgtaagtgtgagagttaagtactaagtttctgcttggcctggctggagtgctctgaatgtgcttctcacaccctcactaccgcaagcctcctgtgtgctgtctagtacaaagtttggaaagcaagagatttcggagttaacatttccatcttgcttaatgttgtcttatttctacttggtcttgataacttcttaaattctgggagacacaggcaggattctttttattttagtgcattggatgataattttcaattaagtaatattaatttgtttaagaaaataaaaatgtatatggaaacccctatgaaaaagggtgttttatattgggcgtatggctcacatctgaaacttcagcacttgagatgcagagacaagaggaaaatcactgcaggtttgaggccaaagtattcttatgagacttttgatagtgttttgaaatttagtaatattaatcattttttgttctattttccccttatatatgatatatattttagttaatctataaacatgagttcaaaaacactgaatttatatattgacttatgcccctcacataaggaaagttaataactgtccagtattttaccatgtcaatttactttaaaattgacttaaattttaagatgaaattggatatctttttaaaatatgtctacagttatctttattgctttgatacactgagtgacttatatttagtataatgtggtgctttagagatttccatcaacccagctacttttcagataaaccataatatagtggaagtcattcagtacttagtgatgtaattaaactaaataatccagtgataagaactgtgcctgaggactgggcaagttgttactgctccataaagtggaaagttatcagtgaccagtgtaaaatgtattgtgctctagttcaaagaaattccagacaccattctcttttagaaatttgcatatacaatcatagaattttcatatggtgctataacataatatagtggctacctagaaaattctacctagaaatctcaggtctattcactgtacactctggagagtctttgctcaaaattcctgtcccagatactatacatattgctactgagttaactggaagtttacatatttaaaaaagttccatttctgctgctcagagcctacttacaaggttcactttgcatataaaatagtagaatatatgtgaaatatggatgatatgccataacctttacttgttcacttttataataccaaggtttcagaaagtcttaaagcctctttagtgggactggggtggtagctcatcagtttataagcactggctgtttctccataggacgcggttcccttcccagctccactgtttgtaactctggcttcaggagctctgataccttcacacagatggcacatacaggcgaagcaccagtgcacataagataaaaataaataatttttcaaaaagaaagcttccttagctttgttcatattaactttgcacaaaaggtaacaaagagtctccgtctaatagaaaaacctcaccaaccagtgacactgctcaccgtctgtctcttaaataatagaacatgtagtctgctatcctagataaatgtatggctaataggaaagaaatacttaacaggaaggccattaaaatgtttcagttttaatgtttacatgtttttgaaatattgaggctactgaaataaaaaataagtttgttttgtagaaataagcattgattttgtttttgggttcttgttagttttttctgttttatcacacagggtctttgtattatgtggctctggctatcctagaattctttctgtagaccaggctggcctcaaatgcagagatttacctacatctgcctcccaagtactaggattaaaggtgtgtggcaccatgcctgtgcatttgttatgatgttttaattatttatcaaaggcacaggaacttgggagtgaattttagaaattgtgtcttggcttagagattgtgtttttctaaacttgtttattattatttattttaagggtctttagattggcccaaaaaacaaaacaaaaaaattactgtacaaattacatattatgtttcttttggcctaccctttgttaagggccaatatttaaatatgcactccatttttaaagtctagatctccccactttctgcccctgttgtgtggacatatttgttcctccttaatgcttactcctccctaatgtggataatttcccctttttctaatttagggtcaaccacaggcttgtccgccaccccgcctgcctcattacctggctcactcactaacgtgaaagccttacagaaatctccaggtcctcagcgggaaaggaagtcatcttcttcctcatcctcggaggacagaagtcggatggtaagcatctgtgctgtgctcctctaactgtgacgccgggttcccatcacatggaatattgcatagcgcatatgctcacaaaactgacttttgctctggtttctaatatagtttttgagggcattttgaaagggaaataatggtgttctgtttctaaaatgaggagaatgagactaagcaagtatttagaaggcatgattaggcatataaagcatatgtgctctaaaagctggtgcagaattcaagtgtctaccaaatggcatccttccatatttgaaaaataactttcttctacttctaccttatccaaagaattggtatattggtttatttatttattcctttatttatttatgtttgatggccaaatcagttaagacatgtaaggaaatccagcagcactagttagagcatggtaacttgaattgttgggacttgaagccaaaactagcctcgaatgtatagtttgtatcatgcctctgtagttctccacatagttaaaaagccagtttattttaagaataacaaatgtatttctacacatactaaatcatttctactttgaactttttaattagtattcttttgtgtgactgtgtgtataagtccagcatgtacatgcccagtggtgaaggaggtcaggggagtgtaacatatctcctggaactagagtaagaatgtgagctgctagctgagtgctgggactcgaacctgggtcctctggaagaaaagccactgcttctaacttctgaactatctctccagcaccaattatttctaattttaagtaattattccatcctcatattggctcattttaaatgtaactttatattttgagtcacaaatataactattacttcctcaacatggatattttatgttttctttcttcttcttttttttagaagaccttgctctgttcctaacttcctgtcaggcaggtcaatatagttagcatgaaacaaggtttttctcttttgtttgccttggcttgacttttgtactctatttttcgagaaaacacttggtagaagagattcaagtgatgactgggagattcctgatggacagattacagtgggacagagaattggatctgggtcatttggaactgtctacaagggaaagtggcatggtatgtatgtaacatggtgccattggcacaagtgggacatggtatgtataacacgatgccattggcacaagtgggatatattaagaaatgtttattaaaaagaagaagcagcagccaaagctgggtgtgatagcacacatccttaaacccagcactcaagaggcagaggcaagtagatctgagttcaaggccagcctggttcacagagaaagttacagtacagacagggctacacagatctgtcttgggaaggaacaacagtcatgatgacatacactccgatattccccacacttaggaggtataagcgtgaggattaggaattcaaggacatccttagctatggagaaagttcaaggtcaacttaagtaacaagagattgtctcaaaaacaaatatgaagtaaaaatattcactgtttacaccattaaactgttttcatcaaatgcaggagtcctccaaaggtttctaacaaaaatggtggaccataaaaactggcttcagagtaactaagattgctgttatactttatattaatgattcataaagatgaaggtcttctagctatcagtcccaaaggaagttcgtttttcttttagaagtattccttttgatgattttatgggtattataaatcaaaagttaacataaaaagtgttcagcctcactagttttctaagaattacaaactcagaagacagacgtcatgactttctttgaacatagattttttttttaattgatcatgtgaagattgtgattataatcctgtttattttgtagaaatatgaaaagttggcgataggtacactgagcctaagcacgtaattgaacagcaatgaataggttgatggttggggaagtatactcactagcggtataataataatagaaaatgaaaataatgtgagtactcactagtagaagattcagttagcacattgacacatccatatattgttatataagaatcaaaattatataatagttacattgatatggaaaggttttaatatattgatttgtttgaaacagcatgtataatgcctttatataaagatctatataaaatgcatttaacagtataaaaatgctatctgaatctctcaagtttattatttcgtatacattcataagttttatactgtatgcatatataagcatgtatatatgcataaatatatatacacacatatatatgtatggtatatataagttttaattctgagtgccatagttaggagaattttttttaatgatttactcatgattatgagtgctctatttgcatgtacacctacatgacaaaagatagcatcagatcccattatagatggttgtgttccatcatgtgtttgctgtgaattgaaatcaagacctggaagagcagccagttctcttaactaagccatctcaccatctcctatggaacatttatgttttcctaaaacatttaagtaataagcactgttaggtagtatccaataaaatgaatactatagaactttggtagttaagaaaaatcaagatttatagtgattatgtttaaatgtattaaaatgtctacaagtgtttaggtaattgaagctcaccaagtgaataaatacatttgtgattaataaatgtaatattattagccttctagaaggtctccacatgccttcttcattcactcaccctgcaaagacaacaaacatcctaaccacaatagaatatattgtgtaatctttctctcaaatattttatggtccatcaatgttgttgggtatgtttgtgttttatttgtcccctgaatagcattccattgtgtgagtgaaatgtgattccttccatctattggataataagcatttgggtacttcccactttggtgcaattctgaatgatgttgctgtgtatatttttaggatatgtcttttaaagaacatatgtgtattttttactggctatatgcctaggagagaattttaaaactacaccatatgcatacttgcaattttatatatactcccatcggtgctgctaagtaattataccagtttatatacccaacaaaagtgtataaaacactagaagtatttaaactacgattataattttaataatttttccagtccacataagtaagccataacgtttggaaaaaaaattggcaggtttttactttaagccaagttgcactggacctgttttgttgtccatggttcgagcactcactgaccaggtaacattttagtcaacatcggtaactcattaggagaactctccaagtacttagttacctaagtgtattcccagggtgaggaagttcactatattttagcatatattttcaaacaatagtataggaatatcattgttagttgctttgtgtgggattgaaggatgtgcgtgccccatagtatgtgttaaaaagaagaaaagtagtttattactaggtagttaaatataatttatttacagtttaatagggatatgaatttaaaactgacaattagcaaaaaacccaagaataaatatttcacatttcacaatttgaaatcttgggtaacaattttctttcaggtgatgtggcagtgaaaatgttgaatgtgacagcacccacacctcaacagctacaggccttcaaaaatgaagtaggagtgctcaggtgagcgagtggccacagctttccagtgcagtgacctaaagaaacaaagtgtggctgcttagacttcacgttcccattgttgtccaccgtttgctcctgcatctagaaaactgaattaatggaaataagaaatgtctgattgtgtctaatagtagttccttttaggaaagtaatactctaaatgtcctaaatgtatcaaaacacgtttaaaattgtatttagtcctaggccctaggacatgaggaacattgacaaatgagagagagtaaatccatgataagaaaacttaggaaagattctgtggttaaaatcttatgtgaggggagtgttcaaccaaactgaggttttaatccagagaagtgtcttgtattcaagaaggtacacagttactctgctattgtaaagaacagaacgaggaagctagctgtggtggttagaggaaaatgggtttacgtccacatagaaaacctcctaataaatttggaacaacttaaacaaatgaaagcaacctcagctcctagcttcctcattcgatatgtttctgtatttctgagtggagctggaggttaaactcagtaattagagctcaaccttgctgtgtttctggtactttttccttgagcaccgtattgatttgactctctttaaagaattgttactcattgtcacgtttctttttggcaggaaaactcgacatgtgaatatcctccttttcatgggctattctacaaagccacaactggcaattgttacacagtggtgtgagggctccagcttatatcaccatctccacatcattgagaccaaatttgagatgatcaaacttatagatattgctcggcagactgcacagggcatggagtaagttcagtgctgttaaatcttcatatatggcttttgaaacccacttaaggatacactaaaggtcctgatgataacctcttatgggttgcagaggtactaactactagataacacttacataatcaaaattgctatttctctagttcagcctttaacatatataaggaagaagtaaggtatttgatgagaagtttataattgcaaatgatgattagcactaagtgatttatataaacagtggaagtacagaaaagcaggagccctcaaaaaaaaagaaaaaaaaaacccactaccactaaaaaaaaaaaaaaaagccattaaagttaataggaaatatgtgactattattttaaatgaatgtctatattttgatccttgttgagaacttcaagttgtaacaggtatatctactgaattttactttgtaattcaaaagatacgttattttatgatttatactgattaaaatgaaccaggggtaggtgtggtggtgtaca

SEQ ID NO: 1481 - DNA, 2164 bp, Mus musculus
  misc_feature (1)..(1): n = a, g, c, or t.
ncggcgctggcgccgcggcctcttcggctgccgacccggccattcctgaagaggtatggaatatcaagcaaatgattaagttgacacaggaacatatagaggccctattggacaaatttggtggagagcataacccaccatcaatatacctggaggcctatgaagagtacaccagcaagctagatgcccttcagcaaagagaacagcagcttttggaatccctgggtaatggagcagatttttctgtttctagctctgcatcaatggacaccgttacatcctcctcctcttctagcctttcagtgctaccatcatctctttcagtttttcaaactcccacagatgcatcacggaacaaccccaagtcaccacagaaacctatcgttagagtcttcctgcccaacaaacagaggacagtggtacggaaaacttttttcaccttagcattttgtgacttttgccgaaagctgcttttccagggtttccgttgtcaaacatgtggttataaatttcaccagcgttgtagtacagaggttccactgatgtgtgtaaattatgaccaacttgagccccaaatcctcaccagtccatctccttcaaaatccattccaattccacagcccttccgaccagcagatgaagatcatcgcaatcagtttgggcaacgagaccggtcctcctcagctcccaatgttcatataaacacaattgagcctgtgaatatcgatgatttgattagagaccaggggtttcgtggtgatggagggtcaaccacaggcttgtccgccaccccgcctgcctcattacctggctcactcactaacgtgaaagccttacagaaatctccaggtcctcagcgggaaaggaagtcatcttcttcctcatcctcggaggacagaagtcggatgaaaacacttggtagaagagattcaagtgatgactgggagattcctgatggacagattacagtgggacagagaattggatctgggtcatttggaactgtctacaagggaaagtggcatggtgatgtggcagtgaaaatgttgaatgtgacagcacccacacctcaacagctacaggccttcaaaaatgaagtaggagtgctcaggaaaactcgacatgtgaatatcctccttttcatgggctattctacaaagccacaactggcaattgttacacagtggtgtgagggctccagcttatatcaccatctccacatcattgagaccaaatttgagatgatcaaacttatagatattgctcggcagactgcacagggcatggattacttacacgccaagtcaatcatccacagagacctcaagagtaatagtatccttcctgaaattgatatatttcttcatgaagacctcacggtaaaaataggtgactttggtctagccacagtgaaatctcggtggagtgggtcccatcagtttgaacagttgtctggatctattttgtggatggcaccagaagtaatcagaatgcaagataaaaacccgtatagctttcagtcagacgtgtatgcgtttgggattgttctgtacgaactgatgaccggccagctaccttattcaaacatcaacaacagggatcagataatttttatggtgggacgaggatacctatctccagatctcagtaaggtacggagtaactgtccaaaagccatgaagagattaatggcagagtgcctcaaaaagaaaagagacgagagaccactctttccccaaattctcgcctccattgagctgctggcccgctcattgccaaaaattcaccgcagtgcatcagaaccttccttgaatcgggctggtttccaaacagaagattttagtctgtatgcttgtgcttctccgaaaacacccatccaagcagggggatatggagaatttgcagccttcaagtagccagtccatcatggcagcatctactctttatttcttaagtcttgtgttcatacagtttgttaacatcaaaacacagttctgttcctcaaaaaattttttaaagatacaaaattttcaatgcataagttcatgtggaacagaatggaatttcctattcaacaaaagagggaagaatgttttaggaaccagaattctctgctgcccgtgtttcttcttcaacataactatcacgtgcatacaagtctgcc

SEQ ID NO: 1482 - DNA, 1845 bp, Mus musculus
atgattaagttgacacaggaacatatagaggccctattggacaaatttggtggagagcataacccaccatcaatatacctggaggcctatgaagagtacaccagcaagctagatgcccttcagcaaagagaacagcagcttttggaatccctgggtaatggagcagatttttctgtttctagctctgcatcaatggacaccgttacatcctcctcctcttctagcctttcagtgctaccatcatctctttcagtttttcaaactcccacagatgcatcacggaacaaccccaagtcaccacagaaacctatcgttagagtcttcctgcccaacaaacagaggacagtggtacggaaaacttttttcaccttagcattttgtgacttttgccgaaagctgcttttccagggtttccgttgtcaaacatgtggttataaatttcaccagcgttgtagtacagaggttccactgatgtgtgtaaattatgaccaacttgagccccaaatcctcaccagtccatctccttcaaaatccattccaattccacagcccttccgaccagcagatgaagatcatcgcaatcagtttgggcaacgagaccggtcctcctcagctcccaatgttcatataaacacaattgagcctgtgaatatcgatgatttgattagagaccaggggtttcgtggtgatggagggtcaaccacaggcttgtccgccaccccgcctgcctcattacctggctcactcactaacgtgaaagccttacagaaatctccaggtcctcagcgggaaaggaagtcatcttcttcctcatcctcggaggacagaagtcggatgaaaacacttggtagaagagattcaagtgatgactgggagattcctgatggacagattacagtgggacagagaattggatctgggtcatttggaactgtctacaagggaaagtggcatggtgatgtggcagtgaaaatgttgaatgtgacagcacccacacctcaacagctacaggccttcaaaaatgaagtaggagtgctcaggaaaactcgacatgtgaatatcctccttttcatgggctattctacaaagccacaactggcaattgttacacagtggtgtgagggctccagcttatatcaccatctccacatcattgagaccaaatttgagatgatcaaacttatagatattgctcggcagactgcacagggcatggattacttacacgccaagtcaatcatccacagagacctcaagagtaatagtatccttcctgaaattgatatatttcttcatgaagacctcacggtaaaaataggtgactttggtctagccacagtgaaatctcggtggagtgggtcccatcagtttgaacagttgtctggatctattttgtggatggcaccagaagtaatcagaatgcaagataaaaacccgtatagctttcagtcagacgtgtatgcgtttgggattgttctgtacgaactgatgaccggccagctaccttattcaaacatcaacaacagggatcagataatttttatggtgggacgaggatacctatctccagatctcagtaaggtacggagtaactgtccaaaagccatgaagagattaatggcagagtgcctcaaaaagaaaagagacgagagaccactctttccccaaattctcgcctccattgagctgctggcccgctcattgccaaaaattcaccgcagtgcatcagaaccttccttgaatcgggctggtttccaaacagaagattttagtctgtatgcttgtgcttctccgaaaacacccatccaagcagggggatatggagaatttgcagccttcaagtag

SEQ ID NO: 1483 - DNA, 96595 bp, Homo sapiens
tgccaccacagccctgctcccactgagaagtctcctgcttataaattttaaaggcagttttagccacatcttctcttcaacatttcaaaaatctttgggcctggtctcatccaaaacaatccactgcacttatgtccaaaatgtattatataacatgaaatgtaaaacgataaaatagtcaatcttctccttaaagtaacagggctcctcctggcttctgaatttcctaacctccaacttcttctattattttagtcactaataacttttcctagagagtgaatgattgtcctgtacaaaatcaggcatgacatgtttatattcatgaaaacaaattcttttttttttttttgagatagagtcttgctctgtcgcccaggctacagtgcagtggcccgatctcagctcactgcaaactctgcctcccaggttcaagccattctcctgcctcagtctcccgagtagctgggactacaggtgccaaccacacccagctaattttttgtatttttagtagagatggggtttcaccatgttggccaggatggtctcaaactcttaacctacactgatcctcccatctcggcctcccaaagtgctgggattacagacttgagccaccacacccagcctatatttatgaagagaaattcttatatgaaaagtgccatctacaaaaccacactaattctgaataatgtaagagagatacatatatatatatatatatatatatatatatatatatatatatatgcatctctgagtaattagaatatttgcctcccaagccattaggttactttaatgtataaaatatataaactgtgattgacatatatactagcaatctaaatcagatatagctataaaatgttaaattaatatttggcctatattatctaataatgagctattaaaagcataaggaaatgattaaggcagatgctgaaaccagaacttcaaacccaggagcaactgagatggccagagaagtatcaaagtaataaataaaagagttttaaaagggaaatattcatattttccttcagtagaggacacctaatgtggaaagatgtgaaagtgaagacatatacatttaccaaagtgctgttgaaaaacttctgaagtagctgaactcaattactgaaaatgattacagggattcaatgaaagagatttatgttatatctgcaacagagaataaaggatagaattagtatttgtctttaaataataaagttaaaaggtggtaactaactgagatttttaaaaattacaggttgaatagctgatgaagcagaaagtgggaattgtagagctcagcttgggacttgccagtttggcagtgtttgtgatatattcaggtgcagacatctagtaagtagttggatacaacaggttgaggccagggaaaacattattgtaaataaaaccaatggaatgggtaagagggtagaaggagttctgcaacagaccagatgtttgtgttcccccccaacaagttcatacgttaacgtcataacctccaatatcaggaggtaagggctttgggagggtcatgaggatgaagccctcatgaatgggattagtgaccttataaaaaggggccccagagagctctcatgtcctctttctgccacatgagaacacaacgagaagacagcagagtgtaacacagaagagggccctcaccagaacctggctatgcaggcaccaggatctcagactttagcctcaagaactctgagagatcatttctgttgttttaaagccacccagcctgtagtactttgccatagcagcctgaactgactgagacaagttctgtaagaaaagaaataggcaaagaatggagccccgtgttataccaacagttaaactgcagatggtcaaaactgaccccattaaggaaaccgagaaagaactggccttcaagaaaagaagcaggagtatgtagcatcatgacatctaaagcaacagatattttcaagaaaaaggaaacagccaaaagtatcaaatgcaaaaagaggagcaacacttcatattgtgaggcagaaaaggaggtaagaatgaacaaaaatgcatagaagtttatagttgtaatttgaagctacagagttcatatcttacagcctatattttctctgtggagtgggaagcaagatctcataaaaacatatctatacctaaggatcaaacacaagagcaaagcacagatttgaaaatcggcatcagagatattaaacacacaaaaacaggccaggcacagtggctcacgcctgtaatcccagcattttgggaggctgaagcaggctgatcacacggtcaggagttcaagaccagcctgaccaacatggtgaaaccccatctctactcaaaacatgaaaatcagccagacatggtggcgtgcgcctgtaatcccagctactcaggaggctgaggcaggagaattgcttgaacccgggaggcagaggttgcagtaagctgagatcgtgccactgcactccagccttggcgacagagggagactccgtctcaaaacaaaaacaaaaacaaaaaacacacacagaaagagaagttctggtatctgtaaaagtgggggtactattagatatgtactctttaacagtgtactgtatttaaagctctcctacagtaatgataaatgttaaaacaaacaaaaaaaatctaagactgtcattgttcagattatataaacagcctagcacagtagctggcacacagcacacagtagctatgcgataaatatttgttgaataattgaggaaataaaaaaatggaactaggggacaccataaaaatattttaagaagaaaccaggaaaggttttgctgtaaatgtttataattaaaaaagcgtattccatataaacacttagaataatatacctatatttaatatatgggaaaattcctacttgataggtagagatacattacaaggtcttattaaaacttgatcaaaacccataaaaaatgttgtcttggctgggcatggtggctcacacctgtaatcccagcactttgggaggctgaggcaggcggatcacctgaggtcgggagttcaagaccagcctgaccaacatggagaaaccccatcgctactaaaaatacaaaattagcctggtgtggtggtgcatgcctgtaatcccagctacttgggaggctgaggcaggagaatcgcttgaacctgggaggcagaggttgcagttagctgagatagcaccattgcactccagcctgggcaacaagagtgaaactccgtctcaaaaaaaaaaaaaatattgtcttgcagactcttattgtctatgaatcatgatgcaacacggtttaattccaaagtatcagaaaacaaaaagcatttacaaagtagatttatcaggaatagagtttaggcagataatgcaagaaaaaggtaacaatacaatagtaacagtaatagatacctaacacgttgttaattgtctgtaagaaacattcctttagaaactcaatacaacattttaataccataaatgtatattatttttatattacaaaagaaaaatttctttcagatttttttgagaaaatttcaaatatacagaaaacttaaaacatagtattacagggccagatgtagtggctcgtgcctataatcctagcacattaggaggctgaggcagggggattgcttgaggccaggagtttaagacaagctagggcaacacagtgaaagcctgtctctacaaaacattttacaaaatttaaaaaagaatagcattacaaacaattactatatccttcatctagattctccagtcgtttttcttccccaattgttaatatttatcacattttctttatttctctgtctctttttctgaactacttaaaaattgaagacatgatatttcatccctaaacactacttcctcataaaataaagaacattaattaaattaattaccattaactcaaaatgataacttggtatacagcccatatttaaatttccccaattgtcccaaaaatatccttgtagtttattttcttattcaggattcagttgtttcatgcattgtatctggttcttacatctccttaatctcttttaatctagaataatcccctctgcttgacttttttgttcctcataatactgaatttttaaagagttagagtgatttgtcttgtcccacattctggatttgactatttccttattatattcaggttaagcatctttttggcccaaatacctgcactacataggtgatgctttgcacaagcacttacgtaatgttcaactgtatccctgtttgtgatgctaaatttgttagcttgaggtgactgccacatctctccattttaaaggtagcatctccctttgtaattgataaggtctgtgtgatggtactatgaagccatgggactgtcctatacctcaaaaatctttcacccaataatacttttagcaactcttgatggttctgatctggagtagtttttatattggcggtcgcaaaatagtcatttttctaaatccgtcattcattttttctatagtaactagaattcatccttaaaagaaacttcacttcttacctttctttcaacacttttctttcacacgatctctttctctctctcattactatggacttacggatttaaaataattaaatatattgcaacccattcctgtcattattatttcttatctttctattgtcccattttggaccaatgggggtcttgtagttggctccttttgacatgacctagtagtctttaataaagtccttgctctcaagtataccaaggctcatcatatgcaagctcaatttataaatttcctgccccagatctggcatcagccatttctcaaaggagccctggttacttttagtggagaatggcatttcaaaatcaagatgcaggtaccaggtatacttattgttactcctaagcacccctttcaatgggcagagctaagaatacatgaatacacacacacacacacactcctatgttcatattgctacctcaaattcaaatacaacaccaaagcattcttcttcaatttcccttgttctatatttgtttctcactttttccacagtaaaaaccctgattcccaactttaacatatgtactcattcagttctattccacaataaacacaaaattgtttcagaattacaaaaccaatattgctatcaataacaaaccttctaaataaagttaaagatttacttgtagtttgttttgtccaaatttggttgcaagaaaccaaatttgcaaggaccaaatttggaacggtattcaatttataggtctatgttttaagaggaacactgaaaagagtatacagcaagaagagaaaatgctcgggagagaaaatgctaaagcaaacagtttccttcaaacacttaaaagcagttacacagaataagaaataggcttatcctgtgttcctctagaaggcaaaactcagaccagaatatagatgtcataaagaggaggatttcaattcaacttcagaaactgttagagttggatgtactatattagtaaggtccccatcattaaagtatttagacagagtctggaattccacaaaggggtttctgagcatttctcagtgggagagttgtgctgaatcagctctataattctattttctgttcgcacccaaatagcttctggaagcagccctccattaaacaatacaggaggtgttgttattcataataatgaccttgattcatatagaaaatattgaactatgatcagttatacatcattgaatctggttggcactgcagaagcttcctagaggctgcttgcttgttttccagtagttgatcatatcagtgtgggatcagacctggctgggcaggcctggctggctggtgggactctccagcatccattaaaatagaatgcaagattcgagatagaaatgctggtaggaaataaacttgtgtccggggaagaaagggtcagacctggcagtaaagctctgaatagtgtctcagtcatcaactgaagcaatgcttgagcagtacctctcacctagatttgttttccaacttcctgtgaatacatgaatgccttagggcgaaaggggattttgaagaaaacctaaaagagctgtgttgattaaaatgtctctaagactttagaatgcaagataatgctgctttgatgcccatatggcacattacaacacaaaagggaggtgttcagttttggctcagactacacaccagcttagctcattatgggctatgggctgcagggacactgttttgtgtagagggtttcagcacatcaacactgcctatggcagcactgggggtttgggggaggtgctcagaagacaggctgtgtccaatggcaaaggacttgtatctatttatgcatgcagtggaggcctcagaagctgaaaaaagaaggtaagggcttgttcattagcatactgtattagtccattttcacactgctgataaagacatacccgagactgggcaatttataaaagaggtttaattagacttacagttccacatggctgtggctggggaagcctcacaatcatggcagaaggcaaggaggagcaagtcaacgtattacacggatggtagcaggcaaagggagagtttgtgcagggaaactcccgtttttaaaaccatcagatcttgtgagactcattcactatcatgagaacagtgcagggaagatctactcccataattcaatcagctcccatggggtccctcccacaacacatgggaattcaagatgagatttgagtggggacacagccaaatactgagatgtgtcttggtgattactagtaataaagaggagagaaagttgactggtgtagaacgctttggaagaaggtttgtgtgcggctgcagatagccagtttattattttaaacatgacgtggtggttttaaaacatggctgtaaattctttgacacttcattgagaagtgggctcaatatcccctctccttgaatttgagcccgacttactgacttgctcataatataaaatgatgcagcagaagtcatgctgtgtggctttggaggctagatcataaaatgcaattcagctttaaccttgtttactgaaacactagcatttgaagccctgagctgcttcgtaagaagtctgactactctgaggcagccatgctaggaggaagctcaggccacatgaagagtagatttaggtattctggctgactgccctatctgaggtcccagcttcaaccaccagccatgtcagaaaatatgcctccaaaggatttcagtcttcaaccattgagacacccccaggcactgagtcttcccagctgaagccccagacatcatggagcagagataagccatctttgctatgccttgtctgaattctgactgagagggtaattttatatttttcaaagggtgaaagtataatgtttgatcctcacaatgatagtttggcaggttgggctagcattattataaccttcattttatagattaaaaaacaaaacaacaaacagggatttaagcttacctgctttgagattgtatagctaaggtgtggagtgctgacgctaaaatcctgatctttggactccaaagcttatgctttctctcgtttctcatctggatactgtaggactttagaatggcctaaggaagtaaaacaggatatatccagaattttaaggcaaggtcagaaaatgtcaaatgagtagaacgctaagaagaatcaatattaaatggatgagaccagtcatcctgtggagaaataatcatggaagatctgaactacagactgatactgacaaataaggctagaattcaaaatggaaccaatgtgaggataaaagcctttaaaacttttaatgttataaggaagtgttataatgatataacatttttagcagctaattttttaaaaatgaaataggacagttagagaattaacaaaaatcttgccagttgtgtttctgatgaaagggtgatgaaaggggaaaaggtgccatgactggctaatggtgctatttcagtctgcttctaagtatgtccttatagtaaagggtgcttcagattagtttagcttgatgacatcatcccttgtgatcatttactctacatttgccaagccactttttgatttaaatttatttcctcatagaaactttcctacttggaggagaatgtacaatgaagttaacaaagcataccatgttcatgtttttttttttttggagacagagtctggctctgttgcccaggctggagttcagtggtgcaatctcggctcactgcaacctctgcctcccaggttcaaatgattctcctgcctcaggctcctgagtagctgggattacaagtgtgcaccaccacaccaggctaattttttgtacttttaatagagatgaggtttcactacgttggccaggctggtctcaaactcctggcctcaggtgatccatccgcctcagactcccaaagtgttgggattacaggcgtgagccactgcgcccggcctacaatgttcatcttataggttatattttttcaatgcagaagaatgttagtattctcattcatcaagcagcctcacacagcatcctttacctgagagtaagcatcagctcccaggcttacggtgaccctaatcaatatgaagacaccctgtttcagaagtcagtaggacacctttctatttcttgaatcatccaaaatacagtaaggaggtcgctggtgacttcccccatgatgggaagtactaaaaggcagaatccacttagtttttcatgacttcatgtttaggttactttggtgattcactccaggccattgggagcccacagtaattgtttctcattcccgtttctctcttccttaaacttttcttttccaattatttattctttattagatccatgtatttttaataatgaattgaatttcattctgtaattgggcttctcaaagataattgacctcttctctcccaattgttttcatgcgtattttgcagagaatgcttggaatattctgttcatgaaaggcacaaagtacataaaatattttgagtgattttcttcaaaataaaaatgattagttttgatgcttcagatgtctagaatgctatgtgccttgtacaggccctacggcatggaaagtgctcaactgatatttgttaaatgaatgaatctggaaaacgaaaaatacacgaaatattttattcctcaacaatgaagaaaaagctttcagacttccatttagactcgttttaactggctgaattcttcaatgaaaagaaaacacgcgtcgcactgctaatttagctgttcctaaatatatttccatcaaattctgcttggctgtttcaaccttggggttgaagttcttattttgatgacacagagacgttcattgcagtggaaatagcaagtagtattggcttccccgccttcctccctctaggatttcaacttctcctcctcgaacaccagccctgctcttctagtaaatcccacattacagaacaggctgaggacggaggagacaagaggaaagtaggaaaccggagccatggaaacggcggagcggaggcaaagtgtgagagcgcgggtggttagaagggaaaaaaccctccccggacgacggcgcgaaggcgcgcctcagattacgtcacgcaccggggtgacgtcacgaccgtgacacgcgggtgacgccgttgccgcggcgacttctcgtcgtctccgcccccttcccccgctcccccccgcacccccgcctagcgtccttcccccaatcccctcaggctcggctgcgcccggggccgcgggccggtacctgaggtggcccaggcgccctccgcccgcggcgccgcccgggccgctcctccccgcgccccccgcgccccccgctcctccgcctccgcctccgcctccgcctcccccagctctccgcctcccttccccctccccgcccgacagcggccgctcgggccccggctctcggttataagatggcggcgctgagcggtggcggtggtggcggcgcggagccgggccaggctctgttcaacggggacatggagcccgaggccggcgccggcgccggcgccgcggcctcttcggctgcggaccctgccattccggaggaggtgagtgctggcgccaccctgccgccctcccgactccgggctcggcggctggctggtgtttattttggaaagaggcggcggtgggggcttgatgccctcagccaccttctcgggccagctccgcgggctgggaggtgggcatcgcccccgtgtccctctccgtcatgcagcgccttcctacgtaaacacacacaatggcccggggggtttccctggcccccaccccagatgtggggattggggcagcggtggttgagcgggaggctatcaatagggggcgaaactcagggttggtccgagaaggtcacgattggctgaagtatccagctctgcatctctgtggggtgggggcggcggcggcctcgacgtggaggatataggttagttgctggggctgagacaacagcccgagttactgtcgcgtgtaattcttacatggtcgtggggatgatggggctcatcatttcctctctcctctcccggactgccccccttctcagtccgctgccctttttcacttttctatttggggatttctcttcacctgttttacccagcaaattattttgatttagtctttactttttcaatcctaaatcgcagtttccgatgccttttctggtctctggtcctctgttcctaatgtttgtcagcgctctgtcgctgattggtaacccccattctattcccatctaccgcccgctcattttccagttgtcggacctgcctgccttctaaccccagctcccacttaagagcatttttgcacttctcttaccctggtcctcttgaggctctgtacttgatctcaccactccctaacattgttgtctgttgttatcttcacaaatcctcctggacactttggagctacttgttttctgagcccagaagctgtcaagattccatcaggtttcacttggctcttttcgcgcttgcactactggcactttttggctagtcgtccattgtgcattcacacctctttattcctacccatttttataggtctgattgatttcttagtgttgtcctcctttttgtcctatttttttccttttcctttttcctctccagtccttgcttctctcagcctgtttttgcattagtcagcctcttagcactgtgtcaaattatttacgtttttttattacataaaatttattacaaatatttggtattttattacagaaaataatactttattatgctttacaaataagatatggtataataattgtggtttacagttattgattaggtaatgtgacttactctgttgactttgctcgaagttctctttgctacttactattaacatctaatttctcaattctcataacatctcattctctctgcaattttttttttgcatcatcatctttggaaattcatccaatatgcttgctttattcagcatcagcttgtttatgataatgtttgttttctactctttatatcatctttgttacatgcccaaaatgtgttctgtaccatcatttgatctgttctaaaatttctcatttttaagtttcttaaaatcattccacttttcagtatgcatttttgcttagatcagtttcctctcatatctgttcctttcccccagcttcttgatttctaaggagaaagctcttctctacttcaatttcctagtttattctgtttcccttgtttccagttaccattcattttgccttgtttcctggcttttggtacttaactttctgaagcttcctcttttcttctccacacctccacgttccttcttatttataaacatctttgtttcctttgacatggaaatttatttttaggatacattgtttttaatggataaatactaggggtcacatctgctgtctgttttctccaggaatcggatatgcctttgtcttaaccaggcacaggtgcctctggattttattttactctgtaatagatgtgtagttttgttgaattgtatcttgtttgaagactactacagagtggaacaatgagtgaagtaataagtaggggttatgaaattgtaattctctgattataaaattgtttatcttgggaactttgctgcagagttattagaaccgtttgcaattctgtaaagaaggcttttgtgaagtaaaatctctacccttctattttatttgaaagggccagattgtttggaactgtaccccctgaagagtctgatttagtaagtgagagcgagggccatggatttctgtatttggcacatgtcttgagcagttcccatgtaccaatccttgagaacctctaggctagctgaatttaagtataaattgccagtaattggaaagcatattcatatcttctgaaactataaggatactctcattttacttggttaaaaaacaagtgtttcctactgtcctctttacccaggttttaatgtttagtggtgaacagtagttttccctctacatttttttctgaactgataataaatgtatttggctgggagggtgacattgattaaaaaatgtatctcttgaatgtaaatatcagtattacagatgataaaataaattcctccaagaaataattttaaatttgaagttgatattcagtggaaactgaaatgtgctgtggtcttttatttgaagtcttccttacattcacttaaagggatcttttactgcaaattacatggaaagaatgaaaaggtttgcttgtgtgtaatgacacattttattctgaagatttattttacctaacagtaaaatgtaggttttttttttttaaataaaagtttcccagagggaaatttcatctaaaaaaaaagtctgatttcaaagggaaagcaagtcattatcaaaaattagaaaactataagtacaaaaagtaaaaaatcatcagtaattttgccactaagatattattactatagacattttggtgtattccatctgttcttttttaatgcttttataacactatgtagttttgtattttaaaaaacttaaagcaaaaatttctacgtattattagacatactgtgatttatttaactaatcatttttttggggtgttaggttgtttttaattttttactgccatcaaacatcttgaacataggatgtagattttagtctttaaaatatgttggggaatgaacaaatttcacatcctgtatttgtagtattaatactttgtaggtgctcaaaatagaatattctggtaaatgattagtgcttattaaatatttatcaaatgaatgtacttgtacttttggcattaaacattaacatctgaccatttatatttacctgattttttttctatggccatatggtatgaaatagtgtatggtataaattaaccatatggtataataaatacatttttttaagtgtgataccagagtgatatttattaactgttcttcctgtgctgtttctgtagaagggagcttctcacaattgcattagaattacaattttattatgttctgttttcaagatctctgatcgtcagtcttaaactgtttaattataataatgtattgactagggaatattctgggatataatctcctttataatgaggtccactgtattaaaatacatctttgcaagccacaccaggttggattgcatcataaccctgaaaagtggtattctcattaatgcaggtgcttgtgcagttttggctattgctgttaatacttatacagatatattcacaggtgcccttgtggcaaaaatcataaaatagttgtttgtctttggtatttctagtgttcactttctatattcttttctctctccttatttactgaactcccttctttaggcatccactcactcctttttctgtttagaatattatctgtcagtcattttatatgttggccattaaaggaataaactgtcagtaaacagctaagaaaggaatgttggactgggtgcttgaatccttgaatgtagtaaatgtgagtgcaaacttgatttaattgtacatgtatttggataataggccagaaaaattacattagggtaacaggctagaacagtctgacttttcttgtttttctatcccttgctttcttgattagaatgaataggaggtgggtctggatatagcagctggaaacctgtgttccatgagtgatggggaagagagggagggaataggttcctctgatttttggcattttctaagacctgatgcccaccttgtcagagaatgcgatgactacttttgtgttcttccttttccctttttctcccaattataaaattgttttctctttcagaactgcagaagtgcattttgtttctttgacactttgatgttgttaatttagctgaatacctagtgaacattttgtgtcataatccccttgttttatgaaatccagtatggtctagtcaccttacatttctgcctcatattgtccttaagcctttttttgtcagtagctcttactagattttgtcttcatcagaagttaaagtgttttaagtcctttactcattctgtttctctattttaacttacattggttattctgtaaagtcagatgtggcagtagggctggtcgtggtggctcacacctgtagtcccagctacttgggaagctgagatgggagcatcacttgagccctgaagttcgaggctgcagtgagccatgatcgcaccactgcactctagcctggcaacagagtgagaccctgcctcaaaacaaacaaacaaacaaacaaaaaaaaaacaaaaaaacttgcttgtagaacttctgaattcaaaataggtgggcctatttgggagcttttctgtttttaaggtgtcaagtactgctttttaaaatcataaggttatggataacttcatgttagtgtaagaagaaaaatatagcctcatttgttccatttctttcttaaattttttgttttcattgccatgtttttatttttcgatttcaatttttccagcctaaatcactaacatacttaattagcatggtaatcagaagatactctttaatacagtctccaccctaacattaagcaattatttttcccccctaccctctgagattatttttgtgtccatgttttctcttgggcttaaaaaaaaaaactattattctaattccttcctgtatcaagactatgcatatagagggaactcaatgcccagtaacttctttttctgggccctggtgatgtagaatataaaaattgctttgaactcaattaactttatatcttctggaagctctgtaacatcggataaagcgtcgttttcattcttgtaatgtagctgcagttcctgacagcacgtttgggacaaatgtactgtgggacggtggttttcaaagtacgccagagctctaggagaatttttcgaaaacattctatcattgtaaataataattttttttttttttttttttgagacggagtctcgctctgtctcgcagactggagtgcagtggcgcgatctcagctcactgcaagctctgcctcccgggttcacgcctttctgcctttctcctgcctcagcctccccagtagctgggactacaggcgcctgccaccacgcccagctaattttttgtatttttagtagagacggggtttcaccgtgttggccaggatggtctcaatctcctgacctcgtgatctgcccgcctcagcctcccaaagtgctgggattacaggcgtgagccaccacacctggccagaataaaaattccaaattgcactaatgcatatgtgaaactgtttttgtctgttttgtagttttaaaatcttcatctataatagtacctggcacataggtactaaaatatttggtgaaagaattagtgaataaaaccttactggatatgaggtgatctgattttctgtaacattctattctttttttctgccggtcacaaaatcaccttatgaaattgacagccaaattggctgcaacaggcagtttgaaaaacactgttttggggtttcaaggaccttcttcagaggttaccccagggctctgtttagtgcctctataccaggggcccccaacccctgggccacagcctcgtatctaccagtccgtgacctgttaggaacctgactacaccgcaggaggtgagtggcaggcaagtgagcattaccgccaaagctccacctcctgtcagatcagcggcaggagcgtgaaccctatcagaaactgtgcatgtgagggatctagattgtgtgcttcttgtgagaatctaatgcctgatgatctgaggtggaacaatttcatcctgaaaccccctctacccctgtccatggaaaaattgtcttccatgaaattggtcactggtcccaaaaaggttggggagtgctgccctataccataactattgaagttcttcatttatctgctttacatgttagtttccttgaaaaaagggttttatggctgtaaaaattttagagctactatgtatggaagagaggtttgtgctggcataaatcttctcaggtatcatctgtgtagaaaatttcaacaacttgtgtcttaaggcagaggtcagcaatcttaagggtcagatggcaaatattttaggcattgtgggacatacagttcctctcacaattcctcaacaatactgtagtagctcagaagtagctaatagacaatatttaaacaaatgagtttgactctgttccagtagtcattttcaggacactgaaatttgaatttcatatcattttcatgtgtcatgaaaatcttcttttgattttttttctaccacttaaacatgtaaaaagtattcttagcttgtgagctatacaaaagcagatagtgggccagttcatgggctgaactgttctgactcctggtctaagggagactatatatgttatatttgaggttctcaaagtaagatgtaggttagaggtctatagaaagttcataattgcttttgtaaaaactagattgatttatttgagagggagagagaggtggagtttcactgtattgcccaggctggacttgaactctgggctcaagcaatcttccagcctcagcctcccaagtagctaggactacaggcatgcaccaagcccagctcctagttcctctttgcactcagtttcatcttctaccctcagcccctggcaaacactggtctgatctctgtgccctttccagaaagtcatataaatggagtcatataaaagtcatatcagtggggccgggcatggtggctcacacctgtaatttcagcactttgggaggctgaggagggcagatcacctgaggtcaggagtttgagactggcctggccaacatggtgaaaccccctctctactaaaaatacaaaaattagccgagcatggtggtgggcacctgcaatcccagctacctgggaggctgaggcaggagaaacacttgaacccgggagagggaggttgtagtgagccgagatcgcgtcattgcactccagcaattgtgaagcagtggttaaggttcattcattattttacatatggatgtccagttgtttcacatttatcaaatttcttttgaatcaccttggcacttttattgaaatcaattgcttatgtttgtgagttttggattctactgttttattgatctgtgtgtgttttcttaggctaataccccactaccttagttatgatagctttatagttaaatttaaaatcaggtaggtccagttgagaagatttttagaactttgactttttaatttcttgttaccatacttttggaaggagaagactcataattttattcaggttttcaaaggtgtcttctacccccaaatacttaagacttcagtatatagttaatatatctctgtcttgaattatgtggtggtgaggttcatgaaaagtgacaggtaaaagttgcaaccaaaattaatttccttataagaaaggacatattttagtaggttgcacagaaaagtcaatcacgtcctttttaccgtgttgcattatgaggtgtaatcaaaatgtgtataggggaaaatgaatatgttaagatgtttattcaccaaaaaaagtcaccgaaagtgtcaattaggttgtgaaagatactagtttacaatgtgttattctccatcttcattagaagagttcttccatttgaaacctatgtcatgttctgtgatatttcagagttagtatctttatgaatcttaggggcatcattaaatcattatgtttcttctaaggaaaggcatatggtagtagttggtcatatttctacctttttcagtggggcctatagggcccctttactttgttttaaactgcactgatagctttttactggttagcccagggaattatccctacagtgtaaaatgatgtttctcatcatgattttcatttaataatttaaaaacaaaataacaggaaacacatgtttctagagaggaagtgtggaatacctgactagtagagggtcaggtgacaattgcgaaggtagaaactgactaagttttgaccatgttgcaaggagtatcgttccagttttgttgggtcaccttgcagagtttttaaaaaaaatccttgggttttttttgtttgtttgtttgtttgttttggtagagatgctgtgttgctcaggctagtctcgaaatcctgggctcaagcagtccttcccagagtgctgggattacaggcatgagccaccgcacccagcatcaccttgccgattttgaaactacacttccagggagagagtaatacaatatcttggcagactatttttaactattgttccaaaattaatctgtttttaaaaagtaaagaagtgtggatatctttaaaagatactttaattaggcatgcaccaagcccagctcctagttcctctttgcactcagtttcatcttctaccctcagcccctggcaaacactggtctgatctctgtgccctttccagaaagtcaataagtggagtcatataaaagtcatatcagtggggccgggcatggtggctcatgcctgtaatcccagcactttgggaggccaggatgggtggatcacctgaggtcaggagttcgagaccaacctgaccaacatggagacactccgtctctactaaaaatgcaaaaaattagccgggcatggtggcgcatgtctgtaatcccagctacttgggaggctgaggcaggagaattgcttgaacctgggaggcggaggttgcagtgagccgatattgcgccattgcactccagcctgggcaacaagagtgagggaaactccgtgtcaaaaaaaaaaaaaaagatactttaattatatttaagttggggaatacttttgttttatattttttcttgcactaaatatgtaacctttaagttaataacaccagaaaatttttactttatagttttagaactgcttaattgaaataaaatgttaggatactttgaattagtcacttattttggcatattttaaacagtttaatgtactgcttggggttgtttctcaattgacttgatatttttaaactgtattttttaccttgtaccatttattttgcaaaataaatttctattttggcttatagatgtatttttaatattaaaggggattattggtgtcagccataaaattgtaattaagtcttaagtaggtatggtttttttttttttttttttttggagacggagtctcgctctatcatccatgctggagtgcagtggtgtgatctcggctcattgcaacctccgcccccccccccccccgggttcaagtgattctcctgcctcagcctccagagtagctggcactacaggcgcatgccaccatgcccggctaatttttttgtatttttggtagagatgggatttcaccatgttagctaggatggtctcgatctcctgacctcatgatccgtccgcctcagcctcccaaagtgctgggattacaggcatgagccaccgtgcctggctgattatttttatagagctcttgttagcgtaatttctggtaatgttttatggaggtgacttaattcccatcataaaaatatcccatcttttctgtgactagcaagcagttattgcctttataacttttttttaccataaaaagataaagtactattgataattactcctaattaactcagaacttttttgttttacacacattaatatatacttccatgggaatagtgtcagagaacatcaaatagggaagagattatgattcagagtggtctttatattcctattctagagccacagaaaatgttcatctccctttagtttttgcaggattgcctctaacactgatgatattccactcatattcttcctgcacatgccttctcatactaacagtaagtcacacaatctcaaataagtttcattatacatgagaactcagttgaatgcttgcctttcactggcatctcttgatcctcctccccctccttatggtatgcactgaacttctagtaggccatatgtgttaagtagatcataggagtgctatgaaaataaagtgaaatgatgaatatgtaaaagccttcacaaaattatagtagtgttttctgttgatttttaagacaaaagataaatactatgtatgtaaaaatttcctttcagaaatctttgttcttttttttgttttgaatgttcaatatgcttagcacagggctctagttaacacttttggcagttcttaatgtgggactgactgatgattgtcctagaactgtttcagtgttaactacattctattaatgttactttaaaacattatttaattaaagaaacatgaagtggcaacatactgattcatgtgttcagtaagcaattcatgggaaagaggtaagctttcttaataacagtagaaagactgttccatttataggaaaactggtaattatgacttgtgttttggtatttaaaagctgtggttggccgggcgcagtggctcacgcctgtaatcccagcactttgaaaggccctggcgggtggatcatgaggtcaggagattgagaccatcctggccaacatggtgaaaccccgtctctactaaatatacaaaaaattagctgggcctggtggcatgtgcctgtaatcccagctactctggaggctgaggcaagagaatcgcttcaatcagggagtcggaggttgcagtgagccaagatcgcgccactgcactccagcctggctacagagcgagactctgtctcacaaaaaaaaaaaaaaaaaaaaaaaaaaaaaagctgtgattaacatttgctttgtcattcatccaaaactacattggtgacttttgtattgagtcatttcttagggcaacaggtattcatgtattcagtaaatatttgagtgcctactatatgccaggtagtgatctaggtgcttagtagtacacttgaaaacaaaacaaaggtctctacccttatgtagctgctgtccagtggaggggtgtgtgtgtattgggggatggggctgagaaaccttagacatacagaaaggaaattatgtagtatgttcaaaggtaataagtgctgtggagcaatgaaagttaaacagtttagggctgggatgggggtaggtagcaatttaaatagggaggtcagggtaggcctcacttgagaagggggtatttgaacaaaaatttgagaaaggaggaggaggcatttcagataaaccaattagttcaaagattctgtgtcgggaatgtgccttgcctatttaagaaacagcaggaggccaaagttgctggggcaaggtagagactaggggattagggaaggatctctttcagttatctaggccatattggtgatagcagaaatactgagaagtagtcagattttggatgttttgaaagtagattcatcggggcttggtggctcacgcctgtaatcccagcactttgggaggccgaggcgggcagatcacccgaggtgaggagttcgagaccagcctgaccaacatggtgaaaccctgtctctactaaaaatacaaaaattaggtgaaatattgaaggagatgttttgattgaagtgattttaagagagaagaggaggggaagtaaagatggtgaggaattatcctgtaaaggggaacagagaaatggggccagagctagtgaggaaagtggggtcaataaatttttaatgataagaaaaagaagagcgtatgatgataggaatgagccattagagagtaaaacgtttcaggagggagagagaagaattgctgaagcactgtcttagaagaggtaagagggaaagggatttagtgtataaataggaaggattggctttctataggagcatctatactttatgataataggccattaagcagagtatgtggttagaaatgctgctaggaaggtcgacgtgattggtggagtctgtacacgttctgttgcagttgctttggtttttttcagtgaagtaagacttgaggttatcagccgagaatgaggattggggatatgtgaaagtagctccgcagcagtatgggagcataaatgaactggagacaaatagtaaaattaatgggcaattttttttcctttaagagatgggggtctcactctgctacccaggctggggtgcagtggcacagtcatagctcactgcagcctccaactcctgggctcaagtgattttctcacctcagcttcccgagtagccaggactataggctaatggcaatattaagttattttatgagttgtctagacagcattatgagtctcctaactttttggtactgatcttcagatcagagttaaatgtaacttgcccaggcaatttaaacactcaatatgagtcattttcatttggactcaaacatggaatcattgggaaatagaacatgaatttattactccttaatgaagtacctgccactatcctgccatgaatgtaggctaaatttggagtggtctggtaactgcttttcttttaaaaaaattttcttcatcttttctgtatcaaatacttactggtttttctatgtagaataacataatctcatcattactttctttcaaacactctccaaatttgacttgtctttgctcatgtttttcctaccacctgaaatacagatttcctcccccatcccaccctccaaaccttccagacttacctcacctaccgtttattgtaggaagcttttcttaacctctttccaagtcctagtttgatgcctctgctttgtgcttttgtagaatcccagagtttaccttgttttactcactatatcgtattgtggggtttttttgttaataggtatttctttttcctctagacctgcactgttcagtcatactttctgtgatgatggaaatgttcagtgtcgtcttaatatggtagacagtagccgtatctatgtggctactgtgcacttcaaatttgcatagcaggactgaggaactaaattttatttcattttaattaatttaaaaataactagcctgatggctagtggctgctttaatcagtgcagttctagaccccttcaaagtcaagagtgtgtgggattcatacttattctctcgttgcttaacaataatactgtctaatacttaaatgactgaattctttttcggtactcttagtctgcatagttataactcacctagaatatggcagttttgttctctagatttctgtctttaaccatggcttttcagtttgttttcaagattatgttgatttacacagcactgagttcttcagtcctgcgaagttagcgttttggttggatgtggtggctggcatctgtaatcccagcaatatgggaggctgaggcgggacgactgcttgaagccaggactttgagatcagcctgggcaacatagcgagcccctgtctctacaaaaaattagctgagtgtggtggcatccacatgtagtcccagctacttgggaggctgagggcgggaggattgcttgaacccagttcacggctgcagtgagctatgatcacaccactgcactcctgcctgggtgacagagcaggagtcaccctctcaaaaaaaaagtgtattttttcccctttaggactgaaaaaattgggtgttacaagattacctcaaggactggtctgagaactggggatggtaaggaagaaactcaagtggccagcctctggtttgtgggggtaggtgggcaatttctgtttcaaccaaagcagttctacttcataaattaatatattggaattgtgcttgggatttcatttggaggggaaaaaagtcttctaaacaataacactgttaattgaagagacaaagcatgcatatggcagcacgtgattaaccaccaaagtggataacagatcaagaagacatgggaagttgttatgggctagtgaggtcttgatggaagttaaggtttaatttaggtaggtagaaggaagacaaaaggatgtaataggcagtgggaatagaatttgcaaagaattggagttggaaatacatatgttagttttggttaagaaacaatgagctgattatagttgagcaaattgtatgaaataaaatttgacaaaattagatgggactggattgtaggaaaaagtgataggctgacaaaaagtgcactttatattgcatgcaatgagatgaaatactcggaggtattttggttgttacaaagatggaggaagaggacactattagcatttaatgagaaaggatcagggaagtcagccatcccacaatgttcaggacagtttgcacatttaagaattgttccaaatcaccacatgacctagaatgacttgctggactttgatgatgtaggttaaaaaaaaaaagtgatcataatgatgtgagcatagacagtaactccattttgtgtatgaggcacttttttgttgttgttgttgttgttgttgttgttgttgttgttttgagacggagtttcgctcttgttgcccaggctgaaatgcagtggcaccatctaggctcactgtaactgaggcacctttaatatacactaagattttcaggaattcagttaccacaatattggaggaatgttaaagtttttgttcagaactttatcaggagtactccacccctttagaaaatcacgtaattgatggcagtgtcacttgtgctgtattggtgacgcaaatactcttcagtctgcagttgtaactgccacagtcacagtgcttgttgtatatatgtacaaagtaccatcagtgtgttatttattatagtaatagcctaaatattataaaattgcactaaggtagattatctctgaattacatttattttttatttttatttttgtgacggagttttgctcttattgcccagggtggagtacaatggcgtgctcaccaaaaccttcgcctcccgggttcaagcgattctcctgcctcagcctcccaagtagctgggattacaggcatgtgccaccatgcccggctaattttgtatttttattagagacgggggttttccatgttggtcaggcttgtcttgaactcccgacctcaggtgatctgcccgcctcggcctcccaaagtgctgggattacaggcatgaaccactgtgcccagcctctgaattacatttaagggtagtatagagaatgtacaaaatagttgttgtaaaaaggagaaattgatttctgttttcagtattggaagactgggttattcagatgaaaacaattaaaattcttggaaacagtattaaaaaaaaaaaaaaaaaaagaaaacgtagagcagttgcagagctgaaaagatagtggggagctgccaggccaaattctaggaataaacaagaatccaaataaataagtggatgaagtagcttttgccctaaaggcagttgccaatctgtacaagttgggctttggttttggtggaccattggggtgaagaggacagaaatcaagtcctagagttcatctaaagtgacagtcaaaaagaataacctcagttttagatgggaccccagtgactctatcgttaggttaagggtgaaacaactgaactgtctacacactcccatatccatgtgattgcagggaaggttgaatggagcaggaggaggaaaaggaaattaagaaaaataaacctttcaagttgtgaccacagttttagccttcacagtgatttgccttgagggtttgctctgtctgggtggtccagggaccctccatgataaatgaccctccagccatttatcatggttactggtttcagactagtattacttccatggcctggcagatggaaaggcaaatcacgtgtggagaaaggcctttcattctagggaattgcttccagtaatttttcaaggacaatgaacagtacattgtcacaagtaatcaaacatagtaaaaataaaaaaattagcaagcaaaattacctgagagatatataatatgtaatatatatgtagaattctttcagcaatgtaattaaaatttgtgtgggtttctttatgtatatatacctaaaattacgtttttacagaggaaaaataataaccaagcatgcatccaattggcactgtgaataagaagagagcagaaacagatctataaaatcttcaaatgttgcaaatatcagatggatttaaaacaatcactgttaaatttaaagaattggagacaaacttgaagaacaaaagactcttataaagtgacttagggccaggcacggtggctcacgcctgtaatcccagcactttgggaggccaaggcaggcggatcacctgaggtcaggagttcaagaccagcctggccaacatggtgaaactttgtctctactaaaaatacaaagattagccacgtgtggtgaggtgcacctgtaatcccagctgctcaggaggctgaggtgggagaatcacttgaacctgggaggtggagattgtagtgagccgagatggcaccactgcactccagcctggcctataagagtgaaactgtgtctcaaaaaaaaaaaaaagttactttggttcatgcctgtaatcccaatactttgggagactgaggtgggagggtcacttgaggccaggaatttgggacccgcttgagcccaggagtttgaggctgcagtgatgtatgattgtgccacactgcactccagcctaggcaacagaatgagaaactgtctcaaataaaggaaaaaaaatggctgggcacggtggcttatgcctgtaatcccagcactttgggaggctgaggccgacagatcacgaggtcaggagattgagaccatcctggctaacacagtgaaaccccacctctactaaaagtacaaaaaattagctgggcatggtggcaggcacctgtagtcccagctattcgggaggctgaggcaggagaatggcgtgaaactgggaggtggagcttgcagtgagctgagatcgcaccactgcactccagcctgggtggcagtgcaagactctgtctcaaaaaagaaaagggggggaaaaacccaacttaatagatttgcaaaaaaccaaatagaaattccagaagtgaacactttaccaaatatacctaagagattatgcctagctgaagaaagagttcattgcctgggagacaaggcagaagaaactgtttagagtgtagcacagaataaaaaagaaaatattgaagagaggtaaagagacatggaagacagaataagatctaatttctttaatcagagctctggaaagagaggagaaagaatggtacagaagtaatatttcaaaagatatttctggctgaaaattttatagatccaatgagaaaccagttgattgatttaagaaggttaatgaatttctagcaatataaatagaaatctacacccagacaaatcataggaaaactgcataaacccagatacaaggagaaaagtcttgaaagtagccagagagaaaaaaagatgtttttcaaagaagcaactatggactgatggttgacttttcaatagaaaattacatatattctcaaaataactgccaatctagaattctgtaattagcaaagaattatccctctacaatgagggtaaaatacttagttgaacaaactccatcagctctttctaaaggaaattatgaagtatacattaatacttaaggcagaaagattctagataaaagtctgaggtgcaaaatggaataaagagcaaagagagtggcaaatatgtggatgtattaaaagaaacgttgactgtataaagtactagtaagaccttaattaaaatatgtgacaagaagctgggcatggtactttgagaggctgaggcgggcagattgcctgagcccaggaatttgagaccagcctgggcaacatagtgaaatcccgtctctacaaataatataaaaattagctgggtgtggtggtgcatgcccatagccccagctactcaggtggctgaggtgagaggatcgcttgagcccaggaggttgaggctgcagtgatccttggtcgtgccactgcacaccagcctgggcaacagactgagaccctgtctcaaaaaaaatatatgacaggcgaaggccgggttctaagacctttgtattgtcagagagaaaggtagaaagtattaattgacttgaccttgataaattatatgttttaatttctttttttttttttttttttttgagacggagtctcgctctgttgcccaggctggagtgcagtggcgggatctcggctcactgcaagctccgcctcccgggttcacgccattctcctgcctcagcctcccaagtagctgggactacaggcgcccgccactacgcccggctaattttttgtatttttagtagagacggggtttcaccgttttagccgggatggtctcgatctcctgacctcgtgatccgcccgcctcggcctcccaaagtgctgggattacaggcgtgagccaccgcgcccggcctatgttttaatttctaagttatcttctaaaaatgtagaaaccagacttttaacttctcaaccaacagaagataacaaatgattaataaaaattaatcctgaagaagtgaagaaaagaaagaaccagtaggacaagtagcacaaagatgggtagatttaaatctaaacatatcaccagctacattaaatacaaaatggattaaattattcagttaaaagccaaagattgttacactgaatttccaaaaaaattcagttatatggggtttataaggaacatatctgaaacctaagaataaagaagatcaaaagtaatcatcacaataagacataccatgcatattctagcagacagtatggtacagttaatatcaaaggtggacagtaaggcagaaagcattattggcagaagagtcacctcaaatgataaaatgaccaattcactgtgaagatttaatagccttagtaatatagtataacctgaaatatagctttagaatatttatagcaaaagttaaacaaaactacaagaaatagacagatttctcagtcttaatggggtatttttaaacagctctttaagtaactggtataagaagcagacaggttagttaggatataaaatatttgtataacacaatgaacaagtttaacccagtgggtgtatagaacccattctacccaacagtggcaggctacacattcttttcaagcatgtaggattttggggggaaaattgactgagtaataatgttgtaaaacaagtttcaacaaatttcaaaggattgaaaccaaaaaagcatttttttctgtccattttcattaaagatctctatcaatagggtaatttttaaagcttcatgttagaaattgagcaactattaatacttggaaataatctggtcaggcgcagtggctcacacctgtaatcccagcactttgggaggccgaggcaggcggatcacgagggctggagttcgagaccagcctggccaacatggtgaaaccccgtctctactaaaaatataaaaattagctgggcgtggtggtgcatgcctgtagtcccagctacttgggaggctgagacagaagaattgcttgaacccaggaggcagaggttgcagtgagccgagatcgtgccattgcactccagtctgagagagcgagactccctctaaaaaaaataataatccatgcatcaaagaagaaatcacaatggaagttagaaaataccttgaactagatgattaaaaatttttgattgatcaaattccacaacttgatatatcttagaccattgaaagtgagagaatcaaatgttatgtctttagatacgaagtttcttgacacccctccctgcctcccccaaaaaagaaatacctaccacctatgaaagattcttgattggaaaaaaaaaaaataactgagctggagtttcattaaacttctagatctactgggaaattcacagtcatttgatctttcaatgagtcataattgttttgctgtggatggtcttgcctcgatgttgatggctgctggttcatccctggtggttactgaaggataggatggctatgccagtttcttaagacaacagtgaggtttgcgacatcagttgacttcttttcacaaaagatttctctgtaccaggcgatgctttctggtagcatttgaaccacagtagaactgcttttaaaattagagtcagtcctctcagatctgccagtgcttcatcaactaattctatgtaatattctaaatcctttgctgtcattttaacagtgtttgctcacagcatcttcagcaagagtagagttcatgtcaagaaaccactttttttactcatccataagaagtaacttcccatttgttcaaatttcatcatgatattgtagcaattcagtcacatctttaggttccactcctaaatgtagttcttctgctgcttctactacacctacagttccttcctccattgaagttttgaactcaaagtcatccatgagggttagaatcaacttcttccaaactcctgttaatgttgccagttttacctcctcccatgaattacaaatgttctttatggcatcgagaaaggtgaattctttgcagaaggctttcaattaatgttgcccagatccatcagagtaataacgatatctatggcggctatagcccaatgaaaggtacttcttaaataaggaatgttgaaagtcacaattacttcttgatccatgggttgcaagatttatgtgttagcaggtgagaaaacgttcatcttcttgtagctctccatcagagctcttgggtgaccaggcacattgtcaatgagtagtaatgtgttagaaggaatctttttttctgagcggtgggtctcaacagtgggcttaaaatattcagcaaactatgttgtaaaagaatatgctgtcatccaggcttcattgttccatttacagagcacagacagtaaattttgcagaattccaaaggccctaggatttttggaatgataaatgagcattggcttcaacttaaagtcaccagctgcattagcctctaataagagtcatcgtgtcctaggccaggcgtggtggctcatgcctgtaatcccagcactttgggaggccgaggtgggcggatcacctgaggccgggagttcaagaccagcctggccaacatggagaaaccctgtctctactaaaaaaatacaaaattagccaggcatggtggcacatgcctgtaatcccaggtactcaggaggctgaggcaggagaatcgcttgaacccgggaggcagaggttgcggtgagccgagatcatgccattgtactccagcctaggcaaaaagagcgaaactccatctcaaaaaaaaaaaaaaaaaaaaagtcatcctgtcctttgaagctttgaagccaaccattgacttagggaaatgttgtggctggtttgatcttctatccagatcactaaaactttctttatatcagcaactaggttgttttgcttgcttgcttttcttaaactatttttcttttaattcttagagggtctcactgtgttggctaggctggtctcaaactcctggcctcaaagcaatcctcccaccttggcctctgaaaatgctgggattataggcatgagccgtagtgcccggcctgttttgctttcttatcattcatgtattcactggagtagtgcttgtagtttccttcaaaaactctgcctttgcatttacaatctggctgtttggtacaagaggcctgcctttcaacatgccttcttcactaagcttaatcatttctagcttttgatttcaagagagagacatgtgactcttggtttcacttgaacacttagaagtcattgtagggtttttaattggcctaatttcaatattgaaatctcagggaataggaggcccaagaaggggttagggcagtagctggtcagtggagcagtgagaacacacacaacatttactgaagaagttcactgccttatatgggtgtggttcgtggcaccccaaaagaattacaatagtaacatcgaagatcatagaacactaaaatagacagcataataatgcagaagtttgaaatactatgagaattactgaaatgtgacagagacatgaagtgagcatatgctgttggaaaaatggtgccaacagatttgctcgatgctgggttgccaccaaccttcagtttgtaaaaaacaaacaaaaaccattatccgctaagagcagtaaagcaaagcacaatatgatgaagcatgcctgtacagtttatacttcacagtcattggttaaatttactcattcctttaagcataaaaaataaatatttagcacctttgtgctgagttgtatgctaggcactgggatatagaaatgaatgatagtttgtcttcaaggagcttacagttaagtggtagaagtagataaataaagaattaaggacagtgtactgtgatgaaagtgtgccccagatgcagaagaatcacagaaaaggagcacaattcaatatgcttttaggggatggaagacagatttcctaggaaaggagatacttaaactgaattttaaatacttcagatatacaaaatctttataaagaagagtaattaaaccttatttagagacagaccacctaaataaatggtacataccctgtactgagtgtggattggaagactgagtatgttaaaaatgttagtatttctcaaattgatagtggatttattgaaatccaaatgcaaattcctgtaggtttttctatggaacctaacaacctgattcaacaatttctgtggaagctttaaagaggcaagaatagccaaaatatactttaaaaacaataaggtaggaagacttctttaattcctttttccactcggcaaatttttaatgctctatggtaggcactgctcatcctggttattacctttgtgaatgtgagatctggctcccacccaaagctcacattcagatccacttgtagtggtatctagggttttgaatagaacacttcctgaaatacaggttaagtactgggactaccaacaaacaaacttacaacactaattttattatctcatatttgtatttacaatttttcttgatcatattttttcatacaaactttaattagtttctattaatttcttttaacataggaagcttagaaatagacacactttgcttataatagatctttaatattatgtcagttggactatggctttgttagaaaaggagaggagaatctactgctgagtgctgtccaaagagcagttacccaactgagcagagagggaggatgaccttgagggtctcacaggcatgggtttttaggcccagcctgtggagcgtctgagggacttataaaaggaaaagggacccaggtgcagtggctcatggctgtaatctcagcactttgggaggccaaggcggttggatcacttgaggccaggagttcgagaccagcctggccaacatggtgaaaccccgtctctactaaaaataccaaaattagctggctgtgatggtgcacgcctgtaatcccaggtactcgggaggttgaggcccaagaatcacttgaatccgggaggtgaaggttgtggtgagctgagattgtgccattgcattctagcctgggcaacagagcaagactcagtcttaaaaacaaacaaacaagcaaacagaaaacaacagaaagaggagatgaataacaaaatggcaggtaatactaaataatatggatgaattttatattcttacatatgggtaggtggagggacacctgctcttgtggcagattagttgggaaaggatacacttgctggaacaatgcctaccatattaaataaatgaagctagacttccccatctgttatgcataaaaatcaatttcttgtaggttaaagattcaatacaaaaggggaaaccctgaaagcttttagaaaaataaagggacattatttaaggcagagaagaatttcttaagactcaaaaaactagccataaaaaatggacaaatttgactacattgaaaatagaaacttttttcattaagccccattaagacactcaaaaggcaaggcaaggaatagaagatacttataacacacactattagttatctattgttgtgtaattaccgaagacttagcagtttgaaataacatttctctcacagttctgtgggtcaggaaactgagagtggcttaattggatgtttctggcttagggccttgaggctgtaatcagtcaatggctgcagtcatttgaaggcttgactgctttgtgctccctcatgtggatgtagcaggcctcagagctggctttctagaagggagtaagagaaaacacccaagatggaaaccacagtattttagtcttggaagtggcaccccatcacttctgccatattctttttgttagaagcaaggcaataactccagcttacattcaaggggagtttgtacaaggcaccaccaggagggtgaggatcattgggagccagtttagaggctacctactacaacatgtaaagaatgaactggtatgaaaaatatacataaaaaattcctatagatttctaagacaaagacagaacaccaaattggaaaaagggcaaaaaatcctgagcaggcatttgaattaaaaaaaaatttaaatgattaataaacatatgaaatgacccttaatctagttaacaattagggaaatagaaattaaaaccacaatgagagaccatttcatatagattggcagaaatgaaaaaatctgacaatattaaatgttggtgaggctatgaagcagtctgaactgtcttccactgatggatgggaatgtaaattggggggaaaaatcctttggaaaataataggatatcctataaccagcaataccactcactcttaggcgtttgccctagactaatggttcttgagtatgcatcaaagtcatctggagggcttgttaaacccagctgttggggctacccttagagtttctgattaagtaggaattgggtggagcctgatagtttgctttgcatttttaacaagttcctgccgggagtgggctgaggggtgggggggtgggatgttggtgctgcttgtccaggaatcatactttgagagtcagccattgctttagacatagagaaatgtgtgaatatatgaagtaggaagcatatatataagattgctcataacagtattattcatattaaccccaagatagaaaaaaagttcaagtatcctcagtagtgcagtagatatcattgtgtgtttacttatggaacaaaaaactagttcaaatagctaaggaaaaaaaccacactacaaacagctcctgcctgcatcaatatgtatgaatctcacaaatacattagtcataccttagaaccaagtcacaaaagattaagtgcaacatgattctattcgtaaacagtttaaaaacaaatgcagttaactgtattgtttaggaatacaaatataggtactagaattataagtagagatactagaattataagaaaaatcaagggaataatgatgataaaagtgagtgatagtgactacctcagggaggagagaaagtggatgtgattaaggacaaatgggagacttttaagataattggcaatgctatttcttaccttgggttgtggggtttgctttacagttatgctttaatggaacgatgttttgcaaacttctctacatagctttataataaagggaaaatttatctcatttaattttcatctctgattactagtgaggttgagtatgttttcatatgttagcctttgggttttttcttaaattgtttatagacatgccatttgtagattatgctatttgtttttagaacttatttttaggtattctgttatggatagtcttctttatccatcatatgtcaaatatttccttctagtccttttttatttgtatttttatttatttttatttcttttttaagaggcaggcctcccactctattgaggcctaggctatggatagtcttctttatccatcatgtcaaatatttccttctagtccttttttatttgtatttttatttatttatttttttaagaggcaagcctcccactcttttgagacccaggctggagtgcagtagtgtgatcatagctcactgcagcctcctgggctcaagcagtcttctagcctcagcctaagtaactgggacaaatgcacaccactgtgcccaactaatttgaaaaagaaaaaatttgtagagatggagtcttgctgtgttgcccaggctggtctcgactcctggcttcaagtgattctcccaccttggcctcccaaagtgctgggattacagacgtgagacactgttcctgccctagcctttccttataaagacatatgttgttgttactgtttatgtggtcagatttagcagtcttttcatttatttatttattttgattttgattttgatttttttaagaaatctttcctggctgggcgcggtggctcacacctgtcatcccagcactttgggaggccaaggtgagcagatcatgaggtcaagagattgagaccatcctggcatggatgaaacatggtgaaaccccatctctactaaaaatacaaaaattagctggacgtggtggtgtgtgcctgtagtcccagatactcgatagcctgaggcaggagaattgcttgaacccgggaggcagaggttgcatgagctgagattgtgccactgcactccagcctggcgacagagcaagactctgtctcaaaaaaaaaaaaaaaaaaaaagaaaaaagaaatctttcctatccagagttaaaagcatattctctatattgtcttctgataaattgaaaattttaaaaattttgtttaggtatttaagcagtctagtatttgttatatgaagatgtcttgggggatgttattttcccaacaccatttgtacatatgtgcacagtctttttctcacttatttgtaaagcaacctctcatttctaccagattcccatggaccgatttctgggctacttcttaacctgtttgtctataacctgtttgtccacattactactttatatctttggttttggtaatgccagtctcttctctttgtttatttgcggcaaacatatgctcattcactcttccacgtgaccattagaagaattagattgtcaatgtcctctaagtctaggtatttggttaaaaaaaaaaaaaaagaattaggttgtcaaattctgtaaaaagtactattgggattttcattgtgattgcattaagtttatatgttaatgtagggacatatatattagagatttattatgatactgagttttccaattcatgaacatggtttttatcttcatttgtttataggtctcttccccccccacccctttttttttttttttttttgagatggagtctcgctctgtcacccaggctggagcacagtggcacaatcttggcttattgcagtctctgcctcccatgttcaagcagttctcctctcagccttccgagtagctgggactataggtgcacaccaccatgcccggcttatttttgtattttcagtagagacggagtttcaccatattggtcaggctggtctcgaactcctgacctcaggtgatccacctgcctcggcctcccaaagtgctgggattacagacgtgagccaccgcgcctgggccatgtgtttctatttttagtagagacaggatttcaccatgttggccaggctggtctcaaactcttgacctcaggtgatccacccgcctcagcctcccaacgtgttgggattacaggtgtgagccactactcccagctctgtttttttttccttaaaaggtttatagttttctacataatgttttcatccttttggatgtggaggattggtattatttgcgagaatctttttgtgctgttgtgaatgagatgtttagaaaaaaatatatttttttactggatattcatatacagaagaatgaaactagacccccacctctcaccctatacaaaaatcaactcaaaatggatcaaagacctacctgtaagacccaaaactacaaggtgaaaccacagtgtggtatcatctggccccaggtaggatggctgctataaaactgtagaagacttgggaaatgcaaatcaaaaccacagtgaggtattgtctcatcccagttagggtggctgttataaaaaagacaaaaaattaaaaatgctggtgaagatacagaggaaagagaactcttggacgctcttggtgggaatgtaaactagtacagacactgtatcagtatggaggttcctgtgatctagcaatcccactactggccgtttacccaaaggaagggaagtcagtacgtcgaagagacatttgcatccccatgtttactgcagcacactattcacagtagccaagatatggaatcagttcaacaacagaagattgggtaaagacaatgtggttgtatagcatccgatggaatgctattcagccgtaaaaaggaaaaatcctgtcatttgcagcaacatgattggaactggaggacatcacgttaagtgaaataagccagcaaaagaaagttaaaccctgcatgttctcactcttatgtggaagctaaaaagagttgatttcatagaagtaaaaagtataacagaggatactcgggctgggaatagtaggggtagagtggaagctctggggagatttattcatggatacaaaattacagctagataggaggaataagttctagtgttctgtagtagtatagggtgactatagttaataatatatagtttcatatagctaggaggaggatattgaatattcccaacacaaagaaatgacgaatgtttctcctgtctttagtgagaatgcttctgttatgcttggtgacttacagactttttatagataccctatatgaagtttaagaatgtttcttccatttctagtttgctgacagttgggcatttttaaaaatcctaaatggttgttgaattttgttagatttttttcgtacatttattgaggtgatcatgtttttttcctacattgatctatttaggtaagtaattgtattggtagacttcctagttttgagtaagcaactcttgtgtcactggatacattttattgtatattcttttaattgattgttgaattaggtttgcctaattcaggtttttatttagggattttacgactgtgtttacaagtgagctcagtctatacctctctgagctgttccatggttttggtatcaagagctgattcgttttctagagttttctgtgattttggccagtttttatatcagaccaaagaaaatgtttctcgaaagtaagttcattaggctttaagtaaccactgggcccattctttgactttcaacttttctgagtgagttttagatgtggatgttatatacagcatttgttcagggctttggtttgtgagctgagtttctttttttatttttttaatagatgagcttatctcatttatattttgttgataaggcagttcttccacattattaattatatttttctttgggggctttgtctcttatgggtatgtgtgtgtttcccatctaatagtttttgatgattttttataaatcttattctcttactaccttcatagatttaatatctgtaagcctccatttcttgatttgtgaaaataatcaggactattttaactccttgctaataaaggtaagaaaatcagtacacttatacctccctttccccagctaccattaaaaaaatttttttccatctcttcatatgagatataaaccttgtcattgaaaaaaatgcatttattttttactttatccttaagtctcagagttacatgtttgaatgggattaatattcacctttaattctttaaaaccatgacttcttgatttctaattctgttttatttatcttttcatcagcttgattttcctatcaagtagttctgttttttctgccaagaatggcttccttttttcttcttcagccatttctttctgtttccaccgtggccttcatttctgaagtggtctttttattaccttccatttctttcttgaaccctgctaactcacttttcatttcctatttcttttttttgagacagggtctgggtctctcactcaggctggagtgcagtgttgtgatcttggctcactgcaacctctgcctcctgggctcaagccatcctcccatctcggcctctcaattagctgggactacagacatgtgctaccacacctggctaattttttgcatttttttgtagaggcagggtttcatcatgttgaccaggctggtctcaaattcgccttggcctcccaaagtgctgggattacaggagtgagccactgcctcctgcctcatctcccatttcatctgttcttcaattttgttttttcagtcatttttttcccctaaaatgcatttgatagtgatagatggggatatatcagagacttcttttgtttccttgactaacttctggtgtttatctgtctttgcctattatgtttcttctctcatcccccactccctgttttattggtggtgtggcgggtggggttgttaacgtttctcctcatagaccctttgctggattgtttctttttattactcatccttgttgtctttgagtagagtacttctatttgagcctgctctttgcttaagaatgttatggggggctgggcacagtggctcacacctgtaatcacagcactttgggaggccgaggtgggcagatcacgaggtcaagagatcgagaccatcctggctaacatggtgaaaccccgtctccactgaaaatacaaaaaattagccaggcatggtggcgggcgcctgtagccctagctactcaggaggctgaggcaggagaatggtgtgaaccctgggggcagagcttgcagtgagctgagatcgcgccactgcactccagcctgggtgacagagcaagactctgtctcaaaaaaaaaaaaaaagaatgttatggggaacagcagggagaataagcctaagcaggcataacttttttctcagacatcttgtctcagaaagctcgttcaccaaatctgttgtgttctctaccctgggaatacatcactcctccatttttaatgtcttttttccccttcctgccattttgggccaagccaatcattcagtcaggatgaagactccatccaggcaggagatgggtgaggctgatagtgaagttggacatcaaatagattcctgttcgatgatttgatttttaatttgttctgctcagctgcctttagcttttaaccttttatatcttatgttcaatagttattctcacaaaggaactggttcccaacataaatttaaaattaaaagtgatcagttctctcctctagcaaactgtaactgcttttattttatgtgacttgatctgatgtattgttttgttccctggatcatttaggggtggggaagtaaagacagggaggtctgtgtttcactttaaaaacaaaatctaaaccagataaaaactcgtaaaatgtcatatttcaggtcctctgtgatcttgccctttcctacctctctacccctgcccacgtctatcagccatccttgctgtgtactaaatgctctagcacagtatttcctaaagtttatattgtggatactgaatattcaaagtgttctcccaaagataggttccatagtttacaattttgggaaactttaaatgttcctccttgtctaacctgttgagtttctaagctcaaatgaggggggatactgtgttatctaaatcttatttgatttctgtattttacatattaagggattcatctaaaaagtatctgaattgatttggcaagcaggtgataccctgtactatattatatagctccccttttgggatttcataattggatattagcatagtaatggttgagaagaactgtagtaaagaagcttacctttgttgatttattttttttttttgacacagattctcgctctctcacccaggctggagtgcagtggcacaatctcggctcactgcaacctccacctcctgggctcaagcaattctgttacccttccaagtagttgggactacaggtgtgtgccaccacacctggctaattgtttttaaatatttttagtagagatggggtttcaccatgttggccaggctggtcttgaactcctgacctcaaatgatccacctgcctcggcctccgaaagtgctgggattacagcattagccactgcacctggccttacctttgtctaaattagaattgtataaacttccttgactatggaacattgcttgtgtgtagtatatgctaatattctttgaaacattttagggaaatgctgtttaataccaatcaaatccttgcattttttcagggttgtttcctgttgtttctggccctttgtcctagaatgctctcttccttcattttctccataccacccaattttttttttcaatggtttctgaggtgatacttaccctgctgggaggcatttggaaatattttgattgtcatgcctggaggatgctatttgggatttaatgccctcaaatcgaggaacacaatgcactaaaagtcctacacagcaaagaattgccccacccaaaatgccacttctacagtggccctccatatctgcaagttctgcatcctaggattcacccaactgcagatcaaaagtattaggaaaacagtaaaaagtaatacaataatacaaatacaagataatacagtataacaactatttatataacatttacattatattagtcattataagtaatctaaagatgatttaaagtatatggaaagtaagttatatgcaaataccctccctttttatataagagacttccgcatccaaggatcatggtgttgtagggtagagtcctggaaccaatcccttgtggatatggaggaatgactgtatactcctttggagaacactgaactcagcaacttttactcatcctttagaatttagttctggttatcttttccaaaagctttctctaagtacttttgttttcccctctaccccacaccctctcattttctctgcgtggtactctcagagtattttaggcacatcttgattatttgaagtaaccactttgtagtataggagcctataactgtatacctctactgtactgtgagttcaaatctttgagggcaaagacattttgtatccttggtatatgatatataattagtcttttaaaaagtgcatgttacatgaatacattaataaataagttgtacttttactttaaatcagaattgtggtatgactcttaaactgttgcttagactgcattaataatcttgtgcaattgtggaaaataatctcattttactctcataatagaaaattaaaatatgcttccttttgctcagatatgggtgacagctgttagagtagtgttttatttgggttttgaccttgcctgtacatcagaagcacctggagaacttcagaaggtacagatgcctggggccctgcaccagaggttctggtttttgagggtgaggccttggtatctggatttttaaaagcttccaaggtgatttttaatctgaagttaagattgaaaagtcatttagtgagacactgatatgtagcattttgggaagtcagtaaacttaagagtgagaagttactaaatcattgaagaacagtgaaaggagtagggagttttagcttagaaaaaaaaaatctagatggagtatgtgagttctctgagggctataggaatttgtccgtcttgctcaccactgtatcctcaactcctagcatgagcctgagcacatacagggatttggtagatatttattggctgacagaagaatatgtatcattaggtgtttaaaagatagtcattgtagaaccacagagattatccccaaaaaagttttatagtaataatgtgccacttaattttatgattaaaaataatgaactggatatttaattcatttatcatttcagtttattatttactttgtgccagtcactgaggattccatttgattctctggtcaaatctatgaagtttgtatcattcaaataatagggctgtgtcaagaaactgacacttgggggttaagtaatttgcctaaggttacaaagctaagtgacaagagctggaattcttaaagtctgtactcttaactgctatgccttaccataagtcttcaccacaaccctaagagttagatatggtttagaaaggttatgcagcttgcctaagggcacattgcttgagtggaagatttgggacttggacccagacattgtgacactagagtccatgctgttaactgccatgctattggaacccccaaccccctcgcttcctattgtataatgtacaaccatctgttttcatgagattattaaccacagtggacagcttgtgttgctctccttataccttttggcatcctcactgacttttgactgatgggttgaatttggattattgtcttgaatctccttagtaccctgggctgtggtagtcctagaaaataaaacatttctttactaggttctttttcttcatttctttttccttttagttaggattttaaattagaattttaataaacttgcttgcattaatacactgatatctgttagcttctgttattttaagtcggtagtctccagacttaaaaattttgttctctatcataaaaaaaatttgagcacattacccctagtagatatctgttttatttatgctatatgtgtactactgaagaaaatggtaatattttaaaaaatatgaacttgttagcatgaatttttttaaagctaagctaaaaatgaagtgagtttaaaattatgaagggtttttgctgatgtttcaagtttagctaatgtttcaagttacaacataccattaggccaaggttcgttattataatagtgtgtacaaattcatattttaagtagcctggataatttttttaaaatagctagtttcttgtcagaaattaagtaacctggataattttttaaaagccagtttcttgtcagagattattagattagggtttctcaacattggcgctgttgatgttttgaaatggatgtaattcttgcttgtagggttatgatctgcagttgagtgaatcctacgatgtagaacttgcagatatggagggccactgtaaaagtggcattttgggtggggcaataatactatgtattgtaggatgtttagcagcttccgtggcctctgctcacaagatgccagtagtacccccaagtagaaacatcaaaaatgccgggagacatttccaaatgtcttgaggggcaaaattgcttctggttaaggaccactagattagaattttttttttttttaagacggagttttgcttttgttgcccaggctatagtgcaatggcgcaatctcggcccactgcaacctccacctcccagattcaagcgattctcttgccacagcctcctgagtagctaggattacaggtgcccgccaccgcacccttctaattttgtacttttagtagagacagggtttctccacgttggtcaggctggtctcgaactcccaacctcaggtgatctgcccgcctcagcttccagagtgctggtattacaggtgtgagccactgcacccgcgctagatcattgtttttatcctgtattatggatgacaagcagcttgtagtagagtagggaaagtgttaactttgattttttcccctctagcagcaataatgttttcttcagtatgaagtttgagatctgtttgtaggaattaattttaagtcacttgtccattctataaggtttagttaaaacttggtaacataatccatacgtttacttaaatcaatatatgtgagtcatagtatgtcacaatgagataaatgcaagaggagagccactgtcaagtgttctgcagtatggaatgcccagccttcagcagacctcttgactatatgtgtcacatctctgatactaaccctaagttagggtgcctgtgtaaatattaaatgctgaggccaggcacagtggcttacgcctgtgatcccagcactttggaaggccgaggtagacggatcacaaggtcaggagatcaagaccatcctgactaaacacagtgaaaccccgtctctattaaaaacgcaaaaaattagccaggcatggtggcatgtgcctgtagtcccagctacttgggaggctgaggcaggagaatcacttgaacccaggaggttgcagtgagctgaaatcatgccactgcactctagcctggatgacaaagcgagactctgtctcaaaaaaaaaaaaaaaattaaacgagcatggtggcatgcatctgtagtcccagctacttgggtggccaaggtgggaggattgcttgaacccaaaagtttgagcctgcggtgagctgtgatcacactactgcactccagcctgggcacagagtgaaaccctacatctcaaaaaataaatattaaatgctgactttttctaagtttctagatgaacacattaactaaataatgtagcctacctatatccccaaaaaagagtcttcctatgggccctcaggtgtatgtgcatacctattttgtaaaccacttgtttgaccatcacattgtaacttattgttcaatttgtgtcactgcagccatattacccaaaagggaaaagtaattttagctctctgaactgacctccacctaaccaactcatcaggttaactgatgttctccatttcaaaaaatatttgcggtcagattaggtgtgaatcatatttaaaggaagattgttggtcctatatcaaagattagagaatgaatgttcattttacagttttaagttaaaatgtttaaggacagtgtttaccattgcacatgattccctgatttaactgaccttttcagttaactagccactagacataattacattgactataggggcttcttttgtgccacaccagtgttggaattgtgttgatttacttgtggagttggaactacagtttctctcagcagcctgcttatctggttgtttaaacttgtagctgaattattatacaaagttttcaaactttctgttttggaatggtcagttactcaaaactgtggcttcctccttgctaccttacagggtagttgtgagagtattcctcaacaatagttcagactctcattacttcttgtctataattgtagcatgcttttaatgggattccctgcctccagtacctctctggcttgttggttaacataaacattattgccagattaaacatcctaaagtataatgtgtaatcagatcaaaagccatttataacaataaaaactacattaaaaaattacttatgtcctgggcttagatgtggtctctgcaatcagatgttcattaaacaaattatttaaaaaatacatacatacacacacacgcaaattctgaattgtgatatgtgccaaaagaaaaaatggggggtgatgtgagagctcagtgaggatcaaatatagattgggaagaagggtgatgaggaaagacttctttgagaaagtgagatttaaactatctgaagaagctgtgcttagtttagaaaagtgctaggcaaagagtgttccaggaagaaggaatagcatgtgtgaaggctctgctctgctgctgaaattgtggttcagtttattgagtatggcatagaatgaatagtgcctgatgaggcaggaggtaggctgggatgagatcttttcagatcttgcactctgtactaggaagtttaggttgtattctgagttactggggagccattaaagggtttaaggaaggggagtgttgtgaatcagttatgtgttttgcagattctactctgactacagaatggatgagagcagaatgggagttagagcaaaagaaatgaggaaaccagttagaatgcctttgtaagtagtaggtcagagagaaaggatgataattttgactagagtcatgacagtaaacaaggtaacacatgaagtgattatgtcataaactattaccattaccctgtgaaggaagtatgagcagaataagatttagaataaacttattccaagcccatctaataaagggtggtgtgaggaactgaaacaatgggtgtttcaggacattcggtccttgtctctaaaataaaatccaaactctgttgaagatttttcagcctactcttattatctttgtcttctcctaaactcttactcacctatgctataatcataccaaactattacagtgagtatcatgaacatttcctgtaccttgatgccactgatgattgtttactatggctggaatactcttactcccacatacacttaacaaaaccctactcattgtttaggatccagatcaaatatgaatgaagccttccaaatttgcctccagattgatattgcccatttatcttcttttaaccatagtagttcatattactatcacattatagtatattattcaacagatgtctatgtaattgattatgtgccaggtactatgtgtagacattatggatatatccacatacaaaaatagacacagttgccgcatttgtggaaactacattgtaacacagaccttgaacaaaatctgggcacaaatatgtaactaaatgttaataagaggtatgaaggaatacctgcaggtttctgaaaccctaataaggcccttgaggtcaaaattattttcataatcctactaagatactatttgccttttcattctcgttcttgtgagtatgtagtagttataggatgtatgatattccaacaaattgaatacagaaggtgggagaatccagatatcttttgttaaggcagacattaaagaaattggcaaaaaaaaaatttttttttttaaagccactttggggccaggtgcggtggctcacacctgtaatcccagcactctgggagtctgaggtgggcagatcacttgaggtcaggagttcaagaccagcctggccaacatgatgaaacctcgtctttaccaaaaatatggtagctgggtgtggtagcacatgcctgtaatccgtccctgtaatcggaaggctgagaggcgggagaatcgcttgaacctgggaggccaaggttgaagtgagctgagatcgtgccattgcactccagcctgggcgacaagagcaagactgtgtctcaaaataaatgaataaataaacaaacaaataaataaataaataaaaatgaataagacactttgccctctcattgttttttgttgttttggaaaatgtggttatttttttcattaaaaaatagatcacttttgttaattagtttttttgtcattttaaaatgaattttaaacatttcttggttataatttttaatgtggtaaatactgatagcgataaactacatagataaaagctttctagggtcctccataatttttaagagtataaaggggccaagtgtggtggctaacacctgtaatcccaacactttgggaggccaatgcaggaagatccaacatagcaagaccctatctctacaaaaaaatttaaaaattagccagacgtgatggtgtgtgcctgtagtcctagttacttgggaggctgaggtgagaggatcacttgagcccagagtttgagattgtggggagctgtggtcatgcactacattcctgcctgggctacagagtgagaccctatctcaaaaaaaaaaattatatttttatacacacacacacacacacacacacacacacacacacacacacatatcttatatatatataagagatcctgaaaccaaaatcagagtccctgtaatggggagctgatttaaattgggggcttctggagaagtaaaagatatcttatgtctctgttaaacacttatgttcttctagaaattaggagtgtggttttctccgtatttccaaaaactgcaagtctttttatataacgagtgtgttggttgaatctaattttaaaaaaaatttttttaatttaaaaattttttaatttttaaaaatatggagtgcttcatgaatttgcatgccattcttaggcaagggccatgcctatcttctctgtattattccaattttagtatatgtgctgctgaagcaagcaccaaattttgttatcaaagtctactgtagatggccgttctttctttgatttgtggtttggttgaaacctttgttggaaataccatcttatttcttattactgtaggaaatagatctggattcaaattcctcttggtatgaagctgggaagattacttaacctgctaaaccttaccattatttatctgtaacatggaatacatattatcttactgtggtgtaatgatttaatgaactaatgtatgtgacctgattcataagtgaccagaacagagacaatccataaaatggtaattctttttattttatatacacagcacatacatactggggttagtttcagttagtgagcagagaggtctgtggataaatcaggatataacaatcatcattcaaggatatattcaccattcaaacagtttatcagaaggcagaaagccagaatgatctattgtgtatggttattcatctttagaaaaaggaacagaaagtgtgggcttagaatattttaaataagtagctctatgttacaatgtagatgatttagggatggggtagagttttatgtgtctggcactacagcagtgcctcacatttactaaatgtttgaataatattaattaactagagattcttgaaaacacatttttagaagccttgaaaaagttatatacgacagattaaaggccaagcctgagaaagcttacatggctaactggaaaaataaataaaggtaccatagaggaaaaacaaaattgccctgtggggagaacatgtggtgtcatatggtgtgactaaataggatccagtaagataagacaaggtagagcatcttgggagtgattccatgtttcaaggttaaaatgttaactacattaaaggtagtaaaccagtgaaagaatcctcaagatcccagtgcagaatgtttgccaagagataagaagatcaactgttttggtattcatagcagaaagccataggaaaattatctttttgatattcttttttgaagaagataggtcctttatttatttatttatttatttatttatttatttactttattttattttattttttgagatggagtttcgctcttgttccccagctggagtgcagtggtgcaatcttggctcactgcagcctccgcctcccaggttcaagcaattcttctgcctcagcctcctgagtagctgggattgcaggcatgcaccaccatgcccagttaatttttatttttagtagagacggggtttcttctccatgttggtcaggttggtctccaactcctgacctcaggtgatccacccgcctcggcctcccaaagtgctggcattacaagcgtgagtcaccgcgcccagccaaagataggtccttttttaagacagatacttagggctgggtgctgtggctcatgcctgtaatcccagcactttgggaggccgaggcaggtagatcacctaaggtctggtgttcaagaccagcctgaccaatatggtgaaacccaatctctactaaaaatacaaaaattagctgggtgtggtggcgtgcgcctgtagtcccagctacttgggtggcaattcaaggagaattgcttgaacccccgggaggcagaggttgcagtgagccgagatcgtgcctctgccctccaacctgggtgacagagcaagactccatctcacaaaaaaaaaaaaaaaaaaaagatactttgataaagaaataatagttatttctcattttatttctcatttgagatgaactcaaagttggctaaagtgacacacagttttggacctataacttgcttacattttaaatattaggttggtgcaaaagtaattgtggtttttgccacccaatagaaaggattgtagacatttttttatttgacaactgtaaagcattgcaggaattatatgtggaattataggcttactttgttttattgtgtttcattttattgtactacacagataatgtggttttttttacaaattgaaggttggtggcagccttacatcaagcaagtctgttagcgccatttttccaacagcacatgctcactttgtgtctctgtgtcacattttagtaattcttgcaatatttcaaactttgtctgttttggtgttctgtgatcttgcatgttactattgtaattgttttggggtgccacaaaccacacccataataaggcagtgaacttaatcagtaaatattgtgtgtgatctaactgctccactgactggctgttcccccaactcttctccagcctccgcatgccctgagacacaacaatattgaagttaggccaattaataactctacaatggcctctaagtattcaagtgaaaccaagagtcacatgtctcttgaaatcaaaagctagaaatgattaagcttagtgaagaaggcatgtcaaaaagctatgccttttgtgccagacagctaggttgtgaatgtaaaggcaaaattttggaaggaaactacaagtgctactccagtgaatacacgaatgataagaaagcaaaacaggctcatgcctgtaatcccagcacttttaagaggccaaggtgggaggatcacttgaggctaggagttcgagaccagcctggccatcatagtgagacgtcgtctccattcatttttaaaaagcaggcaagcaaaacagcctaattgctgagatggagaaagttttagtgatctggatagaatatcaaaccagccacaacatttccttaagtcaatgacaggctttaaagcttcaaaggacaggctgactcttactagaggctaatgcagctggtgactttaagttgaagtcagtgctcatttatcattccaaaaatcctagggccctttggaattctgcaaaatttactctgtctgtgctctgtaaatggaacaatgaagcctggatgacagcacattcttttacagcatggtttactgaatattttaagcccactgttgagaccccctgctcagaagaaaaaaagatcccttccaacatattactaatcgttgataatatacctgatcacccaagagctctgatgatgtacaaggaagattaatgttctcttctgttttctatgtgtgtgtgctttttttgttttgagacagggtctcattcttgcccaggctggtgtgatcatagctctctgcagccttgaacccctgagctcaagcaatcctcctgcctcagctgcctgagtaggtgggactacaggcatgcaccaccatgcccagctaattttttttttttttttaatagagacagggtctatgtttcccaggctagtctcacaaactcctggtctcaagtgatcctcttgcctcagtaatgtttttcttaaccactaacgcagcattcattctgcagcccatggatcaaggagtaattttgactttcaattcttcttatttaagaagtatcttttattaggctatagctgccatagatattcctatgatggatctgggcaacattaattgaaaaccttctgcaaattattcacctttctagatgccattaagaatgtttgtgattcatgagaggaggtcaaaatagcaccattaacaggagtttggaagaagttcattctaatgcttgtggatgactttgaggggtcaaaacttcaatggaggaaggaattgcgggtgtggtagaaatagcaaaataactagaattagaagtggatcctgaagatgtgaccgaattgctacaatgtcatggtaaaacttgaagaaatgagaagttgcttcttatagatgagcaaagaaagtgattttttgagatggggtttactcctgctgaagatgctgtgaacactgataaaatgacagcaaaagatttagaattttacataaaattagttgatgaagcactggcagatttgagaggactgactccaagtttgaaagtagttctactgtggttcagatgctatcagaccatattgcctggttcagagaaatcttttgtgaaaaaaagtcagtcggcacagcagacttcattgttgtcttgttttaagaaattgccggccgggcacggtagcttacacctgtaatctcagcactttgggagaccaaggcaggcagatcacctgaggtcaggagatcaagaccagcctggacaacatggtgaaaccccatctctactaaaaatacaaaacttagcaagtcgtggtggcacgcacctgtaatcccagctacttgggaggctgaggcaggagaattgcttgaacccaggaggcagaggttgcagtgagccaaaatcacgccactgtactcccaccctgggcgacagagcaagactccatcttaaaaaaaaaaaaaagaaagaaattgccacagtcaccctaacctttagcaaccactgacttgatccggcagcagccatcaacactgaggcaagacccaccaacacaaaaatgatgactccttgaaggcccaggtaattgttagtggtttttaacactattttaaaattaagatatgtgctttttttttttttttttttagaataatgctattggacattactagactacattatagctacacttttttgttgttaatttaaaaattgtgggccgggctcagtggctcacgtctgtaatcccagcactttgggaggctgaggcaggcagatcacaaggtcaagagatcgaaaccatcctggccaacatggtgaaaccccatctctactaagaatacaaaaattagctgggcgtggtggtgcacgcctgtagtctcagctactcgggaggctgaggcaggagactcttttgaacccgggaggcagaggttgcagtgagcagagatcccgccattgtactccagcctggcaacagagcaaaaccctatctcaaaaataaaataaaataaattatggccaggcgtggtggctcatgcttgtaatcctggctctttgggaggccaaggcaggtggatcacttgaagtcaggagttcgagactagcctgaccaacatggtgaaaccacgtctctactaaaaatacaaaaaaaattagctgggcatggtggtgcatgcctgtaatcccaactgcttgggaggctaaggcaggagaatcgcttaaacctgggaggtggaggttgcagtgagctgagatttgcgccactgcactccagcctgggtgacagagcaagactccgtctcaaaggaaaaaaaaatggatacataatgattatatatatttctggggtacgtgtgatattttgatataggtatacagtgcgcaatgctgaagtcaaggtgattgggatacccatcaccttaaacatttatctttgtgctggaaacattacagttctcttctagctattttgaaatatatgataaattgttaactgtaatttccctactatactgtgaaatactagaacttactgtttctgtccagttgtatgtttgtatccattaaccaacttccctttatccctttctccctccttttcttcccagactctgataaccactactctactgtctacctccatgagatcctttatgtattctggatatagatcctaattaaattcatgacttgcagctattttcttgcattctgtaggtttttttcactttcttgagaatattcattgcacaaaaggttttaattttgttgaagaatgatttgtcagtttttttttgttgctcgtacttttggtgtcatatctaagaatccattgctaaatccaaggtcattaagatttacccctatgttttcttctgagagttttattattttagctcctatatcatttattcattttgagggtttttaaaatatggtgtgaggtaggggtggacatttattgctataaattgtcctttgagcattgcttttgctgtatgccatcagttttggtatgtgtgttttttttgttttcatttgtctaaaagtattttctaatttttcttgtgatttctttttttgaccttgtatctatattcaagagggatattggtgtataattttcttttttgtacagtcttttgtattagtgtaaaggtgatgctggaatcataaagtgagttggaaattacttactccttttctgtttcatggaaggtattttgtagaggtggtcttatgtcttctttaaatacctgatagaatttgctactagagatttatttttagaaaggtttttaactatgagtttaatttccttaatagttacaagagtgttcagattatctgttttatcttgtgaatataaaagatatcttcagatatcttttatcctgtgagagttttgtttttctttggtttttgaggaattggttcatttttttctaacattttgaatttatgtagagtttttcatagtattcttattaacctttaaatgtctgtgtgtaggggagtctgtagttcattgtttttttattactgatattgttaatttgtgtcttccctttttgtcagtcttgctagagatttgtaaattgtattggtcttttcaacaaacaagcttttgttttcaacatttttttctgttttcaatctcatggatttctgctttttattatttttgtgttgctttctttaggtttatttagttcttcaagtttcttaagatagatttgcaactgtttttctttgctgatataatagtatcagtttaagagcagggcttggtggcacatgcctgtaattccagctatttgggaggctgaggtggtagcatcacttgagcctaggagtttgaaactagattgcgcaacatgcaagacccacccccccccccatctcttaaaaaaactaaaaaaaaaataatggcacaagcttaatgatattaattcactgtagcactactgtatttgcatcccacagatttagtatgctgtattttcattcagttgaatattgaactagccttgtggtcctgggattaaccttattgtcatgtttattatgccttttacaattgctggattctgtatgctaatattttactaatgattatgaggaatattagtatgtaatttggggcttccatttgactcaaagattatttagaaatgtgctgtttaatttccaggtgtttggagattttcctattaactttctatttctagtttaattctattatggtcagagaacaaacgtttgtggtttttttttaagcttgtgaaagtttgtcttatgactcagaatatggtctgttttggtgagtgttccatgtgcatttgacaagaacatgtattcagctgttaagtagaatgttatataaatatcaatcagatcaggtggattgatgatgttcatttcttccatattcttactgattttctgtctactagttctattactgaaaggagtgctgaagtcatcaaatataattaagaatttgttttcctatttgtaatgttctgtaagtttttacttcatgttctttgaagctccattattaggtgcatatatattagttatgctttctattatgaaaattatatttgaagtgaattactcgtagactacatatagttgggtcattttaaaaattcattctaacaatcttgtcttttaatttgtatctatagactattcacatttaatgtaattttggcatgtttagatttaggtttaccagtttagtaatttgttttctgttagctgcttctgttttccattactctgtctttcctgcattcttttagattgtttgaacaacttttagccattctgttttaatttacctgttgtggcttaaaaattcttaactctccatatagttttagtgatcactccagagattacattataaaaacttaacattttcaccacctgctttaaaataaattcatttctttaaatggattatggtccacttaaagaaatgttaaaactacgtaggtctctttatcttctctccaccttttctcttattgttggctgtatgttacgtttctattaattgaaagcttcattgggcaatgctattgtttttactttcaaccattaaacatatttaaggaaactaagaggagagggttaatgtatttttgtctgcatgtttaccattttgcttactcctcaacctactcttccaggtttccttccggtattatttcccttctgtgtgaggaatttcttttagcaattcttttagaacaggtctgctggtagcaaattctcttagttcccatttatctgaaaatatctttgttttatgattgctctgaaagatactttaactggatatagaattctacctttgatagtttttttctctttcagcactttaaaatgtgtaacttccttctggccttcatggtttctgctgagaaacctgttgtcatttgaagtggtgttcccctatattttatggattgtttttctctgttttcaagataatttttaggctgggcgcagtggctcccacctgtaatcccagcactttggaaggccgaggcgggtggatcaccggaggtcgggagttcgagaccagcctggccaacatagtgaaaccctgtctgtactaaaagtacaaaaaacttagccaggcgtgttcgcgggcacctataatcccagcttctaggaaggctgaggcaggaaaatcgcttgagcccgggaggcggaggttgcattgagctgagatcacgccattgtactccagcctgggcgacagagcaagatgctatctcaaaaaataatagtaattttttgtgtttcattttcaacactttatgatgtgtgagagtgtggaattctacgtatttatccatttttggattcaccgacctttttgaatctgtagttttatgtcatttgtcagatttgggaaggcttttgacattatttcttcagatatttttaatcatcctattctttgcttttagaagttcactgacacagatgttagatctttttgttactgtcccatagatccctgatgtattactctattcttgaattgctataaagaaatgcctgagactaggtaatttataaagaacagagattcagttggctcatggttctgcggactgtacgggaaacatagcagattctgcttctggggaggcctcaggaaacttaaaatcatggtgaaaggtgtaaaggggaagcaggcatatctctcatggctggagcagaagcaagagatggggagggtgccacatacttttaaatgaccagatctcataaaaactcactatcacaatgacagcactaagggggatggtgttaagccatgggaaaccgcttccatgatccaattttctcccatcaggccccacctccaacattggggattacatttgaacatgagatttgggtggggacatagattcaaaccatatcacctggattctgttcattttattttaatccccacagctacatcaattggagacctggttctctccctgctctcagaatgttggctcttttgaagatcctattgttgccgctgccaccatggggttacgtgagaaaagtgaggggaaaaaactgagacactatctttgaatgttatttctttgcctttttttttttttttttttactttttttcttttaaaaagtaaactttttttaggccagtcgcggtggctcacgcctgtaatcccagcactttgggaggccaaggcgggcagatcacaaggtcaggagatcgaggccatcctggccaacgtgatgaaaccccgtctctactgaaaatacaaaaattagctggacatggtggcgcgtgcctgtaatcccagctacccgggaggctgaggcaggagaattgcttgaatcagggagttggaggttgcagtgagttgaggtcgcgccactgcactccagtctggcgacagtgagactccatttcaaaaaaaaaaaaaaaaaagtatgtaaaatgtaaactcactgatggtttcatgatgattcagatccttgtcctctatcccaatcgtctactgctatttacttccagtgttgtcgattagctgctctatgtgttctgtccaagttttatagttggactaaatctttgaagtgtgttcccaccacccccgtaatgtgtgactactaatatttctgctcaatttgttctttttcccctccttgtttttatttttattcttggcttcctaggggttgctcctgtctttccatagcttaatgtcaagctaaagatttgtcagaggttttgttcaaatatttcaaggccagtaaggtttctattctttctttgtgtgtctatctgtgtatcagggagtatattcaaacttcaggccaccatgttgcctgacctggcttttgctttcctccgggctcctctgtgtctcctgtgtgcatgaacatgcagaggctcagtcagtcaaggatgtgtggaggtgtgggccctgtccagaccctgtagcacgtgcttgcagtgtccgttcaactagtggagtgtggaaagtgtattaagcccccaacttgcagtggaggttatcacttaaattcacagcactccaaatcaattgtcaacaccctcacacacacacagtctctagctgaacacatgccaacagagggagagattggtcagtcatctgaagaagggatggcagcagcctcaagcaaaaatgccacagatggctgggcatggtggctcacgcctcttatttcagcactttgggaggccgaggcagatggatcacctgaggtctggagttcaagaccagcctggccaacatggtgaaaccctgtctgtactaaagatacaaaaatagctaggcatggtggtgcatgcctgtaattccagctacctggaaggctaggacaggagaatcgcttgaatctgggaggcagaggttgcagtgagccgagatcgtgccattgcactccagcctgggcgacgagcagaactctgtctcaaaaaaaaaaaaaaaaaaaaaaagccacagactgtgatgttcttactcaggttcagcctttagctgaagtccagagcactgaaatggttgttttgacggttttgtccagctttatagttgcttttgggggagaggatttatcaatgtactcatttcatcatgccagaagtagtagtattgatatgattttttatatatatcttagaattttgaagatactgttttcttattttctagcatacaacaatctgattcttgttttttattccttagaattttattggtactttcttatttccttttgagtttaacttagcaggatttgtttaattttgtatccctccaagcacccaggctggagtgcagtggtacaatcatggctcaccacagcctccacctcatgggctcaagtgattcttcctctttggcctcctgaatagctggaactacagacacatgccaccatacctggctaatttttatttttttttatttttggtagagatgaggtctcgctatgttgcccaggttggtctcaagctcctgagctcaagcagtcctcccacctcaacctcccaaagtgctgggcttacaggcataagccaccatgcccagctcttattctttctttgttaaaaaaggaactttggttctgaagactcttatttgccttttggctcaaggagaaattcttaaattttctttgttatttcttcttcttattttaattctcataaaatttctcttagatgtatgtaggataatttaatctgtattctgggatattaactttactctcataatttaagctttcattttacttcatattttttttttaactttttgttaaagtaccatggactttagctttgtccattttgctagttaactccttttttaggtttatttcaacagacattttaaatttcaagcttgttctgtgcaatttatttatttatttatttatttattttgagatggagtttcactcttgttgcccaggctggagtgcaatggtgcgatctcggctcactgcagcctccaccttccagattcaaatgattctcctgcttcagcctcccaagtagctgggactgcaggcatgtgacaccacaaccggctaattttgtacttttagtggaaacggggttcaccatgttggtcaggctagtctcgaactcctgacttcaagtgatccacctgccgcggcctcccaaagtgctaggattacaggcatgagccaccgtgtctggcctctgtgcaatttagtatttttgttttctttagtgagtgcagctcctccataatagcactatatacaatataattttctgtgctatgcagtatattagccagtagctgcagtggctgggaatgtggcctgtgagagtgagaaactaaattttatattttatttaatgttagtttatataaaattaaatagccatacatgtctaatgattactagattggacagcacagctctacaatttaagaatccttatactttttggcttcaaaataattctgatgccttagttcatctcctcattcaattgcatgtctgttttttatgctcttggttttttttaggtgtctaaaggttaataaaggttaaaaatattggaagttagagtaggtttcctcaacacttaagtgagtttcttctggagaaagtgaatattgaatataaaaatccattaatttctagttctactaagtgagctaggcagtccttgctttagagaatatgggtacttcttctcaatatgtgtatgtgtgtagcctctgtccctgtggtggccagaatttactataattctgtctctggccatagtgtccagacagaaatccctgtaagctgattacccttttccaccaggtttagatcagatacaaatatatgggggcaaagactgagttactctttttttttttttttttttttttgagacggagtcttgctctgtcccccaggctggagtagtggcgcgatctcggctcactgcaagctccgcctcccggattcacgccattctcccgcgtcaccctcccgagtacctggtactacaggcacgtgtcaccatgcccagccaatttttttttgtatttttttttgtatttttagtagagacagggcttcaccgtgttagccaggatggtctcgatctcctgaccttgtggtctgcccgcctcagcctcccaaagtgctgggattacgggcgtgagccaccgcgcccagccagactgagttactcttgaacatgtgatttgcatctaaaccaaatttgttaaaagtcttttttttttttttttttaagtaagaaaaggcagtgattttgatttgtaatgtcttttgttaggagaagtaaaagaaaaaaaattcttgaagaaaagtgagccagaattactgcctagggagtgatagtcatgtaggttcacaatgaagtttagaagtgctcttcgtggttccgtttcctcttttgctttagtgttcaggaaactaaaaactgacagtagactagttggaagatagactaggttttttttttttttttctagttaacctaagtcagaagggtgatatcactagagacttggaagtaaaaagagctacctgcaaagacttgaagtactaagattacctagaatctgaatgccctgtgttactctgcagatagggcattttactgttatgaagagataagatctattgtaaatagtctaaactaataataacgagtaagtatggaattggcgtttttcctttaaagttttagcatataattttgaaatgttttaagaatatttttgaaatgtttctattttttaatttctcttttagaagtcttatctaaaataagcatgtatatcttacatgtaaggaattattaacttcattttttcataaaaataatcagagtaagactttcaacagatgtcaggatagctgaagttctccatcactgtcatacgtttcacttatgacaggtttgtaatttctgttagggaatgtcatctaagtgctctgcatctggtattttctcctgcaccctcatgacaagaaaaaagcctttgattatttctcttttctctctatttacatgttcaccactgccttccatgttcagatgtgatctacatgcaatgatgattactctttccttcctttcccccttgccctcttttatcgtctttctttcttcctttttttggttgaccctgtttaaatgggatctatcaaatataccaagtttcagtgaaagttacttccttgtgttaaaagtcatgactttctcttttatttatacacttaataacttgattatatatacttgaattttgttttagtgcagaataattttataatctttctgaaggtattttaaagtggcagttaattccaacatttgtaataccaacaatgcagataactgagttgaatgacaacagcatgaatagccttgattaagttgtacatgtgcagatagctactgtgtatatcatgcctgccatctggacaacagtgatttttttttctttttttttttttgtttgagacagagtctcagtctgctgcccagactggagtgcagtggcgtgatttcggctcaccgcaacctctgtctcccaggttcaagtgattctcatgcctcagcctcctgagtagctggaattacgggtgtccgccaccatgcctggctattttttgtatttttagtagagacggggtttcgccatgttggccaggtaggtctcgaattcctgacctcaagtgatctgcctaccttggcctcccaaagtgctgggattgcagacatgagtcactgtgcctggtcagaaaacagtgatttttaagatgtcatcaattgtatggtagaatctgaattcaaagatgttaagaaggggatgggggaaaggtgtctcttagaacatgtaaaagaacatgttatttctgtcaacttccaaacttttatctccagccacatctcttacttgatttcagatttgtatacccagctcctgttttacatctccactctggttaatgtgcctcccgggatattttaaatataatttttaattctgcatcctatgccttgtcctcccaacctcagtgttccttcttcattctttttgatttttggctcttacatcctttgacttaggttataaactgtagagtcgaggatgactcccttttatcatacctcacatccaatttaccagcaaatcctattgactgtacctttataatatatttagcatctgacacatcttatcatctcttccactatcagtctgataaaagccaccatcatctttcacttggccatcatttcccatctggtttcttggcatttacactatagttcatttccagtatagcagccagagtaatactttaaaaatataattgatcatattgtttcctttttttcaaaagtaacttcattgagttcacctaccatacaaatcactcatttaaagtgtacagtgcggaggttttagtgtattcagtgtgcacaacaaccatcaccaaatttaattttagaatgttttcattagccctaaaagaaaccccacacccttagccattctcccccaatccttatattccccccatttctaggcaatctaatttctgtctctgtggatttttctattctggaccattttatatacgtggaatcatacactgtgtggttttttgtgactgcttcttttacttagtgtaatgtttccaaggtttggtcatgttatagaatgtatcagcattttgtttctttttattaccaagtaaaattccactgaatggatatgcgacattttatttattcatcagctgatgaatgtttggactgttttaactttttggctattgtgaataatgctgttatgaatattcacaagtttttgtgtctcctcctgctgtggactactgtttccctaacagaacgtattaattttcttttgtacaaaagccactccaaagcatagtgcttaaaacaaccactgcttgggtcaatgagcacactatattctgcactgcactaactttggctgtgctcattcatgtctgtgaccagtggtggttttaggtagatggctagtctaggatggtcttgagtggacaacttggttctagtaaactagtccaggcatgttctcatagaaaggcacaggtgagagagtgagcaagttcaattgtacaagaggacaagacttgcatatttgcattttaagcttctctttgggtcatgtttgctaatactacattacaaggtatcacaagagcaaggagaagcccagggtcagaatggaaaggggattgcagagttacgggtaaaagatgtgcctacagagaagccattaattgggggtcattaatgctatgtctgttgcacataccaattttgcttctaccttaatgctttttgcatttgtttcccttctgtttgaactagttttctcttacatacctgcatgctgaacttgtttcacttccttcctatctctgttcatgtatcatcttaccaatgagaccttcaagttttaccatactacaaaatgaatagccacccaccccgatcctgctcacagtctctgtttttctctataactttttatgaccatctgacattgtctgtttttttttttagcgtttatcttcccttaactagaatgtatgctctatgaggtcagggactttagtttaattacactgtcttcattgcctagaaccctggcactcattaaatatttgttgaatgaaaaattaatctacattgatccatttttacctaaattggaattatcttaaagttctaacctgccttcatgctatggcatgtataaagtgtcagtcttttgattagaatacctaatgatggaatatttcttctacttcttatagagacatagaccatgcaatatatgagtaattctaccatttacttagctgtctgacttgggccaagttttttttaacctccctgtttcctcatctgtaaaataggggtaataatagtcccagcctcatggagcctggcacaaggtaggcactgtataaggttggtgcaatgtgtattgcataatattttttatcacctacttgttattggagtatatggcacagggaaaatggaattgaaagctggagcaatcttatattatggagaagttgcaaaatctttgaaaactattttttcaaagggacaaagcacataaagcaaatgaaataggtgatttttttttcattgaatgcatcataacattatatccttaaaacactgtcttacaaagtgctctctgaaaaatactgttctttatttcagggtttacgaaaaagtacataaaactagtgagcatacatcttaactctctgagagtcttataagtaccatcctagatgcatggagagaagataattcattacttacactaggtcatgccttaggtcgttaagacttaagtatctcatggaaccccagttgagaaagaacaaaaatataacatcttgactaaggtggctagtgcttctctgatcttaactattatttctctagcctcaggtgagccttcttgaatgtgatttcatcagtctcctctaagcttacccagaatatagaatttttaatattttatatagccagcacttataaactacctgcttcatgctaggtagtatacttaggtgctaggagtaaaactgatcaagtggggtaagttccaaattcacagagcgcacagtcctaacaggctgtcatgcctcagttgtttatttgtgacagtgtttcccacagacttttaattttggaatgataggatgtggtgctctggaatggtgtcccagggttttggagaactgagagtaacctgggaaagcaggttacagtgagagaaagttatgaccaggagttgtaccaaaacgcaggaaacatgatatgtatattgttatggtgcataaaaatacttacaattaaaagtcctgaacctacactacatctattgtttcacatattttccttcaatttaaatcctgctccaaatacagctcctttccgaaaattcagttttatgtgacagaaatttgatctgtttcactgaaaacccatttgaatagtaattgtgagcaattgttgaatttgtaaatgttacgtaaatttagtggatgactttgtggacagtttgacgttatggacagttattcttgatactgtttcccctcctttcccctgccatccctgaaactttagggcttaatctgcttttaattagccagaaaaaaatgtttgatcctcttattcagttttagattattttagatgatttctaagttaaactctaagttagaatagtttctgcttattgatttcatgaatatcacttctctatttctacttctcaccttctgccaggccaaaggaattgtggaactatgatcatcaaactcctaaatcatcagccttttccttaaaagacttaaaagggttctatctatgtagacacttgtctggctcctgattacagttttaccattctcaagtgatactatttgtttcatcacagtccacataattcagggtcaagatactattatgaaatgactgtaaaaattactaatacctttggctctctaatttttctctcttttcatcatatgggcctgacaaaatgcccgctacctgcctgcacttaggcaattgaatgtagtgctttaaatgtataccaaaaccctcaacagggcatcaacaatgtctggcagtgcagctgcttcttcactttcccaattaaaaatgcgtttgctggctgggcgcagtggctcatgtgtgtaatcccagcactttgggaggccgaggcaggtggatcacttgaggccaggagttcaagaccaggctggccaacatggtgaaaccccgtttctactaaaaatacaaaaattagctgggtgtggtggcgtgtgcctgtaatctcagctacttgggaggctgaggcaggagaatcgtttgagcccaggacgcggagtctgcggtgaaccaacatcgcactactgctctctggcctgggcaacagaatgagactctgtctcagaaaaaaaaaaaaaaattcatttcctccactcattgcaaacctctcacagctcccactcctatctgtggaattcacttcaaactttactgagaaattaaatgcagctcttgtcatcttttcaccaccaattctacaaacttgtctgcattggtcctcttgttctgtcttcctttcatttgttatcgaagaccattcccgacagtctgatttctctacttgtgactcagatttcatctttcctgcatctctgtcttccatatcattcttctcccctcgattaaattccctttagccacaaacatgctctattatctcccagccccaatacatctgcaaatgtatgtaaataggaatgaccaaatatgtacagatatacaattcctacctttcctaatgtcttctagccactattatgtgttcctattcttatctaataaattttcttaactgaatattttttccttctacctcagtgtctgtttctttcttttcagccatttttggtttctcttgtaaatgtttatgatccccagggctgagccttcttggcctatactctcttgtaggtctgcctcccagtatgctagtgacacccaaatatgtcttcagcctcatctctcctccagggttctaaacttgcataaccagctgccttcttgatcatttagtaagcctctcctgttggtgacataatgcttgatttctctccctcatggcatcactgtccacccgttgcacacatcagaatttcagaatcagccttaattcttagttttttctcactcttcctccatgtctaatccagtagccctatctccactgttttcaccttggtccaagcaatcatctcttgcttaacacaaccatagtttcaactagtcttcctccctgcattcactcttggcccaagcaatcatctcttgcttaactatggttgcttaacacaatcatagtttcaactagtcttcctccctgcattcattcttggcgcaccgtaatccattcttcactagagtgataattagaggtactataatatatactgctctagagttatattgtctagaatttactagctgagtggccttgagcaatatacttaacacttatgccacaatgtgctcgtctataaaatgggatggtatatttatctgttctctgattgctataaaggaatacctgagactgggtagtttataaagaaaagaggtttaattggctcacggttctgcaggctctacagaaagcatgatactggcatctgctcaccttctggggaggcctcaggaaacttacagtcatggcagaaggcaaagcaggagcaggtgcgtcttacatggcaggagcaaggggtagggggaggtgctacacacttgtaaacaatcagatcttttgagaactcactcatcaaaaggacagcatcaagaggatggtgctaaaccattcatgaaagatccacccccatgatctagtcacctccaaccaggccccacctccaacattggggattacaatttgacatgagattgggtggggacacagattcaaaccatatcagaagtaaattgttagtaaaatataaatcagattatgtcacacatacctgtttttgaaactttagattctcattgctcttagaataaaattaaaactctacttaccgtggctttcaggatccttcataacctggcatattgcctaatttttctgatacccatcttgtttctactctccccttgcttaccatatagccacagtcactatctttaactttctagttggaaacatggctttttgtggggtgtatttccttttactttctattgttttgggaccaacttatttacgtcagttttgtgtttgttttgttatatgtaaaaatagtgccttaaaaaatcagtttttttttttaacctggtgaatcatttgttttatctttataaatgctgggacgagaggcctactccttttttccaattttgtgagagattggtaaaattcttagaagtggaattgctaggtcaaaagatagaaatgttttcagatggatgattcctattgaagtaaattttttgagaacttaacatgtccaaaaaggttttcatttgccctcatgcttgactggtagtttgcctggatgtaaaattccagattcacagtcatttttgcccagacagtgaaaacattattctactatcttttaaaaaataacagttttattgaggcataattcatataccatactatgtgcaatttagtggtttttaatatattcatagagttgtatagccatcaccgcagtacattgtagaatatttttatcactcaaaaatgaaacccctggatttattagcagtcattctctgttcccaccaatttgcccaccccccagccttaagtcaacaagtaatctactttccgtcttcattgtcttttaatgttgctgatgaaaagtctgatgccaaattaattctagttataggaagcttttagagttttccgttttgaatttctggaatttaattatgtaaactaggatttatgtagatatgagtcttttaattcatccgccttagcctcactgagcccttttactcagaccattggtgtttttaactccaaatatttttagcataatctttatttattctattttcttcatttagaactcttactaaatgtattttgaacttcccaaacatattctttatatctcttcaactttttacttgtatcacccatttctttctttcttgctctctcttttttaacctctctaccttctgggacatttctttgtgttacatatcactactatgatctttatcaatactacttctgttatttaccccttctcctcaagtgttttcttagtaataatatttcagttttctccttgcccatttattctgtttgttcattgtgatctttttctttcctcccattggatattcatagtgtcttgtgattcttgtttattgaataaggactaaattgacaaaaactttgcagttacataggtctaggattcttttctaaatgggaaatgactacaagtgtcatgtattcattgactggctttcctccagggtgcagggattttaagaggcaggcttaaggccaccccagttaccaaagtaaggacagctttactatgtttattcctggaaggagctagcttacttacttagtatcctcctccttcagtatcttccctctttccctctcgccctcccacttttcctttctacttcaagtatatagtaaagtgtagggaataatataataactatgtacctattactcagttttgttgaattgtcttatatatgcttcagatttttataaacaaaaaaattatagacacagatatagcaccttacagtcttactttgatacttttctctgccctttctgccttttcagaagtaaccattatcctgaatttactgtttatcatgcccatgcacatttcagatacttttgctgtgggtgtagatccacaaacaatctagaacgttgattgcatgtttttgtgaaccctgaaagaaccaaccctttaaggcagattctgagtggctaacagtccaaattcaaaatagacccacgcgatcctttgcagacatgtagagatcatatgtgtactccgcattcctggaaaacctatacacccagtaactttaggactttcatagctgtctgttcctatttatgccacctgaattaacagctaccagaaaataccatttggccttttgtacctaacaaacactctgtgacctgcctcagccaatcagaactgaacaagtttgcacccctcatttgtatagtggaccagagtgggaacctgactgtgaactttctctgtaaatgacaaccccttttctttgttctctcagaaggcgcctttattttctaccaaggtacatctccacggtttgcaaactgtttgctggaataaagcctgtttcttttttaagaaagaaaatctttttctgtagattgttgacattttaaaagttgtatatatcctgaaacttgctttttcatcaatattatgtttttgagatgtattcatgttgataaatatagcgctagctttttgttttgacttaatatgtggtattttgttatacagatgtaccagtttgccattttttctctcttagggaacatttgagttggttctagttttttgctattataaacattgctgcagtgaaaatgtcttgtacatatgtgaatataagtagctacatgataggatatgctcatccttagctttactctagatattgccagtttactttcaaatatttatattataccacatgtagaatatgatagtgtttgttgctacatgtacatgattaccaactcttgtattattaggcccaatttttttgcagtctcactgatttttcatatgtatgtatgtattttttgagacaaggtcttgctctgttgcccaggtgggagtgcaataatgcattcctgtcttattgtagcctcaaacttctgggctcaggcaatcctcccacctcagcctctcagcctctgttagctgggagtacaagtatgtggtaccgcatccaactaattttcttttttttcttttttttttttttttctagagatggggtcttgctatgttgcacaggtgctgggattacagggatgagccattgtaccaggcctggtttttcattgcatttctttgattactaatgaggtcatttattttatgtgtttattagatattcgaattccctatagtgaactacctattcataagtcttttgcccattttcttttggattagttgaccttttccaaaaggatggccacttaccctggaaatatttattatatagtccgttctgttccccactaaattataatgccaatgtgaaccatatgctgtgtaaataaatacctgtgcctctgtttctgagccctctattctgtctctttgggctttctgtctctatgctagtatcatttctctgtaagtcttgttttcctggtaacaccagtcttaccctccttattattcaaaatagccaaaggctactattatacagtgcttccataaaaattttagaatcaggctgggcgcagtggcttacgcctgtaatcccagcactttgggaggctgaagcggacggatcacgaggtcaagagatcaagaccatcctggccaatatggtgaaatcctgtctctactaaaaatacagaaaattagctgggcatggtggtgtgcacctgtagtcccagctacttgggaggctgaggcaggagaatcacttgaacccaggaggcggaggttgcagtgagccgagatcatgctactgcactcgagcctggtgacaaagtgagactccatctcaaaaaaaaaaaaaaaaaaaaatttacaatcagtttttcaagttccatgggggaaaaattatttttggaattttgtttattgcactacactgaatttatttgtggaaaattgacatcattataatattgaatcttcccataaaaggatatttatgtaggtctttgtcaagtgaaggggaacacatctgcatgcacacatacatgtcatttggtgtaatgtgaaataaggtttagtggagaaaaataaagaagtattaaggcacacacaattccctaaggtctgttatccccatatagatgtgtgcactggccagacacatctagaactatgtactgtggaaagggctcctgtgtaataattggagctttgaggttggtgaaatggtcttactagggaaagccatcagtactctgtggctgatcagccttttcttgcatgaaacaaactcagacctcctgagccaactttttgataagctaccaaaacaggggtggaaacctctagagtcatctgactctgtctctcttcttagtagccttttgtgcacctgcacattattttgttgtttccgtcacaaaagttttgggaatcttttgttagacttttcttctagattctttataatgttactatcatgagaagcatctttttttaattggctctggctaatgtgttagaacaccatgtaattttatgtccttgattttatatccaacaaaccttgctaaactcttctgttagtttttatagttaataggtattagccctgatggtttgtagattctcttgggtttttctgtagatagcatgtttcctacaaataagttttttgtctctataattctaattcttatgcctctttatataaatatatatttatataaacacttatataaacactacctatactaccaagattcaatgattgttaacattttactgtgtgtatatctcctaagaaaaaggaaattatttcatttaaccaaaatatcatatgtaggaaggttaaaattctatcatcttacatctgatatgtgttcagatttccatggttgtcccaagaatgtctcttgcagctatcttccatccctaaactaagatccactctgcatgcactgaattatttgttgacttttagtagtagttatcttttagtcttaaactgaccacctactgttttgttctcccatgaaatgatttattaaagaatccaggacagttgtcttagaatgtcccacattttggattagtccaattgccaaggctttgactttcaaagagaagaaaaatgtcttagagaatgttccacaatctatatttgattatttcagtgtagcagtcttagcgtatttctctattccctgtgtttcttctaaaccagaagttaagtatgaaggcttgattagattcagtttaaatgttttgcatgtatacttcatgggtgatgtctcatgttgtatcacatcaagaggcatatgttgggttgttccactattaatgattctaagccacttgaaggtatgttttccccttcatctttaatctgtggcgaaatactttggcactatgtaagtatcctgttctccatcagcttttctcctaatgatttttagcatcatttgatcctttcctgaaccaattattttatattagctggcattcttttgtaaagaagcatttccccatatcaagtgggaataactaatttttcctaaaaaggcgggatacatgcataatttttttcatttaaagttcagttttctaagggtgtaataatcccctacagtgtgagcaactgctctcccacccttttaatttttatggaattttgaaggttttttgtttatttgtttgtttttgcataccatctgttatagtcaattacagtacttattctttttgctgaaaatctccaaatttggtcagtaggagtcccttcaagctggcctctgatgttgttctgatatctggcacaagatgttcctagatctctcttcttgaataataatagataggtttgaaatgctgtaatgctggccctttcccccattaatgtagtcattgtgttgttgttactttgtgtaatctaataatgcttattttgttaagacctaatatgcttattaataaactcattagtaaaacctaaatgcttatttaggtttactttcatgtatattagtctctagattctccatctgtgttcattttctatggctgcaataataaataacaacaaacttggtcacttacaacaccacaaatgtggtgtactctcttacatttctggaggtcggaaatccagaatgagtttgttttactgggcaaaaatcaaggtatcagcaagactttgctctctctagagacaataaggaaaaatctgatttcttgccttttccagctcctagagctgcactgcttgtatttcttggctcatggccacctcctccatcttcaaggtcagcagtgtagcatcttcagatctttctctgctgagtttttatatcacctaatcatctatagtaaaattcccttttatttccctcttataagtatgcttgtcgattacatttagggcttacccagatatccagaataatctccctgtttcacaatacttaatcacatctgcaaagttccttttgccacataggataacatttacaggttcttctgggtcttggtatatgtttagttatcttggtggggggccactattcagccctctcatgccactctttctttgatattacttcttgattcagtttcctttttctaggttgtcagttattttcttcttgcaccttaacgtcagttcattatcttcttgcttcttttactgatgttgagaagtatgccatcagtctgacttgtctttactttctggttgactttaagaactgaacttttttattttcacctgttttggaaaatttatggccagcttctgttcaaatatctccccattccctgtttacctcccagattaactcattttgtgcttcgtgtctttcatattttccattcatttatctctgccttttggctaattttctcagaatcaccttctagtcctttaattctctcttcagcagtaatctgttttacgttacctgaggttttaatttgatgactgtatgattcaaaactcatgtctttatagtttcctcatgcttcttctttatatgtgttgtctttaggcttgctgttcttccagagttatctcagtagaaatttacttttgtgttttggtctgcaatttattagctttgatttctttgtcaaactgattatattcgttttctgtttttcaggaatgttctgaatttttccaactaagtggttgatggtcctggcctccttgctttcagtactgtgattctttcaaccattttcttgaaattttaagaccacttctgtctctcccttccctccctctgttcctcccccaaccccacctttcgtaacaattatttgtttcttggaatctcttaggctagtcctgtagttttcccctttgacctattaagtattatgttactggattcctaattaatgattattcttgcttttaatatatatatttatatatactattatatatgtttatatatcatatatattaatttaagagtttgatgcctttcttcacagtttggattattttatgttttgtttgtttgtttgtttagagatagtcttgctctgttgcccaagctggagtatagtggcgtgatctcagctcactgcaccctccatctcccaagttcaagagattctcctgcctcagcctcccaagtagctgggactacaggcacgcacccacacctagctaatttttgtacttttagtagagaaagggttttgccttgttggccaggctggtctcaaactcctggcctcaggttatccacctgcctcagcctcccaaagtgctgggattacaggaatgagccattgtacgtggcctatttttttttatgttatctttgttgagttttgacatctaggttttgctagcttcttaaagtaatttagaagatatataagtatatatatgaatatatatataaaatcacctgttactaattgatattttaattacattttctttaagggatgaggggagccaatggctgtagttttttttttgtgccatagctccccttcatgtccttccatagcagtttgtctgcatttatattttaacatgggcatcttctaggattttttaaaaaaaattctcagtcttttttttggagaaggagttttgccatttgtaaagtcactaaaaatgatcagttatttactaagcttgcttggctgtaatagctgtggtctactgaagagattaaaacaggagaggagatcttttagtaactttcttgaagtttttagttttgtttttaattttttcatctcccttttaggattgtggtaacaggtttttcttttttttccaagaagatgttttaactatgtacctaccgttagcttttcagtatcttattctactttttaatatatctctattttataagagtcatcaaagttctttctctgactcttctggagattctgaaagactttctctcccaaacacattctttaaaattccaacaagggtcattgtgacttttttttattcttcggatataaaattactcttctttggggagataaaaaacctgacttccagacacttatggtctggccccactatacctagccaatattatcattttcttttactttttttttgagacgaagtcttgctcttgtcacccaggctggagtgcagtggcgcagtctcggctcactgcaacctccgcctcctgggttccagtgattctcctgcctcagcctcctgggtagctgggattacaggcacacgccaccacgcccggctaatttttgtatttttagtagagacggggtttcaccgtgttggccagctggtctcgaactcctgacctcaagtgatccacccgcctcatcctcccaaagtgctgggattacaggtgtgagccaccactcccagcccaatcttaaccgttttttataccccagcaagaaaattttattctaatcagctcattctcttcatttctcatctctgattattttcccccactttctctctcccatcctttgagagaaatagttctttatgctaactgcatatgagtttttatggaacattgaaaaaaaaaagggagtgtgggtaatattgtcctgaatttactggacctaagaaagaatcactgaactaggatgacctgttttctttcctaccctattctgaaaccagcttaaatcttcagctttaattgcatacctattatgactaagacaccaaaataaatcatgaggggacaaaaaaagaaaatgtttctgatcttaaagtagctaatagacatggaaaacataatcaactttatgttatcaaattatgacttagaaaacagttttgccgagttgatcagtgaacacatcatagagggatgctctaaggaaagatccatcctggacaatgtggcaaaaccccatctctactaaaaatacaaaaattagccaggtgtgctgctgcgtgcctgtagtcccaactacttgggagtctggggtgggaggattgatgccagggaggctgaagctgcagtaaaccaagattgtgccactgcactccagcctgggagacggagaccctgttttaaaaataaataaagtattcatttttttttaaacaaatatatgtttgcttattgtatgctaggcactgttctaggctctggggataaatcagaaaaaataagacaaaaacctatgccctcctggacttcattctgttggggagtgggaagacacacaccaataacaaaatgaacacgtaaaatatatatagtaaggtggtcacatatgctacggaacaaataaaattaacaaagggcatagaagctgattctgtgcctttaaggaatgggagggatagagcctttctaaatgagaaggtaagagaatgcttcattgataaggtgacattgggataaagagatgaatgaacttggtaagacagcaaactttatagaaatcttaggggaagagcattccaggcagaaggaatagtaaattcacaagtcctgcactgggagtatacttggcacgttcagttaggccaaatgtgattggaatgggatgagtgacgggagaacaataagaaatgaagctagacaaatagcagagggccaggtcatggctttggtgatttttagtggggaagccagtggagggttttgagcaagagaatgacatgtgatctgcagttatagttttgtttttgagatggggttcactctgttgcctaggttggggtggcgcgatcacagctcattgcagcctcaacttcccaggctcaagcaatcctcccacctcagcctctgggaccacaggcacacaccaccacgtctggctattttttttttttcttttttttttgtagatacagggtcctactatgttgcgatcctcccgtctcagcctcccaaagtgctgagattacaggcgtgagccaccatgcatggcctgcagttacagtttttgaagaatagctactgtgccattctaggcatgaaataggagaggccatttcagaaactcttgttaataaactaacagagaaatgaaggtggcttagaccagggtggtaaagttagagaaggtgactaatatctacatatattttgatttggagatggattgaaatggattgtcagatgtgagaaaagagtcaaggatgatgctgaagtttttggtttactcaaagaagggagcttatttcctgaggtaaagagactaggaaaaacaagttttgtgggggtgatgggggagatcagaagttagtctttgaacatgttaagtttgaaatgcctattaggtatactagtagacatattcagcaggcagttaggaatctggtgttgagaggaaaaggtagagttggattttaaattttgggcttcatcagttcatagttggcatataaagatacaagattggatgagatcacctagggagtaagtgtagcttgacaaaagaagccatctgacactttttggagatatgaaaaattagcaaaggcatcatgaaagaaaacattgaaatacctgactggaaaaacaatttggaacctctatcactgcttctcagactttaatatgcatatgaatcattttgttaaagttcagtagatctgagatggagcttgagcttctgctgtgtgttttgtttgtttgtttggtttttggtttttttttttttttggcaggttgtggggcggcggtagaaactgagtctcactatgttgcccaggccggagtgtagtggtgcactcatggctcaccgcagcctcaacctcctgggctcaggtaatcctcccacatcagccttctgagtacctgggactacaggcatgcaccaccatgcccggctaatttttgtattttttatggagatggggttttgctatgttgcccaggctggttgtgaactcctgggctcaagcaatccacctgcctcggcctcccagagtgttgggattacagatgtgagccactatgctaggccagcttctgctgttctcacagtctttcagaagatgctgctgcttctggtctgtggacccacactttgagtagcaagactttatatgacaagagtcatgaaaaacaattgaaagaccttaacatttgtagaagaataaagattaatatccagaataaagactatctataaatgaatatggaaaaaacaaacaactcaatagaataaaagggagtgcagtatagggaattttccaaaatctcaaatggccagtaagcataaaaagtgctcaactttgtaagaaatacaaattaaaacatgattgccttttccctttcagactggcaaaagtttagaagtgtgattgtgctgggtgttggtgagattgtggggaagagtggacttataccctgcagatagggacttgacttgatacatttcttcttttggaagaccatttggcatatttattaaattttaaaataggtatatccttcaatcctggaatcctatacctagataccaaaaaataaaacttgcacttttactctgaaaagcagttcagaactatttgttggagtattgtttgatgttgaggaaatggaataatctaaatgtcctttagtaaggaaattattaaatcaagagatttggaactcttttttttcatttatttcccagtacatttaaaaattgatatctgacattttttcattataactttgaatagtttaaaaggccataatttctactgtgtgttatatttatgttaaatacattttttggacaagccttaaagctgcagatttagatcattcaacttagaaacagaatcttccgtataacctaatagccagttctcactatcaaaccagacaaattggactgtttttcttttttattaagaaaaaaaacctgattacttatttatcttaaaacagatatactaatatatgccttttaataaccactaaacttctggattctagtctggctggctggtgatgggtaaggcttggagccttgccacaaatttgtttcattgataaaatatggtcctgctcttaatttttcccccttttctctcaaggaatttccctatttaattgtctatttgttaggtactttggaatttatacgtctcagaatggtgcatcttagtagtatttgaggtggaaaagaactttgcctttcttttataaagtggaaaataattattttaaaagaggaagtagacaaggagaaccagttcttaagcagatcaatcagggagcatacagataaaacttgaggatctggaaattctcttaaaattgtctatgcccacctaacccctggataccactgaagtttagagactgttgaaataagcagtgcaatgctatgaaatgaatgctatataaccattagggagtaaaatatatgcatattgacgtggagagacttctgagacattactccatgaaaaaagcaagtgttaaaagtattttatatatagtatttaattatatgtgtacatttcatatatgtatgtcttaatgttttttccatgagtaaaagggagacatggaaggctgctcaccaaaccataaacagaacttaacctttttgaaagggggcctgggaatgtgaggaagatgaagagagatttcatggtttattctgaatattcatgtattctttgaatcttttatagttgagaatacgttgtattactagtgtagaaaaaaatttaaagatgtttcataataaaagagaaaaaccactgtactaaatgatctctaagctcaaaatttgaggaacactggcagttactgtgatgtagttgtctatgttaaaatatttctaattcatatactaagtgatttttatttaaattcttttgaaatattttttaggtgtggaatatcaaacaaatgattaagttgacacaggaacatatagaggccctattggacaaatttggtggggagcataatccaccatcaatatatctggaggtaagcttttgagtatcatatctagtaattttgaaaagaaaaaaaatgaacttataaaaacatttgtactgataatcttgattattttaggaggtgggattaggaatagatttgggaagagagaattagctttgcctgtattatacttcttaatcttgttttgtgtcacttgttaaaataaacatgtattttataatttagaaaacatcagaactaagggggaagtgatataaatttcaaggtattactctgaattaaatttttatttttatttttattttatttatttatttttttttgagacggagtctcgctctgtcgcccaggctggagtgcagtgacacaatctcagctcactacaacctccgcctcccagcttcagacgattgtcctgcctcagcctcctgagcagctgggactacaggcgcacattaccacgtccacctaattttttctatttttagtagagatggggtttcaccatattggccaggctggtctcgaactgactttgtgatccacccacttggcctcccaaagtgctaggattacaggtgtgagccactgtgcctagccaattttttttttttttttttaaagagaaagcacacagttttggagctcagcaaaccagttaccatattggaaaatggggtaattttttaaaatattttttccagaatgagtttccccaaaattggtttctgcttccttataggtaaaatttgtaatttttaaatagctcaacattgtttagctttactgtttaataatgccttgaggtttgtgtcaagccttgagcataattgtaaatttatattcattaatcctatgagttagtaggtgctgttataatcacagatgagctttcttagcattagttttcttaagtagtcagtcagactccacagccaacaaggtgttacagaatctaggtggtaaggctctacagcccacactgctcactactaccctacacaccctttctttataaaagctggctcagctgtcatcactagtgaggcaaggagatggagaactctaaattagaaatgatcaggttgccatttggctccaaataccagagatttttaagcacagattgaaagacttctgaactaaatttgtaacttagtaatttaattactttttgaagggccagttaagtcttaaggattttatgagaaagttaagtttatatttctgaagtaaacttggaagtttggaaataacagctaatatgctgttttctttctcctcttcttcatgtggctcatcccagatcacactcctagttaatatcaaagctaggactagaattcttatttctcattactagttagtgtacttcctaatagcctgtgctatcttctatacatatattattaggaggctgatcaaaggtgtcataaggaagcaagtactgctaatgagaatggcaattttttattaatcagaattagacaatataaccagcagtttttcttccaaccatttctatgtcttggagactttgaacccatgctgagatgtaattcatttgcatcaatagctatgtccccactatagcagtgattcactgccccctcctcacataactcttcaggctttttactatttgaagactgatcactaacaacaaaccttagagcttcttattctgtgcccagtactgtgttaaatgtattttattgcttaactcatttcttatagttactttgagcaagatactaggtactggatatttttgttattcccattttacaagtgaaaaaacagagaggttaagtaacttaactaaggtgacactgctagttaggaaagaaggcagatatctaagtcagaaatctgtgttcttgatctctatcttattctacctttatcatgacattgtctcgctctttccccaccctcaccccccagacagcttttcttatttgggctaaatatttctattcccttcagccattcttagtaacataatttatggaccttttattagatacagtctttttggttggttcttttagaattagacacacaaaattgaactacttattaaaattaaatctgagtaggacagcatacatcagaccataactcacaggttatattattagcttgtggtaaaacagattcttatcttggggacttgtggtatacaatgtgtgtgtattatgtgtatgtagtatgcaaaggtatgcatatacacatgtacatacacacacactgaaggcagcagtataatataataattacgatgagccatggagtcatacagactccatgtttgaatcccaactctggcttagtttctgtactcaagatatccagccttcttataccccacctcattagtaaagtggaaataatatcacatcttgggtaagttaaggattaattgagtttataattatgaaataacatagttcctgattcaaatattaagaattctataaatagttgatttatcttgtactgctctaggccttggggaatagcaattgtctgtctttttttttttccccctgagatggaatcttgctgtctcccgggctggagtgcagtggcacgatcttggctcactgcaacctccacctcccaggttcaagcaattttcctacctcagcctcccaagtagctgggattacaggcatgcaccaccatacccagctaatttttgtgtttttagtagagacagggtttcagcatgttggccagtctggtctcaaactcctgacctcaggtgatctgccccccttggcctctcacagtgctgggattacaggcgtgagccaccgtgcctggccgggaatagcaattttttaaaaaatggccaacaatctccgcctttttaagcttatattttaatgaggggatggatatatagacaatgaacatataaatgagttttagaacattgcacttatcaccattttatttttttattttttgttgagatggagtctcgctctgttgcccagtctggcatgcagtagcacgatctcagctcactgcagcctcctctcctgggttcaagtgattctcctgcgtcagcctctcaagtagctgggattacaggtgtgcgttatgactcccgactaatttttgtatttttagtggagacaggtttcaccatgttggccaggcttgtctcaaactcctgacctgaagtcatccacctgcctcggcctccctaagtgctaggattataggcgtgagccaccgtgcctggccatcaccattttatatactatgaatggactctaaccagcccaagagaaaagacctgtacatactgatatttaaaggcccatcagtgaagagctagatctactgattactcactgagacccaccgttctgcaggtttctcatctgccatttaagattcctttacactttttttttttattggggtaaaatatgcctaacaaaatttaccattttaaccatttttaagtatatggttctgtggcattaagtccattcatgtttttgtgtatccttcaccaccatccatttctagaaattttatcatccaaaactgaaactctctagcctttaaacactaaatctctatttccttctttctctagttcgtagcaaccaccattctactttctatctctatgatctatgaattggactactctaggaacttcatgttaatggaatcatataatatttgtccttttgtgactggcttatttcatttagcttaatgtctttgaggtttatccatgttgcaacaaggataatgcatatatcaaaatttttttcctttttaaggctgaataataatccattcattgtatgtatttaccatattttgattatccattcatccatcagtggacacttgggttgcttctacgttttggctattatcaataatgctgtgaacatgggtgtacgagtatctgagttccttttacttctttggggtatataccaggagtagaattgcaggatcacatggtgattttatgattattttttctggagttgccacacctttttctgtagcacctgccctgttttatattcctactggcatcgcatggggttctaattttttacatccttaccaacacttattattttcggttgattaaaaaaaccatagcctaggctgagcgcggtggctcacacctgtaatgccagcactttgggaggctaaggtgggcggatcacgaggtcaggagtttgagaccagcctgactaacatgatgaaatcctgtctctactaaaaaatacaaaaatttcaggtgtgtgtagtggtgcgcacctgtaatcccagcaattcaggaggctgaggcaggagaatcgcttgaatccaggagaagaggttgcagtgagccgagatcatgccactgcactccaacctgggggacagaataagactccgtctcaaacaaaacaaaacaaggcaaaacaaaaaaaacatagcctcatgtgcgtgaagtgataccttattatggtgctgatttgcattttcctgatgactaacaatgttgagccttttattatgtgcttattggccatttgtatatcttttttgagaaatgtctgatttaagttcttggtccattttttaattggattgtttgttttgttcttgttattgagcgtagttctttatatagtctagatatcagttcttattggatatttaatttgcaaatatttttcccattgtgtgggttccctttttactctgcttatagttttttagtccaaattatctatttttctttttgttgctcttgcctttgatatcatatccaagaaatcatcaccaaatccaatgccatgacattcttctcccaaatgctcttgcatttgggtctttgatccattttgagttaatttttatatgatgtaaggtaagggtccaacttcgttcttttgcatatggatacccagttttctcagcatcatttgtggaaaagactgaatggccttggcacccttgtcgaaaaccatttgactatatatgcaagagtttatttctgggctttctattccattggtctatatgtctgtctttatgctgtcatcatactgttttgattacactagctttgtgtagtaagttttgaaatcaggaaatgtgagttctccaactttgttctttttcaaaattgttttggctattcaggatcccttgagattccttttttttttttgagatggagtctcactttgtcacccaggctggagtgcagtggtgtgatcttggctcactgcagcccacctcccaggttcaagtgattctcgtgcctcagcctcctgagtagctgggattacaggcacctgccaccatgcctaccttttgtatttttagtggagacggagtttcaccatgttgaccaggccaatctcgaactcctgacctcaagtgatccacctgccttggcttcccaaagtggtgggattacaggtgcaagccactgtgctcagcctccatgtgaattttataaaggatgtttctctttctacaagtaggtcatcaggattttgatagggattggattgaatctgtagattgctttggttaatactgatatcttaagaattcttaactctgaaatatgagtggacagttaagaataaccagatatttaaagaaagctgtcaacaggaaagacagcagcagaaatggtcaacagaaactcagaaacagtgcagaaaacagaataaaacttaaaaataactataattagcatcagagataagatctattagtcctgtcttgctttgtagcaatactaaagaagcaaaagtaacagagaacaagaaagacctcttggaaattaaaaatacaatagccagaaatttatttttatttttatttttttttaattttctttttaattctcagcaaggcaagttacgtctatagaagggtgcgcccttacagatggagcaatggtgagcgcacacttggacaagggaggggaaggggttcttatcccatatgcatgtggctcttgctgctgtgtcattcccctgttggctagggttagactgcacaggctaaactaattccgattaataactagaattttttaatttttattattatttttctttttttgagatggagtcttgctctgtcacccaggcgggagtgcagtggtgcgatctcggctcacttcaagctccacctcccgggttcacgccattctcctgcctcagcctcccgagtagctgggactacaggcgcccgccaccacgcccatctaattttgtttttgtatttttagtagagactgggtttcaccgtgttagccaagatggtctcgatctcctgacctcgtgatccgcccgcctcagcctcccaaagtgctgggattataggcatgagccactgtgcccagcccagaaatttttaaaaatatatgtatatacagacatataggtatgtacatgtgtatatatgtatgtgttgtatatatataaataaatgttgaaaaataaatattggaagataaatgttctagaaagcagagtaaaagcagagagatgggaaattttagaggaaacatgagaaaaattaaggaataaatcccaatccataaaaattataaatgcgtttaactgcaagaaacagaacccttcaagaataagtttctggaacaaatagggattttcatttcctttcacatagcaagaagcgtagaggtaaattattgtaagactagttctacacaggtcagttgtcagatacttggttgaatcgctatagtccctttagcttttctgtcaagaccacagcagatttttaagatctttccctcatacaactcctcaaagcagaaagcagagaacagagaagttctcttgtatactaagctcttgctaggaagaaaatctttctcaaaaatcctctataactcttccttttatatctcattgactagaatgaggtcacatatcacccctatactagtgactatgcttacatttcctgaagtaagagtctaataagtcaaaaatttccagtgttcagtttttcttcagattagtttgtatgctgtcaagtagaagttgtgctatgattattttattctataacatttcaacagaaaccccttttaagtttctataggaagataaatcttcaactacttattcttgcttcttctcttcattgtagcaaaacagagaaattggttacaccaccatcagaaatcctcttgattttctttttcccacgtactaatttatttaaaagccatcttttcagttctagatgttctcctactggcagataacagttaacattctattgattcccttgatgataactacagtgaaatatgagatacagtactctaaagaatttcaaatttgtcttctcagttgatctttggttcccttttttctaccatcatccaaaggaagaaaagataaatttactctgaaaagttgttccccagagtttcttcatttcctctcagtgtttccatattcatttatccaacaaattattggaatgccttctatgtgtaagatataatgctagatgcttttctagtagtagattcttctttctgtacttgatttattggagcccagagatgaagggatactgtctctgtaatcaccctacagctgagtcctaactacttcagaatttatggttgaatcctacagtcccctgtagactgatgaagacagtaacagctcctgacatttactgagtatttactatgtatcaggtactaatcatatattagttcatttaatcttcagcctaccctttgagttacacttaactattctcattttcattttataaatgaagcaattcaggcacagagggatttaataatatggccaaggttacacaacttgtaattggtagccaaggtttgaatcccagacattctgaatttacagcccatgcgtttaatcaccgtatcattcttacacttggcagcctttctgatttttagtctatatagaacctagaataatacagaggcattgtgtcaaacccttcaatgaaattaatactggaagctggatgcttcctgtggaatgcagaacagtccattatatatcatttatgggcagtttgtaagatttcattgtatcttgtgagagtaagaataattagactaaatttaattaactaaatgataaaaaataaaatttttatttcgctgctttttctcattacattgaaattaaatagatccttagatttttttcccttctgttttaattgagaaataattcacatactatacgattaactttttaaaactgtgtaattcagtggtttttactatattcaccactatcttattccaaaacatttttatcactccccaaaagaaaccctttatgcattagtagtcattccctgcagcccctgacaaccactgatctactttttgcctttatggatttgctggttgaaatatttcatataaatagaattatattatgtggccttttgtgactggctgcttttacttaatgtaatgtttccaaagtttgtttatgtagtagtatgtatcagtacttcatttcttgttatggctgaatatttcatcatacacatatatcatgttttgtttatccattcatcaactgatgaacatttgggctacttatatgtttttgccattatgaataatgccaccatgaacattcacgtgcaagtttttgtgtagatatattttcatttttcctggctgtatgcctaggaatagaattgctgggtcttgtggtaactctgttttacactttgaggaactaactgccagacagtttttcaaagttgctgcactattttgtattcctaacagcaatgtatgagggttacagtttctctccatcctcatcaacccttgttattatctatttgtttttttaattaaagccatcttagtaggtgtgaattggtatttcatttggttttgatttgcagtttcctaatgactaataatatagaacatcttttcatgttcttgttagccatttgtatatcttctttggagaaatgtctattcaaatcctttgcccacttaaaaaaactgggtttgtccttttattactgagttgtaagagttctttaggccaggcatggtggctcacacctgtaatcccagcactttgggaggctgaggtggatggatcacttgagtccaggagttcgagatcagcctaggcaacatggcgaaaccccgtctctacaaaaaatacaaaaattatccaggcgtggtggtgcatgcctgtagtcccacctgcccgggaggctgagatgggaggatcgcttgagcctgggaggcggaagttgcagtgagccaagatggcagagtcacccaggctggaatgcaggggcaccatctcgactgactgcaacctctacctcctaggctcaagccatcctcccacctcagcctcccgggcagctgggactacaggcatgcgtcactgtgcctggataatttttgtattttttgtagagatggggatttgccatgttgcccaggctggtctcgaacacctggactcaagcaatcctcccgccttggcctcccaaagtgctgggattacaggtatgagccaccgcacctggccaggagttctttatatattctagatagtagatccatgacttgcaaatattttctcccattctgtggtattttttcccactctttcaattttgtcttttgaagtacaaaagtttaaatgtggatggaattccaatttatctattttaaagtttaaatgtggatggaattccaatttatctattttctgtggttgctgtgcttttggtgtatcatacatgagagaccattgcctaatcaaaggtcaggatgatttactcctgtgtttttttcctaagagttttatagtattagttatatagccaaaacaggtttagttgcttgctgcctgcagagtccaattagtaagagcaaagtctagtataaagtgacttttttattccaaagttagcttaaaggaagaagacgtacaggcttcctgccttaagggtactgcttccctgttggagcagaaagtgggtgcttttaaagaaggtgcctacacgggggcagaaatgagcgggtggaagatctgcatattcccttcggtgccttctttctcaggcagtcaagttggtggcttcatgggcaaaaatacctcagaggtggctgaaaactctagcagtcttacttttggttgtagatcaactattacctcttgaggcaacttcctgacgggtgagagttccactcaggattgtctaagcacataattagatcaacttgccttgtagggaatgtctggtgaaaaggagataaaaggccataattgcatttcttttattcttttatctttttctttttgaaacagaatctcattctgtcactcaggttggagtgtagtggcatgatctcggctcattgcagcctctacctcctgggctcaggcgatcctcccgcttcagcctcctgggttgctgggactatatgtgcatgccaccatgcccagccaagtttcatattttttttagagatggggtttcaccatgtttcccaggctagcctcaaactcctgggctcaagtgatctgcctgccttggcctcccaaagtactgggattactggtgtgagccaccacccctggcatataattgcatttctaaagagctaagtaggaagtggggaggaggaggaaagaaaaaaataattaaactttttcttagaaaaatgagggtgctcaattatataatagatatgtgacccattttgttttgtttttaatttttgtaaagatggagtctatgttgcccagtcaggtcttgaactcctggcctcgagtgatcctccagcgttgacctcccaaagagctgggattgcaggcgtgagccaacatgcctggcctatttcgagttagtttttggatatgttgtgaggtagtagcccaacttcattcttctgtgtgtggatattcagttgtaccagcgccagttgttgaagagaccattctttctgcattgaattgtcttgctggctttgtaaaaaaaaaaaatcaattgactgtaaatgtaaggttttatttcttgttctattgagaaataattcacatactatattattcacttttttaaagtgtgtaattcagtggttcttagtgtatttacacaatggacaactgtcaccactatctgattctaaaatatttttatcattcccacaaagaaacccttcatgcattggaagtcattccctccagcccctgacaaccactgatctactttttgcctttatggatttactagttgtaccttgttctattctgttctatatgtgtgttcttattccaaaattattgcgctgtcttgattactatagttttatagttaagttttggaatcaggaagtataagtcctccaacttcttttttcttttataagattgttttgataatttcaagtccgttgtatttccatatgaattttaagatcagcttgtcagtttctacaaaaaaaaattgagattttgagaaggattgcattgaatctgtagatcaacttgggaagcgttgtcattttaatgatattaagtcttcttagattcttttttcttttttgagatggagtcttgctctcgttgccaggctggagtgcagtggcgtgatctcaactcactgcaacctccgcctcccaggttatcaattattactaatacaaatatttattggatttttgctatgtggtagtctctacaataatttgttttacttgtgttatctcatttaatcctcac

SEQ ID NO: 1484 - DNA, 2510 bp, Homo sapiens
cgcctcccggccccctccccgcccgacagcggccgctcgggccccggctctcggttataagatggcggcgctgagcggtggcggtggtggcggcgcggagccgggccaggctctgttcaacggggacatggagcccgaggccggcgccggccggcccgcggcctcttcggctgcggaccctgccattccggaggaggtgtggaatatcaaacaaatgattaagttgacacaggaacatatagaggccctattggacaaatttggtggggagcataatccaccatcaatatatctggaggcctatgaagaatacaccagcaagctagatgcactccaacaaagagaacaacagttattggaatctctggggaacggaactgatttttctgtttctagctctgcatcaatggataccgttacatcttcttcctcttctagcctttcagtgctaccttcatctctttcagtttttcaaaatcccacagatgtggcacggagcaaccccaagtcaccacaaaaacctatcgttagagtcttcctgcccaacaaacagaggacagtggtacctgcaaggtgtggagttacagtccgagacagtctaaagaaagcactgatgatgagaggtctaatcccagagtgctgtgctgtttacagaattcaggatggagagaagaaaccaattggttgggacactgatatttcctggcttactggagaagaattgcatgtggaagtgttggagaatgttccacttacaacacacaactttgtacgaaaaacgtttttcaccttagcattttgtgacttttgtcgaaagctgcttttccagggtttccgctgtcaaacatgtggttataaatttcaccagcgttgtagtacagaagttccactgatgtgtgttaattatgaccaacttgatttgctgtttgtctccaagttctttgaacaccacccaataccacaggaagaggcgtccttagcagagactgccctaacatctggatcatccccttccgcacccgcctcggactctattgggccccaaattctcaccagtccgtctccttcaaaatccattccaattccacagcccttccgaccagcagatgaagatcatcgaaatcaatttgggcaacgagaccgatcctcatcagctcccaatgtgcatataaacacaatagaacctgtcaatattgatgacttgattagagaccaaggatttcgtggtgatggaggatcaaccacaggtttgtctgctaccccccctgcctcattacctggctcactaactaacgtgaaagccttacagaaatctccaggacctcagcgagaaaggaagtcatcttcatcctcagaagacaggaatcgaatgaaaacacttggtagacgggactcgagtgatgattgggagattcctgatgggcagattacagtgggacaaagaattggatctggatcatttggaacagtctacaagggaaagtggcatggtgatgtggcagtgaaaatgttgaatgtgacagcacctacacctcagcagttacaagccttcaaaaatgaagtaggagtactcaggaaaacacgacatgtgaatatcctactcttcatgggctattccacaaagccacaactggctattgttacccagtggtgtgagggctccagcttgtatcaccatctccatatcattgagaccaaatttgagatgatcaaacttatagatattgcacgacagactgcacagggcatggattacttacacgccaagtcaatcatccacagagacctcaagagtaataatatatttcttcatgaagacctcacagtaaaaataggtgattttggtctagctacagtgaaatctcgatggagtgggtcccatcagtttgaacagttgtctggatccattttgtggatggcaccagaagtcatcagaatgcaagataaaaatccatacagctttcagtcagatgtatatgcatttgggattgttctgtatgaattgatgactggacagttaccttattcaaacatcaacaacagggaccagataatttttatggtgggacgaggatacctgtctccagatctcagtaaggtacggagtaactgtccaaaagccatgaagagattaatggcagagtgcctcaaaaagaaaagagatgagagaccactctttccccaaattctcgcctctattgagctgctggcccgctcattgccaaaaattcaccgcagtgcatcagaaccctccttgaatcgggctggtttccaaacagaggattttagtctatatgcttgtgcttctccaaaaacacccatccaggcagggggatatggtgcgtttcctgtccactgaaacaaatgagtgagagagttcaggagagtagcaacaaaaggaaaataaatgaacatatgtttgcttatatgttaaattgaataaaatactctctttttttttaaggtggaaaaaaaaaaaaaaaaaaaaaaaaaaaaaaaaaaaaaaaccc

SEQ ID NO: 1485 - DNA, 2298 bp, Homo sapiens
atggcggcgctgagcggtggcggtggtggcggcgcggagccgggccaggctctgttcaacggggacatggagcccgaggccggcgccggccggcccgcggcctcttcggctgcggaccctgccattccggaggaggtgtggaatatcaaacaaatgattaagttgacacaggaacatatagaggccctattggacaaatttggtggggagcataatccaccatcaatatatctggaggcctatgaagaatacaccagcaagctagatgcactccaacaaagagaacaacagttattggaatctctggggaacggaactgatttttctgtttctagctctgcatcaatggataccgttacatcttcttcctcttctagcctttcagtgctaccttcatctctttcagtttttcaaaatcccacagatgtggcacggagcaaccccaagtcaccacaaaaacctatcgttagagtcttcctgcccaacaaacagaggacagtggtacctgcaaggtgtggagttacagtccgagacagtctaaagaaagcactgatgatgagaggtctaatcccagagtgctgtgctgtttacagaattcaggatggagagaagaaaccaattggttgggacactgatatttcctggcttactggagaagaattgcatgtggaagtgttggagaatgttccacttacaacacacaactttgtacgaaaaacgtttttcaccttagcattttgtgacttttgtcgaaagctgcttttccagggtttccgctgtcaaacatgtggttataaatttcaccagcgttgtagtacagaagttccactgatgtgtgttaattatgaccaacttgatttgctgtttgtctccaagttctttgaacaccacccaataccacaggaagaggcgtccttagcagagactgccctaacatctggatcatccccttccgcacccgcctcggactctattgggccccaaattctcaccagtccgtctccttcaaaatccattccaattccacagcccttccgaccagcagatgaagatcatcgaaatcaatttgggcaacgagaccgatcctcatcagctcccaatgtgcatataaacacaatagaacctgtcaatattgatgacttgattagagaccaaggatttcgtggtgatggaggatcaaccacaggtttgtctgctaccccccctgcctcattacctggctcactaactaacgtgaaagccttacagaaatctccaggacctcagcgagaaaggaagtcatcttcatcctcagaagacaggaatcgaatgaaaacacttggtagacgggactcgagtgatgattgggagattcctgatgggcagattacagtgggacaaagaattggatctggatcatttggaacagtctacaagggaaagtggcatggtgatgtggcagtgaaaatgttgaatgtgacagcacctacacctcagcagttacaagccttcaaaaatgaagtaggagtactcaggaaaacacgacatgtgaatatcctactcttcatgggctattccacaaagccacaactggctattgttacccagtggtgtgagggctccagcttgtatcaccatctccatatcattgagaccaaatttgagatgatcaaacttatagatattgcacgacagactgcacagggcatggattacttacacgccaagtcaatcatccacagagacctcaagagtaataatatatttcttcatgaagacctcacagtaaaaataggtgattttggtctagctacagtgaaatctcgatggagtgggtcccatcagtttgaacagttgtctggatccattttgtggatggcaccagaagtcatcagaatgcaagataaaaatccatacagctttcagtcagatgtatatgcatttgggattgttctgtatgaattgatgactggacagttaccttattcaaacatcaacaacagggaccagataatttttatggtgggacgaggatacctgtctccagatctcagtaaggtacggagtaactgtccaaaagccatgaagagattaatggcagagtgcctcaaaaagaaaagagatgagagaccactctttccccaaattctcgcctctattgagctgctggcccgctcattgccaaaaattcaccgcagtgcatcagaaccctccttgaatcgggctggtttccaaacagaggattttagtctatatgcttgtgcttctccaaaaacacccatccaggcagggggatatggtgcgtttcctgtccactga

SEQ ID NO: 1486 - DNA, 63294 bp, Mus musculus
  misc_feature (3478)..(3794): n = a, g, c, or t.
  misc_feature (7386)..(7433): n = a, g, c, or t.
  misc_feature (9273)..(9758): n = a, g, c, or t.
  misc_feature (11328)..(11347): n = a, g, c, or t.
  misc_feature (17356)..(17375): n = a, g, c, or t.
  misc_feature (21543)..(21986): n = a, g, c, or t.
  misc_feature (30816)..(30835): n = a, g, c, or t.
  misc_feature (49223)..(49242): n = a, g, c, or t.
  misc_feature (61489)..(62638): n = a, g, c, or t.
tgttcctgtggctttcaggaacctaagtcaggtctcaggcatgttacaccaattacctttgcactctgagctatcttgctggttccctctttatttttgtttattactttaaagtaattttcccccctgagatacggtttagatatatagccctggctagcctggaactcattgttgatcaaattagattcaaattcacagagatcagcttgtctctgcctccccaccgacagaattaaagacatgtgccaccagcccaggctttctctgttttaattgcatccatttattgactcgcttgtatgttggtgtgggtgctccattatggggttggaatggataatgaagccaggaggtcaagagcatatgttaggggatgtatcctaaagccttgcttagcagaacagaacactatttcactagaatcttttgtaaggagtagaaggcaggatactgctgagaggggttgtgcagtggtaatgggcacctgttctgtaactacacaggccaaagtgttaaccctgatcttccacaaaagtcactcctgcctaggtcttccttcagcctcctctgtcaaaggggagagaaaaggctggctcctctatggaatccatggcttaacctctgtagactgccgagccatttcatactggacccgagcttggcctgccttagtaaatttaggagtcaaagatagaagaattggaagttcaaggccaggcttggctctaagagatcccgtctcaaaacaaaacaaaacaaaacaaaacaaaacaaagcaaaaccatggggctggagaatgactcagtagttaaaagtgttcactgttcttgcagaggactggagttcaggtcccagcactcacagcaggcagctcatagctacctgtaaacccacgttccatggatctgatgccctcacctgatcttcaacagacacctgcacacaagtggcttacatacctcgaatgtgcacactcacaatgtaagactgatgataaaaacaaagaaccctgaacttgagctatttattctccataatagttctggagggagcggtacccccatttctctgtcaatagttctaggagtgaactctcgcctcccccctcccttgttgggctgttacacaggagtcggtactgctgaatgcaagcaaacagactctttatgtgtgaagagagcacaagggctggtgatgtggagcacccaggacacatcgccactcgtggaactacagccctgctcataccaagactacagcagtcataccaagaacctctacactgatgctaggaagttcagaaacccaagccccaggaatccacctggccccccaaaagaactttaagagaagttaacctacatgacaagataaaaatcagagctattctgatagaagatgtgtgtgtggggggggtttgggggtgggggtggagagggtgtctctgaggttacaatcactacttccccatcttctccctgcactatcatcttttaaaggtcccaggatttccccggagctctgtttggaaaccctgactggtttacggaaagaatcagtttcaatgccagaagacctgactttcaccaccatgatctccccaccatgaaggactagaccctcggaatggcagccaaatataaatccctccctccttatgttgcgtttttctttattttgtcatggcaacacaaagtaactactctggaatatgcaagttacctagctttagcactattaggggtaggagccatgtgacaccctgctgtggtggcttttcttggcactgtagtatactcagaagccttcactctgactacctgagttccattcctaggacccacagggtggaaggagacaactgactcccagaagttgtcctctgacctccacatacacactaacagagaaatggtgagagaaattaaacaaattattattattattatcattatgaatcacaaccagataacagtgcacccctattcttgagttatgacaacaaaaaaagtctctggatattgcctaatgtcccctagagggcaaaatgaccctcagttgagaactagtaggtacgcaaacttgatatgcaatcaaactgtcactgtgtatgcatgacaaacacatttgtaaatccacttataaaaggacagaaagagggtagaacttgaaggggagggaagctgtcaggtaaataccctctctctttcctccaactgcagctcagtcccaccatcacagagcatgcacacggggccacagttctgtaccagcctttacccaggcttcatgcttccctgaagcaccccttccccagcctgccccacgccactggcatgggtaattcttctccacccttgctaagatggatgcgttaataccagcaaactatttcttaatctcctaagcctcagctttgaatctttaaaaaggaaagagaaacggcacaaatctcttaattaggacgcccaatcacttcgataaatatttacccggttccagcatgaggcatggaaacccggcgccattagtcaatagaggtcagcaaagtgcaccttgggaacagcaggatgcaattcagcctagcttgggaggaggtgtcaggagaatgtttccagtctcgggctcctgctaaagacaggtgaacaaacacattccatacctactgctgcacacctgccccgcaccaagtcccaggtggacatggcagcctatttgtaaaccatcacctggtagtctggttgcctttgctttctggacagaggtagtgaagctaccgagcagatccagtattctgggactctccagagagtcctagctgtgctgctttggtaggtattattatctggaacgctactctcagtcaaccaaggtcacagcacttcccaagcagctaccctcattgtcaactccaactcttctgcccagtatttcctgcattgagttctaacactgcggctctacacatagcctagccttgtctatccaaaggcaagggcttctctcacattctggtaagctcttggttggactaacacccagacaccattcttcccattttacagctgtagaaacagagactgaagaagtggactcttcactcctgatctaaataaatagcctttggggacatcctccactggatgagaagtccaagataggtgtgggatgaggatgagggttggtttgtttgtttattggtgttttgttttgattttagagaagccaggttcttccttcctcaggaccaagtgacagcctgctaggcctaagagaacggctctaaagaaggaaggctaccttggaaggctgcaggagagggaaggcttctcttggtctcctccgcctactagagaacttttgtctacactcctgggctgagctcgaacccaatctttccaaaaggtcctcttctcactactcgaatttccctctgaatcagactactttatacatcttatgaactcgctggcannnnnnnnnnnnnnnnnnnnnnnnnnnnnnnnnnnnnnnnnnnnnnnnnnnnnnnnnnnnnnnnnnnnnnnnnnnnnnnnnnnnnnnnnnnnnnnnnnnnnnnnnnnnnnnnnnnnnnnnnnnnnnnnnnnnnnnnnnnnnnnnnnnnnnnnnnnnnnnnnnnnnnnnnnnnnnnnnnnnnnnnnnnnnnnnnnnnnnnnnnnnnnnnnnnnnnnnnnnnnnnnnnnnnnnnnnnnnnnnnnnnnnnnnnnnnnnnnnnnnnnnnnnnnnnnnnnnnnnnnnnnnnnnnnnnnnnnnnnnnnnnnnnnnnnnnnnnncccccccacacacacacgcagaggaaatgggccagatgctgtattcccccatctgttagtacttcatcagggctaccatagctaactgttattgatcacttaatgtgccagggctataccaagtagtacttgaacaatctccattgatctgggaaagcaatagtccaaggtgggcagggccattattctcttcactcaacagaagaggaaatagaggcttagaaagagttcacaagtgccccaaagtcacaaagcttgacccagctagagagttggaagagggtttaagagactgtgggaagtcccttcaccaccaggagccacagccctctttgctgaagtgagctaggctcctcttactgccctgactggcagggcaagtgtcattaagttgtggactctggagctgagttgcctggactcaagtccatcaacccccacagtgaccttgaggaagtcattgtaccttggagtagtatcaattgcccatctgctcggtcgggggaatgacatcagtggctctaccctcattctttgggtgaggattaaacttgttaatatttgcccagcgcttagactggaatctggtgcagagtgagcactatgttaagtttgttaaacaaataacaaactccccttctggccccatagtgaggcgctagcctgtagaggaagatctgggattagtgatggatggggttggaggtggggggaggttgtgtgtctgtgtgggatgaactttccttagcaatgaacagggcagaagaaggggaccacagaatccaccaaagagaggtggctggccttgaggaagaagactctcttttttgggccagctccaacaagaggcttcccaaaaatctgggccagtagctggtgggggttgggaatgacaggaggggaggtttacaaccccaccctaggccttgagatcagttcctcaaaggataggccacagtctggtggctagccagaagccatttttcttaattccggaaaaaaaaaataacacttgtctaacgtgttttggatttattttgaaggaaccagagaagcatctctgtccccacctcaagttcccacagtcatcttacatcccaaatgaggagctgggggccttccgctgatgcagatccatcccggactttccagctcaccgcgtgactttttttttttttttaatgtgccaggaattcctctcccacgtggggtggactccgaggtactcaattaagcagccaatgaaaagtcagctctccggtagcaaatgaccctgacacttcttgtaacataaacagttgaaacgcttccaattagaactggagacagagctgtttgaagtctttttcttcagtcccctccttctttaaaataattgtcaagcgcttcggacagtgtgttgtgtgcatctttctctagcataaaataagctcatttccatttcttacaaaatttgtgaggtggcatgggggtggggttctgagcagtagtgagttttgagcttaagggacctgaaccaagttaccaagggccctgcttccctttcaggctctgggttctggttacagaagaaggaagaagaaggaaaaaaaaaagccgaggtgatacggtgaactgggagccagaggctcctcaaccataccttcagagagggttagaatgaatgaatgagtgaatgagtgaatgaatgtctttcagtaaatgctcatatagattcggcttgcacaaacaaaggagtttggccgtggatctggctgtcctggattccaattctctctgcctagctcgcggcctattactaagctttgtttgtgtatcagcccctcttctactctataagacgggccgtcagccaggccttgggagtgaagtgaggacgtactgggtaaccatggccgctttgtacctattaaacgctcaagggctgtccttccacacagtggggagcgctgctgcaagcagttcggctctgccgtgggggcggcgctcggcaaaaccgcatccatcacgctcatcatccgtgtggcaggccgggtgctggcgcctgggttcacaggagaactcaatgtgaagtctgccttgcactagctcacgctgactagtggggtccttgggagcatcactgccctggcaggagacgcggagaccagagacagagctgcggcgcttttctgtacacagtccgcatagacaggacctgaaagcccaaggcatcggcggccgccaggaggagggcgccgtccgacccagtccggagggagacggaggagagagaggccgagtaaggcgccttggcttgggcatcttgaaggcattgtgtttaataaatctgggcgaaaagcacacccgctcttctccccccccccttttctcggctcccaaatcaagacctgctgtacgacccccagtttaaggggtcttaaaacccctgcactttgattagcagcttcaaagagatccctttaaagttccccttcttccccaacctcacctctcctcgacacccatccccccccagcactcctaagaccagaacaacaacaacaaaactaaatgcaagtttaaaggggggcggtggagatggaaaatctcagacttcctcctgaacgcggcccatagaaattacctatttcagacgtgcgcaggagtaggaacaccgtggagtttgggttttgattttcttccttttttttctttctttctttcctttttcttcttcttttttttttcttcagggtttgtgtgtgtttttaccttttattatttaaattgatacgtttcattactagggagaaaaataaaatattcctttgatacacaaaatcaaattgatatttagcctctgcttacttttttatgcatggctcctttataccacatggtagtgacagattgtttgagctggaaggaaaagccattcaaagctaattaagcagccattccaagcactatttgcaagcgggaggctcagaagcctcggcatttgtcagcgctcccccacccctcgtggttttgactgacagctctggctaaggactgacagctctcggaatctccaccaattactagtcgagagtctctttgctggtctgtgattgggttttagacttgctcgggggcgtggccggcgcgccccacgtgggggctggagcgagaaaggggcgggccgggtaggaagcgggtgcgcccacccgtgacgtaagggggagggcagagaagggggaggggagagggaagctccaaagaggagccattttgagactaatggatgctttggccagatgctcgcatctgtcgagctaggcttctccctgccccctcccccttttcggtgcgcatcgtacacgatttatgtttttatttaggagaataaataaatgaagaggggagcgtggtcgaggccggagcgggcgctgagaggctccatctcggggcggccgctcacgtggaggtccccgcgcgctcccagctactcattaagatgcaaacgcgaaactcaggctcctaatgaggggaaaatatagattccgggggcgcgcggccggctcgcgcgcgcccgcaacgggccaggagcgtgtgcttgcgtgcaagnnnnnnnnnnnnnnnnnnnnnnnnnnnnnnnnnnnnnnnnnnnnnnnnacctgggcggcccactcggcgttggttctccgaggcccgcgggacctagggtgggcagtgtgccctgaacgtgacccttgtctgcgagcagatgggccccagagtcgaatatctacgcctccttgggtgtctatgctggtgaccagggacgctccaggctcgcagtcgctcttccacgggtggctgccgatgcatgtgcccaggcaggccatcaggccaagaaacggggtcggaactctgggttcgtagccaggagggccccaactccgtgctttcccttcttcaccatctcgggcccggagcactgctgaaggaacccgcccttggcaaggctgcggccaggacgtagctgtccccaaagggcaagagccccaaatggggctagccgcactactgagcctgttgtccgcagactgccaggcccttccatctgcgcggcccgccaagccagagttctcagacttccccctcgccggcagccgccttgcatcagaggcgctgtttatttggctttctgaaaagaagggcgaatgaacaaaggagaaaagcggggcgcccaagggtgggagagggggcagaaacggataaaagaaagagaaactcagtttggagaacagtcttagaggtcggaggtaactttgggtgccagcattttatcggtcctaaatcttttgaagtgaaaacattaaactgacaaagtgattctgtttgttttatagtatctaattgggctgctttgcaaccctaatgagattagaggggggcaatcgttcgccgcctctgcagaatcaactgatccattactaccagccacaggttttaaggattgtacagcttgtccttttttcccccccttttgttgttactcgttttctccttctcccctcccgccaaataattatttgctagtagatcgtgggaaaaaaagaagaaaaaaaacctagcagcccaggactataatatatatctatttattatatgtctttcggttaattcctgatgtgaggagcgctgtttttcactcccaagcgaaagtcaccagcgggtagggcctgattgctacttttcatgcatagttttagacacaagagggcattgtgacgtcgcgcctggcggcgcccagtcgcagtccgagtcccgtggccccacgtgggagcctcgcactcccattggccaacgctaggcgaagccgccacattattttgttacttttcagtccctatttggaactgctctcgcggcagttcagacctcgtgctcggcccccttcgcctgtctgtgtgtggtatccgcaggtccgaggcacttttttttttttttgagtgcgtgtacgtgtgtgtgttgagtgcgtgtgcttgtgtgttttgggggtttgtcggggcgcggagaggagagccaggctgggaggaaggaaagaagccgcagagctcccgggctcgggctacgtctccccctccggtgctctccagcctgcgcgctcctaggcggcaggacgcagaccgctcctcgccagagacgcggccgatccacttgaaagcagaggaccccttcgccgaggcttcctatgccggctggagttaggatgccacggctcattatttgcaccgactgagcccggagttcctcctcgaccctgggaagggctggcggcggcggcaggagcagacggaacagcaggctctcctctccgaggggggtgggggggcgtcgaagcgtcctcgctgggctctagccctcacccacggtcctcaagccgtcacctcggtggcctgcttcctttctcttctcgccgcgagctccgggcccgaccgcctctgggatctgacccgcgcgccccggnnnnnnnnnnnnnnnnnnnnnnnnnnnnnnnnnnnnnnnnnnnnnnnnnnnnnnnnnnnnnnnnnnnnnnnnnnnnnnnnnnnnnnnnnnnnnnnnnnnnnnnnnnnnnnnnnnnnnnnnnnnnnnnnnnnnnnnnnnnnnnnnnnnnnnnnnnnnnnnnnnnnnnnnnnnnnnnnnnnnnnnnnnnnnnnnnnnnnnnnnnnnnnnnnnnnnnnnnnnnnnnnnnnnnnnnnnnnnnnnnnnnnnnnnnnnnnnnnnnnnnnnnnnnnnnnnnnnnnnnnnnnnnnnnnnnnnnnnnnnnnnnnnnnnnnnnnnnnnnnnnnnnnnnnnnnnnnnnnnnnnnnnnnnnnnnnnnnnnnnnnnnnnnnnnnnnnnnnnnnnnnnnnnnnnnnnnnnnnnnnnnnnnnnnnnnnnnnnnnnnnnnnnnnnnnnnnnnnnnnnnnnnnnnnnnnnnnnnnnnnnnnnnnnnnnnnnnnnnnnnnnnnntccctgccatgtatccgcaaggcagacatccggtgagtaattgcaactaggcttatttaagcatctatcatggcagggtaaacgaggcagtttatctagcacctccattttgcttgttgctacctttatggtgcgcgcgcgtgtgtgcgctcacacaaaggggctgggtgggtgggggcgccgtagagagccaagggtaattgcgctcgagtggcccgggcggcctgcgttggagggggacgctggcttccgccccggcccctctcctaagtcttccaactcgcgctctcggcacttggccgccagagcccttttggctttgggggtggtcgggatgcccgcttccgggccccgtcgggagagcgttgaaaaacttgctgggaaggttctgggctgtggggtggtggccttgccggaggctcccggcggggagggggccagggacccagaggaggcacggggccgcgtggagcccttctgatgtgcccactcctctcccctatgttgtccttgtgggctccaggcaccccatcaacccgggcagccgggatttaaattcactgtggccgagtcctgtgacaggatcaaagacgaattccagttcctgcaagctcagtatcacaggtaaggcgggtggggggtggccccgggctggcgaggagggcggccttgcgcgctcctgctaccccccccccgcggggccgagggggacgtcgacccccggctgcggggcggctgggcctccgccttttgtttcccctcaccgagcgcgcagccttaaccctttgcgttctgcgatctcccagctcctaaagcccgccctgtcgagggtcggggtcttgcgccttcgtccgggcccgcccccgcgtggccgagacgagtcccctcgctagatcaagggaagtttggagttggtactgctaggctccgggtggtgggcagccaccctcactgcccggaggatgctagagaatgggttactcagggtgccgggcaagtgaagtggtcctcctaggccctagggtccaggtctcgaaggaggcggtgtaagcgccaggcctgagagtctcttcctgccctcacagcctcaaagtggagtatgacaagctggctaacgagaagacggagatgcagcgccattatgtgatggtgagaggcagcccgcagcagggcggagggagggagggcagggcagggcagggcacccaggctttgggacagtcgcagacccgagctaggcccagcttcaggacagccccctggagggctcccttcttcagcttcctcttccctgccacttggaggccgaaagagaaacacattcctggccacctttgtaaagagcatttcagttgtgttttgaaggtttcccagagggctggttgccttaaactggttagaaacataagagtcaaatgagccggtgtcagggttgtataaaaatccctcttggagccctcctgggagtgtttggaaacttttgtttggcagaggggatctaggcagaatgggacaggagtgcctacctttcttccccagagtttttccagattggaggagcctttttaannnnnnnnnnnnnnnnnnnngagccttttaaagccctctgcctcccgtgtcccctcctcaagtatttcctcagttgggactctggtcctccccccccccccccccagctagatatcttttaaccttgagttcaagttgacatctttcgtttgggagtgggtatgggagccacttaagggcaggccagcagcaggctttccacataagagaccttccacccagtgctaaccaactcccagaggacaagaggagacgggtatacagcgttccctgtagagcctgcaccttgtataaacagcacatatggtacagggggtgcctgtgggagggggcacatatatttttgtgtatagtattctgagtggagaggaatgcttagccacttcccctatcagcgttgacacctttgtgggtgggtggactttagtggctttggacccagtgaatggttttgttaaagccttgtgagggggaggggtaaaatgagaagtgtcctggggttgcctgttaatgaccctttttctttttttttcctttttctttttttttttaattttgtagtactatgagatgtcctatggcttgaatattgaaatgcacaagcaggtaagtactttccttttttatataaataatatatatttaaattgtaagatgtgtgatttctttggaggtctatcctcccatttgaaagtgagcctggttcttttttgtattcccacttggtcttgaaggataaatgttcagtgagtggtctgaatgaaggcctggtgcctgtctgggctctgctgggttatattgggcttttagcatttgtgaacttaggcctggtctgggatctgggtggataaagacccaaagacctaagggaaagttgtccagttgtctcccaggagctgtgtgacacccggaggtagagagttggctgtctgcttctatctgttttaatgtaaaattttcaaaaaggaaacataggcagagttccttgcccctcttctttcttttccttgcagagagagacagagagagagagaggtactgccttgataagattacacttcaagggcctttaaaagccaggctgagctgttgaaatgtaagggaatgaagccactaacggcctagaaaacttaaagccagagtgaaatgcaatcctgtgccttgcgtttaggaggagtttctcaactctctttatttgaaggcagctgtgtcccatttcacaggaggaagctgaagcccagaggtgaagtaacttgcccaggggccagcctcaccaggccttttgagccggctggcagttgagctcagctttgtaatcctgaagtcaaaccagtttagctagtgtggtatcctttgatggatatgtaaactacctcacattgtcaccctctaataacagtatacctcaaacccagcaaatacaaacactctttatctcgagcatatcagtagctagtcctgagctaggccaggctgtgggagaggcctgtttgtctatttgtgttccaaggagaggctgcctataatttggcttggcggacgattagcttcgacttggcacgtataaatggcgcaggccggttgttctttttaacaattggtgttcttgaaatctcagaaggctgttgactcattctagcctttggtgaccgtgacttgaatggattttctgctctaaattaacagtcatttacaaggtttaaattttgctctttaaagggggcagggcccagggcaggtgagaagggcaggtgaccctgagggggaagtgtgcagattcctgtccagcaccagtggcttcttttgaatctagtttcttttcccttcctgtagggagccccgccattgggtgaagggtagccagagaggggccagcatttagtgagtgatgtgggaagccggctgtggtttcctgaggaattggttccctaggcgtgcacacatggaggctaccacatttggagttcttggcccacagaaataataaacaaacactgctttatatgtgaagaaggttctggggaagataggcagaaatggcttctgccttctaggtagaattggtccagggtcttgggtgttttaaggactttggggggggtatttattcacagtgcaaggtacttccacttcctccctttctccagtcctctccctccttggtgaatagtatcttgggcgtgttttaaagagggtaattgcacccaggttcaaaatttatagcagtagttgttgttataagagcttctaattaaggtgtaatatgtccttgcatgtcgagggctgcatgggtggtgttgcccgcgtctgaatacatggttgtttggcacaaagaagtcaccttggccgacagagcaaagctattctgagccccggggatgctgtgaactcagaagagctaagcatctcaatgctctcttggtggtgggacttctgtgcagagagcggctgtgttcatctgggatatctggccattcctcacataggattctcagatgagaaaatgcccgagatctggccacattgtcgttcatcctctcagccaggggtgggagagagggacccttaccctcttttttataggtggggagaccaaggtatccaggaagccctcatggcaagacctaggggcttatttcagagcctctgggttctgcagctgagctgccatgctccaggtgccttccagccccttcccggcttgaatgcaggctgagcagtctctgggttgggtgaactcaccctgtggctgtggaggaacaaagaggcagagaggtggagaaaccctgactgggaaacagggcagtacacccctgacctaatggcgtgctagccactccctaggcttgcaaggttttgtagaagaaaaccctgccactaattgtagtgtgggtctcgggtgcatttggcggatggtggttaggcctgagcaaacaagtttatcagctgacctgtttagcggttgactggtgttttatctgcacacacaatcaagtgactggagtgcttgaattattcatgcagtgtcctgccctctagacttgactgtgtgattacatctgcctggaacaaacaggctggattcttcatctttaagcgagtaggggtgggggtggggactggatgtacttttatataatagtctacagagctagcaccttgggaaaagtctgtctagtcatcctcaacctacacacacacacacacacacacacacacacacacacacacacacgcacttcaccaccaccacatatttttttcaaaagctcttcttcactggctccatgggaaataccaattagctgagaacctttcgttctgccagatggtccctggtattgacagagggcagctgatgaggtacgtccagcccgtttttattttactgagaggttaaactcactgtggctggctctgtccctggctgtgcccccccccccaatctctcttccaagctgtcaaatctcagagaagtaataaatgggtcctcctactcttctgcctccctccctaattatggtaaagcaaagattacagaatcacaggcctggcctgtgacttgaagaggtcaccacctcccccaggctcctgcttccaggcagagtgtcaaggatgattcagcgagggccaggaggcgatgatggctgaccgaccggcccatcagttcccgtcttgttcccgtagtgcctttccagtgtcagcagcagatgacaaagccagcttagaaacagactccagagcaactgtcatgcagtggctttgaggcgtggtgctgggggaagccagccgggaggctggcctttcaccctctgttggtgagcactgatgtttggcaagctgacttgaggcattttgatttgggggcagcatcatgccaatactagacagtcactattttcagtaacccaagcaagtcccagagccccagagctggaagagcgagcgctttggcttctcatccaaacctttgaagtcatggatgaggaagtaggctcagagagactggagctggcatccccagactgccacagtcacaggtggtgggatcgaatgctgtactgcagacttgccctccctaccccaggactcctctggagccagcccctttccgtaacttcgtagcatgctgtgtctttaattacctctgcttgtcccatgctatttattatccagccaggctcaggctgcaaacttggctccaccaaagtccaaagtaccccatttggggttgtataaccgtgtcagctgaatgctctgtgtccacagacctgtccccatttgccagctatttgcacaactaatgattgtgtgtttggtaataagacagagggcaggttcacagatgaggcgaaggtggtaataaataaataaataaataaataaatccctcaccgttttaccctgaccacaaggtggccatcggcacagggctgaggactgaaggccgaccataggcaacagttttctggaaagaccatgccaaagagttgacaggctttggtggcagtaggatggggatgcaggccctggtactaggggcagtgcctgtttgtgtggcatctgggttgagcggtgagattgacttctttgccgggagctccttcattcccccacaccgtgggttctttgactttagctgccttgttgctctaccttggaattgtgggggttgtgtgatctccccagcagggcaccatctttgctgtaccttgggaattactgagcctgaagctctttttaactttgtcccatccagctagagggtgacctaaccctctcatctcaggcttcagtggatcccttgtctgtggtagacgatagaagtgtacagagcaaagctttctgtactcctcccgagtcttttccttcttgtacacctgaccattgagatgaccttaggactagatgaagatagagaagcctgctgggaagccctactcccaattctactattccatgcgctcttctgagcagggttgtgtggttaccggggctccttttctccctgctctttagaattctccctccacccaggaagaatctcatttacttagggactcctttactttttggtcctcaatgccacattgttgaaggggattgttgaagggggagagagttggccaagaaatataaaacattttccatataggaaaatgtttttctgcatcactgtataaaatccaggaacaccaggagccaggaggagataaacagctctccgcagggctcgcccgtgatctggcctcgtggatctgagatgaaccacttcatctcagagcagtggaggatgcccctttgccaagcacacagtgtgtaataggtgctcagtaaacacgtgagggtttccttctttgggttgtgggcgggtgggtggccctacactgcacagagccctgggaaggaagtggggggttgtcattgtgggctgcctgctggtctgcagcctctctctgtggctgagcatacagtctcctcatcagcaaaatgagagagttggatccattcccaaaacggttattaggggtctgggatgtgctgggtgtgggcccgggcttggttacccagccgaataagacaccattccctccactggggcatcaggcctctaaataagtaattgcgatgcggtgaggtaagcgctaatgtggccgcagcgacacttgcttcactcttcctgggaaagcagagacgggtcagagaggatgtccctggaggaggactgttacttgagtggggccttgcagggagggtgggaggggagttgttaaaggcagacgccagcagccagagctcctcccaggtgacaacagctcctgggacggcagtgaagtacatttaggaagccacagtcaggaagagtggattgggggagggcaggggccgcacttgagaactgagaaggtggtgatattgtacagcacagcattatccgaaggcctctccaccctcacagtcacgactcggtggctccctctgtccccatatggctctccagggctggctccagtccatctggcaggggnnnnnnnnnnnnnnnnnnnnccccaagtggcattgtctcctttctcatactggtaattctgtaatgactgggtatgacctgcccctcccccatatttaattctcatcagcccggctctccactttgctattaatgatagcagccagcaaaatagctttcaacatgccattgacagtctggcttaagagcgcacttgaggcagtgctagacagctgaaagcacccataattgtgtaccagagtgagaactgcatgctcaagggtcttgtttttatatgcttaaagggacaatatcttgttttcaacaaatgctctctgagacacatccaagatgctttcttccttcctcttgtattcctcctcttggctctttctctctctggcctttcagaataaaggttcctccctaccccccacctccacccccaaccccaccccatggcttggggctgaaagaacttatagaagaggagtgatctactctgagagcagtggcagaaatccactaggctcgcccaaggcatcatccactcccaacccaaaggccagttggcctttccctgctgacaccagcactggagcagagacaagtgttggctggcatagagttttcaagtccttttgttggctgggcatggtgcatgtcagccagagactaggggattcgagctactgagctgtggctgagtgcagaggctgccatgataggacatggagaataggtaagccttggagctagacggagtgccaagtctccctgtctggtcagataacaggaggatcacccttctgcagagcccttgggtctaaggagcctgtctggaaaaccaggagggcggtgtatgggactggtattcttaactgaaagattgtaccacacttgaggggagccagaggaggtcgctgataactccagagattttactggacaagaggtcccctttttcttcacttcatccaccatcggtggcaaagtacatacccaagtgcctagctatgggaaggggaggagtgaggtccaagagccagagaaaccctgtctgtaaatggtcctcacttctctccatagccaaatttctcttgggggaaaaaaaatggagcctgggtcccttccctttacccacgcacgcctcgagtgacagtctgaagttctgatattgctattactacatccttgcatatgaacacacacacacacacacacacacacacacacacacaaacccaggtgatcgtgcaaatgtcagagacgagagtaacatggccgcttgagattcctgtagcacttgactgccaagcaggtgaggcatttttctccggaaatactggggcgtttgcttccagaacccgaggatcagacaccagaagagctgggtgtgggtggaggtgacctgtgtgtgcctggaggggcttgcccgtcgattcgggtgtggtggggtggaggtgtggagcccgggactgaggaacaggagtgttctgtgctgactgagccttgctgtctgcctggcagtgaggtgacaacacttcatcctgtaggagactcactcggacactgcggtctaggcttctcttcctgattgcctgctgaccaaggttatggttgtaaaagggatgatggtcagtgacctgtaccttgatttggagagtcttttctgtttgttttccttgttatctcctatcaagtcaaaggggggaagtgggggggagatgcagaagaagggggtgataaagctgaggtgtggagacaggaatgaggaagcgccagggaacacctctctgtctgggctgcttgaagcttgccttaccttggcgtttggtggtggggttcctagggcgtggcctttgtttatcttggcttgacaacctcttccaggtttgggttggttgctggtaattctgggaacgactctgaccctctttaaacttgtttatactggaagggaccatcttcccacagatggagacacaaagtcagccaggggttctttcccatcccatggtcctgtctccaggactgtgcagtccagcctgggtcaggcgggaaacccatcgtgtagccatgtgagtgaaagagagaagaggggccaaggtcactaccactgcccaagaccataaagtctttctttactccgggtttgacactgaggacattggtcagacaggcagcacacatgttgcttcaggagccagggaagaggagggcagtttagcttagaccagtgtcttggggccttaccattgtttttcctagcagagccccttcttctgctttctctcaaggaggagaccgcagcccaatttagctttgcctcagagtagaagtcctgggggccagcctggaggaattgagctcttaacagtgcttgcctctgcctgtcagtcttaggggtctcaacatgtcaccagcagctgctgctctctgctgccagggttctcctgtgtgggtttgacactaccttttatgtcatagcctaatgggggaggggtatcctgtaacctttagctttcctccaccccattctttcacttgaatctcaccccacttctcaagagaccccttctttgcagacaccttaaactcttaagtcaaaaacccagggccatacaggattagggagggtttctgacaaccctgtttttatgtgggtgagaatggaggtgtcagcagatttggagtttctcacagagaatccaggttctctagagggagagaaagaaccaggagcttggggggggtggggggatggaattctctggaaggctagagtggtgctttagagtcttaaaaatatgggtgtctgtaccttctgttcccaccagtgtgactctggacagcttcttgtcctttgtaaggttttgtgagtggtaggatgggtaatatgaccctacctgctagggtagccagagttttctaggattttcacagctgtggaagtacagcccaacgtggtcgacattagctacgtggactgctgaccaattgaaacgcgtggccctgtggtggctgaagcactgagctttagaactgatgcaaatccagttgcacgaggtcctgtgtggcccctggctttctagacattgggggtttaggaagtgcgatgggattatgggtgggagtggatgcccaggacgttagcacacagacggcctcacattgggacagataagagcctcaaaatttccaaggcctcagagagggagaagggactcaagaggagaggaaggggccgggctgcttaggttgcttaggctctgagcccatctcattgttaagtagctactcatttcagccctgcagtgtctctgattggcccagtaccttgaagcaggtgcccctgctgttggaagggtttggatgacgtgtgtggttgaaaggtggcccactggtagggtcagatcaggaccacatctgtttgacctggcctgtatcatgatcatgaaccactctgggctttggttccagtgcccacaagtctttatataaaatcttttaagaactcattttttttttaaagtgcatgcattgggtcagaatcagcctgccctggggctcttacccactggttggttgtcagcagcactgttgtggtcctgacaaatgtttgcagacattgcaaacatttgcaatgtcctgtcctccaagaaccagaattcgctagcagtgcctgaggagacctttggtataagggaagactcaggctctagacctgggagatgtggttaccttcgtcttgatctgtggagagcgatccctcgccctctctatacctcatctttggcttccgagaggtgggaggtttcctgtctgtcagagcagtcggtttgcgagtgaggagatggtgagacaagtgcctgaacttgatttccacggcctgtgaaatgtctccacgtacttgaggaaaggagacccgctgaccctctgaattttaatgtaagcaggggacgtgctccgtgcttgtgagagcaaatagaatagggctctgtttctccctactcggtccgctgtgtgctaccttggtttctcagtgagcccctgtcctcaaaatgtcaaagcagttggtttcatttgtaaccctgacctggtgaggagacccccaaaatttaatgagctgcctcagcaagggtaatgtgacttttacagcctgttgaggggcaaggggaagatttgcataacgctccaagggggggnnnnnnnnnnnnnnnnnnnnnnnnnnnnnnnnnnnnnnnnnnnnnnnnnnnnnnnnnnnnnnnnnnnnnnnnnnnnnnnnnnnnnnnnnnnnnnnnnnnnnnnnnnnnnnnnnnnnnnnnnnnnnnnnnnnnnnnnnnnnnnnnnnnnnnnnnnnnnnnnnnnnnnnnnnnnnnnnnnnnnnnnnnnnnnnnnnnnnnnnnnnnnnnnnnnnnnnnnnnnnnnnnnnnnnnnnnnnnnnnnnnnnnnnnnnnnnnnnnnnnnnnnnnnnnnnnnnnnnnnnnnnnnnnnnnnnnnnnnnnnnnnnnnnnnnnnnnnnnnnnnnnnnnnnnnnnnnnnnnnnnnnnnnnnnnnnnnnnnnnnnnnnnnnnnnnnnnnnnnnnnnnnnnnnnnnnnnnnnnnnnnnnnnnnnnnnnnnnnnnnnnnnnnnnnnnnnnnnnnnnnnncatatgattcagttccgtcttaccaagtagggtgcttccatccccctgccctctgccaccctccccccccccgaatttctaagagccctcatcgtgcagtacccctcctccacacctcgtcagtgctgcgtaaaggcccagtgggaggactgccccaggacgggtgcaggctcctgacgggggttgcagtttcttcctcctcaacccctcccactctcactttgcctggtgtgtagacttcttaacttaccagaacaaggaaggcccattgctttcaggaaagtgcctagaagggtcatgtcaccactcagaaaccccaggctctcttgctggggtggccctcgtgacttccttcctctctgccctcctctctgttcctccctctcatgggaagggcacagggcctgatgcaggaggtgtctgttgctcccaggccagctttgccgttcttgccctgtaagacagagatcttaggggtcatgcggagacacaggtgcttccctgtactcagtcttcctagcagaaaggctccagcaggctttctcggagggcgtaaatatttaatggtgttgtagttatatataatttgatcaatatgtcagtgttaagaggtcctttaaggaggcccatcctatcactaagcaatctgtgatgtaagccagcaccccctcccttccctctgcccccacaagcagcaagcatcatctcccaggctgctaaatgggtcatttatccctttcttagtcctcagcgggggtttgtagcatggagggaatggggcctgggaacaccaccctggcttttgttccttccttgttgctccctctcccctgattttctttcctttgttgatagataccacctgtcttaacccaaggagaaactgcctggccaagggcgccatcttattcagtaattgaggggctatcaatttagaattgcccaggaaataacaagggatatgtcaagtcaagattgcccagacattctggaatcttctaatacttgcttgctgggttgttatggagccctagttctgggaaggtaaaggccagagccgcttccgtctacacatagctactggccccaaactcttctctttttaattcacgatgaagcaggtttgctttagttaccccaagaactaagtaggtaaaacctgattgaaattgggggtgggaggctgtgatcccacagctgatttgatatctcacaggagtctagagaattaactggatatggagagacaggagtctgacactcctgagatcacagcggtaggctagactgagctgggttgggcgtcattggttctgtgtggctttgatgtgtacctcacactgcaggtaggcagctgtctgtcccttgtctttctcacatctatctggaaatgggtctctagactcatttgatgactgtccgtgacactgccctgatcctcacagaagaaacccttattttagagctgtaacctggaacttgggtgtgctgggcaggcagacatgctgctgctagtttaggtgaaggaatgtttctctgtgcactgagagatctgtacatacagtaggtactttgagatacatcgttactgcttgtatcagctgatgtcctgttgctgccacaaaacacctggccaaagcaacttagggggggggggatggggatgttttcatttggtaagatgcctgcactgccaacatgaggacctgaatttggattctagtctgctgaaatgcatctggactcttgttagcagagatggacagaggcaggctgaccaaccgcctgctgttcactggccagccagcccagccaaattgatgaggtcagagttcagtgagagaccctgtctcaaaagaaggtgtgaatgatcaaggaaagacacctctgagttgacctctggcctacatgtgcacacggcacatggacacaagcctacacacaaaacctgcatatcccatacacactttacataaagcaagttaagaaaggagagcactttctacttttcatgtgtaggttagggcccagctcgtgggatagcatgtctacatatagggtaactcagtctttctaccacctcagccccacccagagagtcttactggcatgccctgaggtttgtctcctgtcaggttgataattctggccaccatgtttctcttgcctgaggctctaggacagttgtatgcagtctaggtattgggcagattgaatggctcgtggaaagattggacttcaggacccagcccctagggagcaccacaggcttgcccactgtcccatcgctcatccagctgtcagggtgtgtcttggtacccatgtaggcatgtctgtggttctctgttttgcagagctgggtgaggaagtggggaattggaggtcacatagcaagtcaggctgttcagacgtgtgtggccgtctaaagtctgaatttggcccctgagaccaaaatgagctgcccggtgtgccccttcccttttccagggaatgggaaagaaagcctggagatgagaagtgtcttgcttaaactcggcggagacatctgggagaaggagctggctcatttcttctgtctttagagcttcgagtgctctttaacggggctggtttcttccccgcctcccttttggtcttgctgaggttaaaatgaaatgcgctctctcatcgtccccaggcacaggcgaccaggcagtttaaagctaactagcggtgagatggtctagtggagtgactgtcagagacactgtgtactgtgtcaagcatggtcagctaaaggaggcagataggccaaagactgactgggtgatgaagggcctgcagcagccactggttgctgggggtgagggctaaggcttgccgccatcctctcccttaacctcagggtcagggatagtctgaagctggagcagatcgctcgtacaggcagatgcgccatttcagggcattcacaaaccctcagcctttggcctgatgttgggagatcttgctttaatgaggagagggacgtgggaccggagctctgacaacacagggaacagagtgctctttgggaaatgtgtcccccccccccattttgtcttctgtcatttatttgcctaacaatctcagcagacgttcctcccaacacccagttggtatcacagatactgaatgtgtcaggactccggcccttcccagaaatcagtagcctggaacagcagtgtctttctaccagcaacactgccacccttgaactgtacttaaaaagcactttgaaaggccaaagcagcctccccagacacctttccccaggatgttcaaaggaagccatcctcccctcccaccacctctcaggtagacctgaaggccagggttacctgcagagaactgctccttgtgtcctcaggaggcggggaggatgggagccaggcttgcttaaccctggctgccacactggcaatgcatcgtgcctgagcgcctggagtttcctagtgcacgcattagctctagtgtggtgtgtgacctgtcttaattgttgaaatcacgcatctagattcttgtccccccccctccccccctccctttcttttttggagcgggtgctgagaggttgtttgagttggatcaaatgctgtttggacagctgttgcaatcagaaatgctgtcaatcattagcctcgacggtcgattttctttcaaaatcatttctctgagccgtctcaacctactgaagtttggcttcctggccggaagttatttagtggagtcgcttaatgggtgggtgtcagtttccctgtgtggaagatagactgttcgtaggcgccttcctgcaggctgtgagggctaacacacagagcgctggtggcagcgggcaaggtggatgtttctctgttactctttaaaagcctttatgtctgggtagctggttccccttcctcatgtaacacagtggttctcaaccttcctaacgctactgccctttaatacagttcctcatattgtggtgagccccaaccataaacttattttcattgctactttataactggaatttattactgttaagaattgtaatataagccaggctgtggtggctcatgcctttaaccccagaaaccctgctcgagaggcagaggcaggcagatctctgtgagttcaaggacagccagggctatatagagaaaccctgtcttgacaacagaaaaaccaaaaccaaccaaacaaacataatgaaaatacctgctatgttcccccaaaggggtagcaacctacagagtgagaaccactgctctaatacaacccccaagagattgtctggtaagtaattttcccattcatctctggactcagtggagtacacagcagcctgtgcacaaagatgggaacggctcagtccgtgctgtgtagacaggagagtaagagagatgtagttacaactcctgccaggagggagggcaggtaacagaaacaaaggccagcccaagcaagccccgagacagtgaagtccgctggttatagaagttctccagatgtagtgtgcaatcccccgcctcccaagtgcccttggtgacctgtcagaatcctttctgccaggcaggcctctctgtcatgcttgagcccagatgtcattaccatggacttctagaatgttcttcctgggagttgttctgacagttcctgtgctcagtagctctttgtggtgctggaaggtggattaagtagggagtgacggcttctccgaggtaccaggccttgacccgaacatggctacaaaatcaaagagaatcccttttcttagtgatagaggatgctgggctccggtaaggtgggagaagtttcctgtaggaaaccagtagtcacaagcttcctataggtcggtgaagtagaacacagtgccttttaattttctctaaccaccaagaccctgaccctcggcctgattagtagaggatgtaggctctgtctgaaacccttgagagctgtagtaggtcaactggctggcagggatcagagtctgccttctccttcctggctgtatgtgtggggaattgatagggcaaggagagatccagtgagctggcttgtgcttgccctgccttggcatagacattcaccctgtttaaagggcctaagccattgtccatccccacctcccttccagctgactgtcaacactttcccagcacagccctttccacagatgttatccacatagggaatcgtggccatacgtactgcaacatggagtctacatatacatgcacacaaacacagtggcgccgaggagatggctcagtcactaacacccttgctgtgtaagcatggggacctgagtctagaattccagtgcctatgcaaaagcccggcgtgtccatgggaacctacgacccaggactggggctcgcagagtcaggaggatcctaggagctcattggcttctcagtctagctgaaccagtgagctccagatttactagcagactctctctgtaaataagatggaaggtaaaagaggaaggcaccagatgtcagcctctggtctccacgtacacatgcacatatatgtgcgcacaggcagcatacgggcaccacacaggcaagagaaagaatgaatactagcagtgttattctttggctagatatttattgagcacgtagtgttttccagtcattgctactctgattgtttgaggcaagagaagcctgggccaggggtgcttcctcagcacctgggctgatgatccagccttggtgttttgccctttataggtcctgttcttagccatgcgttctctgccagttcctagtgagatgcaggcaggctcggtgatttcagagatctggtggagtacagctctcatccctgtgttccctcttctttattcattgtttgaacaagtgagaggggtccttgttttggggggtacacttacttcttcctgtttacctaggctaacttagactatacaaagtgatcctctaagagcccttacttagagcaagaatggccgacatccctgaaaaaggccagagtctctgtggttaagagtcttgcaatatatagaacagcccagcggaacaaacaatttgtgaccagtgaggttgagaaaccttggtgtgtgtcatctttgttgttgtctgccaccattgtgcaaatgtgggccccaccagctcttagctggaatgttacctgccctactctcagagagctttgagattggagaccatgctgatgcagatggtctggagtctgaggagcagtccctcacagtaaagaattgttttgctacgaaagcctggagaggtgcctgctgggtaacactgggcctgtttctgaggagacccagctgttccctcatggccctgacctacccaagaatttaccctgtactgggcaggtactctgggttgcatcatttggccccacaggatacagggctgcttaagcccatcaggctcccgtcagggcctgttctctccataaaaccagagacattctctttaatgcccagtggcctccagactcttacactggccccaggaattccccaaggccagagtgtgctggtgagacttcagagggcattgtttttatctgaggcacactagatttcgcatgcagagtcatctgacatgcagatgatcacaggtttttaaaaggctgttgtcatggttttgtcagaaagattgcctagctgatgaaagctttgaaggctgctctgagaccttcgtcctggctgctcagggttcagacaagataagaaagccaattccaagagttgtctgtctgcgtcccagtctttcctgctgggctcagttaaccatttagcagcactcttgatctgtgatctgagtcacgcgtggtcccactggaaattcttggtattttaaacatgggctttactgggaagctggggcgggcagagaagccgtctgatgctttgtgaccgcttgtatgaggatgcaggaaggggctggagagatggctcagtggttaaaagggtgtaggaaacctttgggttccattcttagactagaccctaaggatcgaacactcaccatactgcaggggttagaagcaaccgtcaaagtagaggacgagggccacatgccactgcatatgaggctggccctgggagagcccttccttcttggtgccctgggctctcttgcctttgacctctagtttggagcattagtgggcagcgcagttctctcagcactggatttgtttgtcacgggttttctggactgtggagaggtctttgttttgatatagtagggattctttctagaggatgcgagccattgacccgagtcccctgtgaaatgggagctttctaacacatggtcactggagcccatgtgtaaggggctgcagtgtgtgtgtgtgtgtgtgtgtgtgtgtgtgtgtgtgtgtgtgtgagagagagagagagagagagagagagagagagagagagagagagagaatgtctgtctttctgtctgtctcagtgtttcagtgacttgacttgtggtctcttttcctttgcagacagagattgcgaagagactgaacacaatcctagcccagatcatgccttttttgtcacaggaggtaaggccttcgtctctttcctcttctgcctagggcagcccagtgtggctgtttcctggggcccaagccccgccctagctactgtactgatctagccggtaggattcacaggccttctctgctgacctgggggcagggatctcatcaccgggaccacatgctccttttccagtaggagaatggttctctgccacacctgaggagggaggctgagccctgtgaccagtgtccttcatacacttcaccacgggcctcagctttccagggtacactcctatacctagttcaagtaaggctggttggttggtgccaaaggtcagaccctgtgtggggtgctgttccccaggtgctaagtgccctcgaaagtctcgtcactttctaagtaccccttgggagacagcccccttaccctccaagtggaggcaagggctggactcaggagcgttttgaggaaggtatctccaaagaggtgccagaggcgatgtgcagacctctggcccccatttctatcctgtctgatctcactccagcagggccagggcctaccctacatttatcccctaaggtggctcggatcatatcagctccctgctggagttctggatctgagatagcaacccaggactgactaaatacatctgagaattagatatggctcatgctatttgttagcttctgggagtgtataaaacttaacttttaataacagactttagtttttcaagggcaattttaggttcgttaggcaagcttgagtggaaagtacaaagtttccccatggcctctccacaccgggctggagtgactgttaaccaacgctcattgtgttcgaagactgaggctgtgttaggatttctttggtcgctctcactttctagttagacacttagctctctcttctggtagccatagatgcatgtttctgctcagccctttaaatctaaagcccacatgttctgtttaattcaccctagccaccatagcttcctgtcctgaaacatggtgtctgtcctatgtgattaccataatgcccagaaaagaaccactccagtatgtaatgcccgactaggttcttagtgcacagagctaaggttttcctgaatgtggagttgaggaggtcacgggccagtcttgggaactcatctctgccttccttagaaagtagtacttgctcgtttaaagactgatagagagtgtggcatcactaaacacccacatccctaagtcctgggcctgttgagcaggcctnnnnnnnnnnnnnnnnnnnngaagggtcctgagagactcctggtgccccgtgatggacagtattgaggaccttgatcatgcttcatttcccaacagcatcagcagcaagtggcgcaggctgtggaacgcgccaagcaggtcaccatgacggagttgaacgccatcatcggggtacgtggactccccaatctgcctctcaccgtgtgtatagcccttttattcctctcatttaccatgaccagagatgaactctgaccttaggcgctctcaaagaatggcagccccggggcccatggcatccctaggcaaccgagggcttagattcaccacattgtctcctggtcccaaactaaagaaatactagacacaccttgagtccacctgtaactttattagcttccatatccccagcataaggtactgaccagttcctggctggtgccccctctcctccctttcccactctggctgcccttctttggcctcctggggtcagaaccatctctgctgtttattgatgtgcaccgtgctgtacagttttggggttggggtcttgctgttccatgtgctgggctgcatggctgagcacccacacacatccttcagagtttcagctgtgtacctggatggaaccttctagaagccccacctcatcccccaacaagggagtactcatcctgcagtgctctgtagggccctcagtgaagagaaaggagagggtgggggcagttcatctttctaagccttccggctgtgggcgtggcctccggattgtcctcagagtgtgtggtcactgagttcttcagtaaaggcagttcagagggttccttctagtgttagtatctgtgggagctcctggagactggagggcttaagcctccattgattcttggtgttgagggtagagtaaacccagcctgtgtgggggaagggcaagaagcttggtgctgggaggcagcactctggggagagaaaccctgatattctaaagcttgaagtatctccggtgatcatccagctcagggttctctttaggaaatattttttttaatttgctttctgaaaattttgtcatacatacagtgtagtttgatcctatccacccctacacccactacccccttctgaaagagtattgttttacatttcttttattgaacttatgtgtggtcatatgtgttacagagcacatgtatgtgctggaaaaggatgatacatatgagccgttctctcctcccaccacgccggaccccataatcaaactcaaaatgtcaagcttggcgggaagtattttcacgttctgacccacctcagtgccctccccgccccattgtccacttttattctctgcttcttctgggtcccttcttcccccaagtctccctttcactgagtttatttagggtttcttgagaacaggggtgggacatgtgtgggacatttattggaacaaagagcctgacactgttgaaacttgggggtcagataattctttgttgccgtgtacagttttgtatattcagcagcagcaatcttgctctgtacctactgggtgtgaaagcaccctcccccatacacacacacacacacacacacacacacacaatctgtgcactccaaatgtctccagatgttgcctgtatctgcatgggcacagggctctccggttgagtaccactggtttagtctgataccagtatttcacagagattagcagtcaggccggcctgagagcatccctgagcatagccggtgtcctacagtggcggtgtagggagttagaagggggcctgagccccaggttgtcttcagaagtctttctcatctgcttcttgtcttcagggcaagttcttccaccaagctgcaggggctacagcctggtcccacctcttactctttggaattaaaatccacatgtgaaaatactttttttctttttctttttgaaggaaaaagtaaaatcgggcagcagcgcagctggattggctccagctcctttaagtagcgtttaggaagctacaagttaggtcaaggcggccctaggcagatattggaattcaattaaagcccacgagtggggcctgtgacccccattttcaaggtaattgcttctcaggctctgagtgaatgcggccgtcgccctgtcattaggcaggcagccgtctaatcgctgcgcgcctgacagagcctcacaaggcaggaattgctgacagctggggcacccagactggggagctgtgcttgactgccctccagcgaggggccttgttccttttcttctggaggcgagaggggagccaccctgctgagataagggcacaggcaggggcagtgctccagtcttgattttctcagatagaaaggtttctagtggcacatctgctccagttggctgatcgtggcctcctgacacagggctggagtctggggtctccatttagctgggctgctagcaatatgaggagtgtggatgtaaccagaagcatgtcacggggttgaaatattgtgggagaacagaaggataggtgaaaggacctgggctgctggccatccctgtcccctagttcccagtttgtccttagggaactcatgtccctttgggtaagataggcctagagatggtgttcctttttagaacttagctttgtacatacaggattgtgtggtggcctgggaggtggtggactcttggctccttggtctgggttgcctggagaattatttagtgggtggtatgtgcagtgttgacttggtggttttcttaagaggggagaagagacgggaggagggaggttggagttggaatttgtcccagactgtgcagagatctgtgaagcgctctcagggcttcctgtcttctgccgggtgatggctgagcaggatggctggctggacaggagttgggcggtagaattttagaagggatagaagggtggatggctctgccttagtgcctgtttccttagaaactgaggggaagtaggggattgctgagttgggatcctggcttaggtttctgttgtttggtgtagttacttggcccctggggctgtcccatctctgaagtagggatagcaaagatcatggtgacctctaaaaactgctgccaaacccagaggccaatgctgcaaagggagccttgggtatacctactgggctgtgtggaagactgggaggtcgagttacctgacttcccaggaccctgtctactccctctcatgcagctagctgttggcctgtttgactctagaattgaagcagttagacaactcccctaagtttgacccaaattacgaacctaagaaccgaagcatctaatcagccagcagaggcatgaagcatgaggtgtgtaatcccgttacacacgctcctccagcaagctctcccatcagcctctgctgtgggccattcctgccagtaccagaccgtgcgcactgggcactcagggatggagggcccaggaaaccccacggggccatgatgtgtttgtgtttggttatgaaatggccaaggatggagagatgatgttcaggagtgtgctcggttgtgggtttctcagccctgcccgctgcgggttaaggccaagagggagaatcactgaacttcccttcttctcatacatggagaagagccagtgttaggagggacagtaaaaggtggaggcaggtggcctcggactgtggtattgtgacatttctctgccattgagaaagctttccagttgagagcagtgtggccctcccactcagactaaacggtttgggtaccttgctctctgaagccaccagaggacagaaacacggcccgagtgtgactgcatcccgcttgcctgctgaaggaggtgacacaggccatgctccttcctacctacctgtgaatcacttcattgccagctgctcctggccccatcagggagagcatttggcttcgctccgaattgctgccaagaccatcgctggcagaacctccatccagaggggcagtggcatccagatgcatccgttcttaccttttgaagaatttacagcttaggtcttccatcagtctgtctgcagtcttccgggctggcccccgtggtaccctcagaccaccccaaggagacgaaggcagtgagtgttttctggcagtgcagagccaggtgctttgcttgaagatgagaaacgtccattttgcatggaagcttccttgcctcttgcagaggatacagaccctgaggagcactgtgatagtgttggaaactagtcatgttgtgtcgctgccgcccccgcccttgtcacaagtttctgctgtggatttactagtggatatttggggaaaacaggacacttatctacaccattgaccctgctgctccaactgcctctaactaactgggcctccagggctgtgttgccacctttggatcaagctctctgctcctcgtttttccacttacctgctgctaaccttctccagcgtttcacttactcactaagtgtgggtacagggatgagcccggacttgttggaggccctggatgggtaacgcaatggctctgtcttactgcaactcagcagttgctcaacgacaatggcgatgatgatgcccatttgccgaggaggcttgcactcggactttgcttttacatggaataatgtgagttctgcacagcccaagggtgagcctcattttgatatccagttttgcagataaggatacgggcccagagaggtcgggtgacttgtccagagtctcagcgctgataaaggagaagctgaaagtcctcatctccagcagctttgcctgcttccagagtctgggttcttgaaactgggaaaggaaatttccttctgaccagaagagtggaaagggaatctgtttgaactggacagagtgggcagggtgggagaggagacccacacacagtctcacatgtctgcagccaacaacaccctccacgcactcttttgtctccttaaagcatcttgacttaccagttcctctgtaccatacagtgcagattaagtacccaggtccttactttctgggcttttattaagtaattatcaccagcagacttgaaagggcttcccagcaaggagtttaaaaacaacagggcccagtggagattctttgtaacataatgtctagataaagctgtggggtccagccatgccatggaatactaaatactcattcaaaagagaagtgtttttcccccttcagaacaccttttaaaccgggtcatataacaacagtgtggacaacaagagctcatttgtagaaaactgcatggaaaaactgtagatctgaaaatctagattctagatggcctgacagccggcggcgtcctgcgaggtggaatgaatgggggaacttaaaaagaacaaaatttaaaactttaaaaaaaaatattcttacagtgagcctgtgttatttttgtaataggatgttaaaaattcatttttaaaaaagggaaagtgggggagctgtgtttatctcccatcggagaggaatccaatcttagctgagaggactggaggtcccgtggttctgctctgaaaggtcccttagcttaggtgtgctgtgacacagggagaaccacagtcacatcgctaagatctgtggccaccaaaagcttgcacaggtgcctagaaggagggcttggggtgtcatttcaggtcctctgtggtccagggcaatggccgtgggtgccaactttacagatagagctaagagacggagcctcgggagccagaggtgtaagactgccagaagagccttaacttggagggagagctagctaggtcagcagtctgcagctccgttcattgaggggaatgtgggcagctttttcatccttggccagatctctgtaggcattccccaggtgccgttgaccttgagagctgcttgctctttcacagtgatgggcacgagctccgtcagcctatggctatcctttcttggcttattacatctttgcactcaccttttccctcttgctttgagcattctgtagatgatgctagtggttgacagataagagtccagatcccatttagagtaatggagcttgggctgcccattccagtgcctctctatcagttggctgtctgtaaaatgggcacactcactgttgcctgtcagagttacgggttttatttggatagtatccaggagtttatatgcacatacaggtggtattggtccctttctcttgggggctagtctggaagaaaactgtgtgcacaaatggggacaagcatacccagtgccccagccagtcccaagaaatacttccatccctgagaaatagttgataccatatagcctgccctacaatgccagtggttgttggcaatcttatgaataacagggcattctgtcttggctgctggggaagcatggaggcctctgagctaggaactcgggcacgggagcagaatctggtggggagccttgacgttagcaatgggaagaggtgccaggcagcaggttcctgggttggtttggggaggaatagaaggatggatgttgctctgtgcctgggagtactgaggtcgttagaacagtgggagatccctgtgagagccctgtagaaatgccagtgactgccacgaagcccattgagcggtggctgtgtgcccaagcccacataccttactgtagtcacctgccgtgggtgctgcctctccccttatgcagataaggaaatttatggcttagagggtttggaagtccctgtcccaggcatacagaatcagactagaatcctgctctgtctggtttcggaggttcagctcttcccagctctgtgttctctctactctgagggccaagggcatcagcgttgattccaccagtcctgggacttctctgctctggcctgccctgtcccgactctacaagccaggcttcgttctgcttctttagaagcccagtcagggaggctttccccaggttccagctttgggtgggaggctctggctgctgatgttaaaggcatgtacgcatgagctatgagcttaaaaatggattcctctctattgaaaggaagccctagtgaccgtgtgggttttaaatgcatgcattatttatcttgggattggaaacaggcatgggaaactctgtcctgttgctggggtgggggtggggatgatgtttgaagacatcagtccaccacgctgcagtccattaacagattttgttgagcaagatgagcatgtggtcgagggggaaggttggaggggggtgttttccctgtctgtcgcttcctgatggaggagcgaggggaggggcagaggtgacctaccctctgcccttcccggcctgtcttggcttaccaccaacttcattacagcagcagcaactccaggcccagcacctctcccatgccacgcatggtcccccggtccagctgccaccccacccgtcaggcctccagcctcctgggattcccccagtgacaggaagcagctctgggttgctggcacttggtgccctgggaagtcaagctcacttggcggtgaaggatgagaagaaccaccatgaactggatcacagaggtgtggctctggctgggctgggctgggctgggctgggtgggctggagctggagggcacactgtaaatggatgcgacaagtactgtcacctgaagcctggtgttagctaagacttggagccgtctgttgagtccagtgcatggacatgctgcagttcctgatgtagaccccggtgacagtctgtttatctacagtagccccccatattcccaataacaccctgcctagtttttagggccagccctgcatgcccttcagggtgctttcgtgattgcactgggtgcctttcttaaaagagcttgagttggggcctcgttgtagccttctgttgctatctttctggatctctgagtctcctcactgggaaaccttccaagaggcagcactgctgggggtgttgctcagttggtaagaatatttgccaagcatgcccgaaccctgagttcatcccttggcaccatataaaacaggggtggtagtgcctgccggtaagtccagcactgggagatagaggcagaaagggagaaagttcatggtaattctcatctgtgtagtgagttcaaggctggcccagggtatttgagaccctgactcagactagtggaccatctgtaagtgtagggtctcaggaatacgccaacagagaagtaactagagagacgaggaatgggaactcttgccccagccccctgaatagcaccactggggctcaggaggatatcagagggaacaaggacctggcctcatgcagcctctttgtaacgctgccagcttgtacttttggttggcttttaggtatttactgggccacatagtcaatatcttccaagctcccaggggctttcggggaggagtcgccatccaagccttagtccgtgctgtatcctaggagccagtggccaactgttttgttccttcttgacagaggggagaggacaatgagagctgctgattagctggactggtgtgaccagaggcctatgcttctgggggctttttggcaaaggaacagagaatggtgttaagaaagcaaaccagtagaagtcagttccaaattgcaatttttaaaaaaaaaaaaaaaagcaataaccttcccagctctcatgtacgattctagaaagtacggcgaaaagcaaaccaagattcttttgacacaccaggaagaaggctaatggcctggattctaggccatgctgggcactggtgggagggggcaccattaagatgccatatacggggcgtgccttcactgcactcagggaagtagagtcaggctaaccagtgagaggtggctttgataaaccacaaaggtcaactgtgatttattaaagtgaccttgttttttttcccttgtttttccttgtgggtcctgaccctcctcctttcctggccttcctgcctctcagagagagagtccagcacggtaagtgaaggtgcttttggtgtagggatggggtgcgggaggaagatgggcctgcctagaggcctgttcctagaattacaggcctggcaagtagcctgtgctacccacagctaaccccagtttcccgttctgctctgtgggtggaagctggggtttttatttatcatttgtttatgtgtgcccacagctagaagacctggcttcaggactggtatgtgggtgacggtgtctctacccatattcagtactaggggtagttactgtctatcataatataggagttgctgtcctctgttgagtgacctttaattagggaagctgtttaactctaggcacttgcctgagtgacctccaaagccccccttacaaagagacatggtcaactgaagccattagcccaccaacctacatcttccaaggggctctttggagtcactggcctgagccctgcgttcccgatgctgcctaggttgatgatggttcatcagccccgtaggctggatgcctacttccggcataatcccgagccctcctttctccagatgcccaaggtttctccctgctctgcactttgactctgttgaaaaaagtgctagctagcaggtattaaggccaggccgcctgcgtgtctgccagctcagagatttgctgtaaatctttctgatcacaccgaggctccaaggttctgtttcaagtgaataagccctctgaataagcacactggagtctggataaaaaaaaaaaatcctccagcgattagcagagctattttattcttcatcgcagagcttgtatccgggaccatcttaatctgctaggatggctctccttattacctcatgttaagtagggcttggaatgtcaggcctttaactagccgtccaggcagcagcctcctcgggaagctctctctgcttgacccgccttcctttccaatccctccctccatccagactgttctcatacctccctcccattagctgtctcttcttgccctgcctgcctgcctgctcagaaatccaggccccgcccgcccccttgggctcaggaatggctaggcacagaagaaaggattgattaaagctcaagtccattttgattgctttggtgttgatccttaaacagtggcatacttttggagaggcagtttccctacatagaagctggactaggtatgtccacctgcgttgtctcccaaccccacccccaacctccacccctccccagcttcaatccaatctcagccttatgaggtcttgtgtcttgaccttggagcccctgtctcctcctgcatgtcatggggattaccctgccagacggcctctcagctttggataggcagaccccctgtagcagggctcattacttggttagcaggaggccttccccaggaagtgggcattgaagcccattacctacttcttcatacctattcgcttttggctttgtgcccttgctgaaagctttctgccagaaacccagagggacccccaagtgtgcagcccccccccaataatgctcctggcatccaagctaggctgactcaacatgggagctggggaatgaacagggatgaatcccatgacatcctagggctgggcagctcagggagggcaccagtgggggatggggagtactctgggggctgcatcctcagggccatggtgttggatggtggagattgaaataatcagccttaggaaaacagcttgtcaacagtcaaggcctccggcaggaaggacaaggctgtgtcagagaggggagggggccgggtggacaggctggaagctgtcccagaggggttagtctggagtccaattagaggtagcttcattcatatttccttgcctagctgaagcaataaaaaatacttagttttttggccgcctgccaaccagaggcgggctggatcgatgccgctaaatgcctgacatgactctccggtagcggcgagggttttcagcctgactgcatgagaagaaagagttccctgttctcgcactgggtcgcaaggagaaacacgagcagccaccccgtcccctccctcctctccatcacccgcctgcgcaggggcagccagcctgaggggctggaagcatttctgcttagcacggggtggccgccaccatcggaggaaatgaaatgaaatgacggtgatttttttttctgcctgtgcttgcagcaactaattgaattgcggctgtgagcgcatcgccgccgctcgcccggctgcggggaaggttgagctgcagttccattataacctccattttttttcttcaaggcttgataactctgccattttaatttgcttcaggcagaaacttggcagggaagggctgcccagaaaaccggcttaggaaaggaaattaagttctgcggctggctccctcccacaccattcccccaaacccatccacctgctggccaccccgcctcgttccttgccagtgaaccccatccctgggccagcattggcctctagtaaaatggggaaaggagacaagaagggttaccgtacctgcctttagtgtccctctttgtaagcacatcgtcttgctctggagtcccacacgactccagcatgcatctttagcctgtgtggactccagcatgcgtctttagcctgtgtggactccagcatacatctttagcatgtgtggacttgtggccactcttatccctgtagttagaccggggttctctgactcatcctatcactcctgacattaatgtcagtctgaacaagggtaggtttatcagtacttttcttatcactaggataagataactggatcgaggaaggattatttggctcatggtttgagggtgtacagtccgttatggtcacattgtgacttggaggaagcaggagtgtggggtgactggttacatcctagccacagttaggaagaagctggcctgtatcagaactcccctataatcccctgtggccctgtgtctgccagccagaatccatgtccagaaggttccaaggacaacccctccccccaatcagctgggaccccttagcctgtggagcacttcacattcaaacagtggtgcttgaggtaagccattgagttcactgagggggcgctaggccttcaaggtttgcagattagcccttgccagaggttccccctccctgtgcacagccacaggacaccctgcttccagccttccctgctgctcacctgcctcagatcttctctttctcaggcttgtcatccctagggattcccctccctccccctggagcagaggaagaactgagaaaactcccagtgctctctccccagcatgaaacctacagtcctctgctgggagaccttagcttgctctcttgggacacttgtccccaccctaagggaaaggcttagtggccttgcaggctttgtgcctttgtgacactggcttgtcttccgtttgtgggaggattggcagtggaggagcccgggctcagggttgttcatctctgcttagggctttatctgcagctcagcaccttttctcattcgctgcccaacttaaaatggaagttcttcatgtatgctcatctatggctcaggtctgacttgaaaagacacatctttccttgaagtaaatagagtgacgggtgcccctcaccctcttgggaccttgcctcaggccaggaaacagaaatagcagtaccttgcttctaaaaattgatatcttgggtaagttcccagggacccaaggtgtcctgggaacgtcgtgggtgaaccacatctgcagacacagggtatctgcccacctccgtcttctggccctctgtcatccgcttactcgaatgtaatattgcctgtgtgcagtattatacaatcagcatggaggtttgaccccagggtcctcttcttccagaacaattccgtgtcaccctctgaaagcctccgggccagtgagaagcaccggggctctgcagactacagcatggaagccaagaagcggaaggcggaagagaaagacagcctcagcagatacgtacgtaggggtcggcgaagtggcttcgccgggtagggttgtgacctccctttggcctcgactctggcagttgagttctgagtctgagaggctggtagttgtgtcagggcccagagagagggagaggtttatacatactctgtggtcaggtgagccattgggagagaaatggacaggggcattacccaagcctacatgcagtcttaggagagatgaaggtcctagacacctctctgctgcaccccatgctccaagggagtgtcctggggtactccaattgtgagccccaccgtctacacagtccaccccaggcatccagccacggagacacagtttgtaacaacctgatggcgtgaccttaacctgtgagataacagtgggatcacggttacatgtcctccattgccagactgaacaggggtgagatttgagtctagaggaggggctactgccaagccatctttgtcccatctggctgccctgtggctctgatcatgttacacagagctcagttgtgctacagagtgaagccagtcacctgccccaaagtgatggggggaaggagatgctggctttcaaaggctcaggactatcgtaatgaggctgcttagacacgtcagagccccagaggctgcactacaaagaactgggaggaaggaattccaaggctgctcatagagggcaggggacccagcagccgagaagcatgagctttggggtttggttggggaagttgttggggtgcattgttaggcttgggcagatcaggggtccacatgctcttactggcttctctcttgcttataggatagcgatggggacaagagtgacgacctggtggtggatgtctctaatgaggtaagggcaggccccagttgcaggtggggtgatttgggacagatcctctgtaataaggtctcttctgcctgctgctggagccgggcagtggtgcatcaggggaagcagggagacaagtagcttcatgtgtgggaactgaaaggaagcagcagtcttcgtgtcccatagttgtctagggtggccctatcttccctctccagggttgggggagtatgctttcctggagagaatttcccataaagccctgtgaaccttgctggttagcattctggacttgtatgtgacctgggggaggtcaccccacctgtgaggtagagggctcagggtctagattgttcagagctaatcccctcccacccgtgcccattaccttcctgttgctagggcagggatacctgctttcagcttaaaagctctgttacacttgtcctttcaggacccagcaacaccccgggtgagcccagcacactcccctcctgaaaatgggctggacaaagcccgtggtctgaagaaagatgcccccaccagcccagcctccgtggcttcctccagcagcacaccttcctccaagaccaaagaccttggtcatgtatgtgggggtctgtcctggcaccttacagagctgggggaggggagagacaggaggcatgcttgcagaggctagagctccagtcctgctgcctgcagggtgggaattgggtgtggaaagaacgtggctattaggattggctgtgctttaatcattaacccacactagtgaatgttttggagccttggtttctgcatctttaaattagaaactttaccacggtccctgccagctagagacttctgttcaacccatgcttggcttcatgtgggaccagggctaggcattttgcccaactcttgggagaaaggaatcctcatggcgtcttgtggtctctgtgtgtcttcccttctcagaatgacaaatcttccacacctgggctcaagtccaacacaccaacgccaagaaatgatgccccaactccaggcaccagcaccaccccggggctccggtcaatgccgggcaaacctccaggcatggacccgataggtataatgggtaggcacaatgggacccgggtcaatctgatgggggaggggaggttggtccctggctagatagagccaaacagatggccagcaacatagggtgtccaagctggggcttcacaggtctgcctggtgatctttcttgtcaggtttaaggatatggaagcctgcacctttgacattgatatattagggtttttgagggtctttagcattgctatgtcagagtctacgaggcctctgctgggctaagtgtgaggaaagagcatctaacaggttgttaccttagatctgtgttcactgtctgttaatggttttgtgagctcctgagcaggccctcttctttgggccgtgggctgcccttggaaaagacatgactccaatcttggcctcagaagtcaggggtccagttgggtagcttcagatcgtaagagggctatggcctcagctttgtctatcagaagggtgagcccactctcacggatgcctcctccccactcatcccacttcctcattcacatcctcacagcctcggccctgcgaacacccatcaccctcaccagctcctatccagcaccctttgccatgatgagccaccacgagatgaatggctccctcaccagcccaagcgcctatgctggcctacacaacatcccatcccagatgagcgccgccgcagccgctgcagccgccgcctatggccgatcgccaatggtgagctttggagctgtacgtagaccttttggctccttttggtgggggcggggattgggtagggagtgggagctggcagggttagtatagtacatatccccgcatgctgaggggatcctcggttgttgtcttaaggtgtctattgctgcgatgaaacaccatgaccaaaagcaagttggagaggaaaaggtttagctcactcagttccatagaacagtttatccccaaagcagtgagggcaggaactcaggcagggcaggcacttgaaggcaggagatgatgcagaggccatggaggagtgctgcttactggattgctctcatggctttgctcagcctgcttccttatggaacccaggaccatcagcccaaggatgctaccacccataataggctgagccctcctctacccatcactaattaagaaaatgccctacaattggatcttctggagacattttctcaattgaggttccctcctttctgatgactctagcttgtgtcaggttgacataaaactagccaggatatctgtggacacctgacagctgctctgggaagagcacctgtttagagagagtttccttatggggtgtcagacctgcctgtcagtctcgggtgacttaaggtaactcttagaccgccctctctcatctgagacctctggataatagcctgaaaggggataagggtcccagtaagagcttagtgacatctggtcaggtaacagggttttgggaggtgggcctggtggtgacaaacagaattaaggctggcagaggggactcatttttcaggacagtttttctctactcttctatacttggggtggccccactccacaggcttacagcacactcaggaaggagagaggtggggcagggcctactctgtctggcagtgccgaggggatacaggctgaggtggggtttaccattgccatcctgtctgttactgtcctgagaggacacttggccatcctggcatctgccttctctgacacaggctccgctcagcagtgctgtctgtcacttagttctggagaagtcacagggtgcagcaggcctagaggacagtggccatggggaacagggtgaggctatgtgatgacagattgactgagccactctcctttctttataggttggttttgaccctcaccccccaatgagggccacaggcctgccttccagtctcgcctccattcctggagggaaaccgtaagcacttggctattctttttgcatgcttcacggggtagacaggtaaaacactcctgtccatcccctgagcacagggtcttgctggatacaatgtcctctaaaaggtatctgtccctcctgagacacaaaggcatggtcaccacccaaggtaagtcagtcccagaaaccccctccatcaggggaacttagggactctgaggtccaagttgatggctctgggagggtcagaatgcttgtaagcagagtacagagaacaatgtgggccctggggattccttcaggttccacctgttgcaaaggccacagcccctaccctgcctctagttcccctgctcttcaatggagcacagtattgccctgatctttgtctgcatggcttattgggaaattaaagtttgaactatgtgtaccacatagaaacctgctctgtactgtaatagatctcatgccaccatggccacggagaagggcactcacagtaatgtggacagacaaagctgagtctctgtggctcagatccccttgtcgtttttgcctttagaggggcaggaaggtgctccgtccctagtatcactgacttcagatgcaggtcgtggcatttggtagggtcctttcccagattggcatgtctggagactttataatctcaagtgtgtgtggatggggtggtatggggggtgggggcattccacaacattccatggagcacctaagctgatttggagcaaggatgtatggactaataagtaggttccaacctgatggagccatcccagtaccaaggggctcctggacttaagggatttggaggagaggggcttggggtcagggcagtaagtcacagtgtgtatacattgatttggatggggcctgtgggacatgttaggtgtagacagcaggagtgacccacctccttcttgcagggcatactccttccatgtgagtgctgatgggcagatgcaacctgtgcccttcccccatgatgcactagcaggccctggcattcccaggcatgcccggcagatcaatacgctcagccatggagaggtggtatgtgctgtgaccatcagcaaccccacacgacacgtctacacaggcggcaagggctgtgtgaagatatgggacatcagccagccgggcagcaagagtcccatctcccagctggactgcctggtgagtcgctagggccacacaaacttattctgtagcatgtaggaggtagaggaaaacaggacagacacacccagggcgggaagggccaggctctgctctgagcagctctgggtatgttgactaacctctctggccctagttggggcatctgcgaatggagatgactcttaggctccagattctagagaaaagcatgagaaattggatgggtgtagaattgagagtggagaagtctccaggagcttagacactttataaggatgttaagttacctaaggtggctttcttgatccatgacaaagcaagtggatagcacttaactctgcccttcttcttccagaacagggacaactacatccgctcgtgcaagcttctccccgatgggcgcannnnnnnnnnnnnnnnnnnnctcaccatctggggacctggcctcacccacaccccgcatcaaggctgagctgacgtcctctgctccagcctgttatgccctggccatcagtcctgatgccaaagtctgtttttcctgctgcagcgacgggaacattgcggtttgggatctgcacaaccagaccctggtcaggtgagtgaggttggcaagggaacacctaggctgttcatactcacccagcccatgatgttggtccttttggagaagtaaagggtggtcaggtacagaggcaaagggcagctcatggagggccccttcagcctaggagcttgggggaagatgtggtggaaggcagagctttgaacagttctgggaaagcagctcgaggagtggagatagcagagagtggagaaatgcagcatcgcttaatggtgaggcccaggtggagcagagcagctgagctttgtgtgtcctgtctctgagatgtcctgtgtagcttgactgggttctgtgtgacctgggtggtgtggtgtcttcctctgagtcacactacctgtgtgatggtggacggcagttcctgcccgaagtcacatcctagtgttaccatgacacccttgggcatgttttgggccatagccttatagatgagttaacttaaatagggacagcaaagactgggttgaggagtgtgtcccaaaggcaggtcctaaacatgatagaaaatcccttagaatctttcctgccttcgtctccattaccttctttagagcagagtgggctccccaggggtcccacctagatacattgaatcagacagaggtcttttctcagggaaactgtccttggtagcacccctgagtggactagcagaggcctggtctagctcggcttcctgttggctaaggttttgagacacgtgatccagtgttttgtacttccagtttccttctagcttggctgcgtagctggcccagtccttgggatgattgcagtctctggggctcacccttcttccttgcttggccttcataggcagttccagggccacacagatggggccagctgtatagacatctctcatgatggcactaagctgtggaccgggggcctggacaacaccgtgcgctcctgggacctacgtgaaggacggcagttacagcaacacgatttcacctcccaggtgtgtaacccaagcactgtgtgcttcctcttgggccccagcagctgtcaggggacagagtgaccacacagggtcatgattgactgccaagggaccagcccgagccaatccgggaaggttgcttgtaagcagcagcagtggtgtagactgggcatgcatgccctcagaaatgggcacacacccaactcattctaagtccacagcttgctccctgtgctctgcagtttgcgcatgctccctcccagctctggggtgggcacctgactcaagcctcctgtgaacctcgcccatgagccatgatatttcttgcttgttagacttgcttcatccttttaacagtcagtaccataatgtggagtatagtcgttgccagtttcttagggagtgagctgagcatagctttcagggcctgggaattgcagcccctcctgctcaacctccaaagccagcttcctcaatgggatacaaatgacatcctggggtggcgggtaggggcaacagacagctggttagcggatttgtttgtaagtggtgagggaggagggaggaggctctaaccctacccaaggggctgctccagccctgcgggtagagggacactgaactgtctgtccttgcagatcttctccctgggttactgccccactggggagtggctggccgtgggcatggagagcagcaatgtggaggtcctgcaccacactaagcccgacaaataccagctgcacctgcacgagagctgcgtgctgtccctcaagttcgcctattgtggtaagccctgaagccctagcctggcatgagagccagcatggggagcctggtccagtagacagtggggaagtaggggacccacagtcttgagtcagccaagcttatgctcctttaatgtcctggaggagaaaagtaccttccttgtcccccacccttgtcttagatatggatgtcactccaggacactaaactctcaggacagtaggctttccatgttgacctggatcttctctgaaggttacacatggtgccaactcttagcctcagagaaactgtctgggaagagtacgtggctgtgggggatgttaggagccacagctaggagcgctcttggaggaacgtcctctctgactattggtctttggctgtttctggtgctctctccaccttctggtcatagactgggaaggactagctgactttagtggctttggcagggatctttttgggaaacatgctcaacacagttaattgcattttgttctgttctggctctccctctgggcagcaggggaaggcatcctctaggtatctgtgtgccatgcttgtaactgctcttcaggagtggagaacagcaaacactaaaaccgtggtcaagcatgtctgaggatgtttccacgcggggcagacacagctgggttgggtcctgctgcacaaggcagcgagccacagtctgagggctcctttgcttgccttgcaggcaagtggtttgtgagcactgggaaagacaaccttctcaatgcctggaggacgccttatggagccagcatcttccaggtacactcctgattttcctccccactcctcccgagtcgggatgcggccacagcagttgggctgagggtagccggaggcaggacaggaggagtctggagctaggagcagacctactaacccctacccccactagcccttactagatggcggaccccagagggaaggatgtgaggaccagataaagacacaccctctgttgctaaaggcttgtgaatccttgagggtaagagcatctaggaagggactcactcatgtggcacctggtgcgtaaaatagtgagcttggctggctctgggcagctgggcccgtggagtagccatttcacccactgacacccattgaggtcaggatggccaccctaagccatcagtgtgatgagggggctagaatggacatgcgtttctacagatttaaagatctagagcctctccatttcagacacactcaatcctctctccctggtgcaacttataatcacttttttcttacaaccactcttgctcttacacacacacacacacacacacacacacacacacactcttcagcttcctgtgccacgtgtgtcccttggaaagtctctagttttgttgagggcctgcaaacccaggaccagtctttccagctggcctggctgaatgaagggtctgtctcttgcggctgtggctctgaagcgctccttcccatcagtaaacttagcagagatgcttatgctaagtgtcctgttctcatccttaaacctggggaagatcctactacagccagctcaggaggtgttccagatgaagaggcaggaggaagggactccaagccgcagaggaagtgggcctctttctaccagcacctgctcagcctgagccggagagtaggatgcgatttcgttcagagccctgaagtgccagggagaattcctgtctgttttctccccacactaaatgtcttcctgtttctccatgtcttcctcccccagtcaaaagaatcctcatctgtcttgagctgtgacatttcagcggatgacaaatatattgtaacaggctctggtgacaagaaggccacagtttacgaggtcatctactgaacaaggactctaacaggcctgtcaaactctgggagagacacccacgtggccctgacagggagatgctggccaggccccgaggacggcagaaggagggagcagcattgtggggctgccctccagaaggtggagaggacgcacgccccttcgtggattgatgtgtctgacagacttgaaggactttctcctctccccctaaccagtgctggcagatgcttcaattagatttctctggaggcttctgcttccgtttctcccacagacatcctcataagtctctgtctcttcctcccttctctgacctgtccccgccccactctgggatggggggcggggagatgcaggagtagacattgttgtttctggggaggggcgcctcgttctgattgtgcagtgcacaaggtttgtgaacagtgtaaataagagactggttgctgactggccagtgagggaggaaccccatcccaccattgctcgccgtggattttgcctgctgtatttgtaacccactcatggtggtggcttttctttcttttcttttctttttttttcctttcttaaatttttttttaccagctgttctgtggggaaaggaaacagagataagagagttggggagccgagtgaggagcttcctggggatggacaagccatcctggcgcactgggactgaagtatatctccacacgggttttagcgccatgtttagatagaatgataggcagatggacagacaagatgatggacagtactgggatgggccagcctgggctattacccacaggaacagcgaggattttctgtgggttgctctgccccatctgtctcttgccttgcccacacacctgacctccatctctttctgtcccctgccttccccaccccaccccaccccgcccccatctttctctttggtgcacactcaatcattgtgatgaggaatggaagttctagggaaccccctctctgactctcctccagcgcagcctagaaaggattccatatgggggtgggggtaggggggagatgaagcgactcagctcagggagctaccagagaaaaacagcaactggtgtgggtgcttttttttttttaatttgaataaaaataattagaagtgatctcctttgataagataccgtctcccctttcctgctctcagccctttctgctccctgaagcggggaaatggtgacccccccccccaccagtctgagaagatgggcgggacagcgggctgggggctggggcagcagtcatctgcagatatcaccccctagagtaccaatgtttgtggtattaggtttgccttgttttgttttggtcttttgttgttttattaaagaaaagctaaagaccgtgtgagccctgctggtgggctctccatggatgtagcatatggaagagagtttttatattgcatttttatggattattttataatgtgggactccgtctgggaaggaagatgagggtgtctaaaaccttcccatctccagagctccagctgagcggctgcccggaacaggatgtatgttgggacatggaaagaccgtggcaccctgcgccttcctgagaggcatgtcgtcgtgcctgtctagagtctgtccatctgtctctgggtttcagatggtcactggccaccacttgttaaggctctagccagaagggagggttagggtggaagagagttattcctgaagaaaaaagaaaaattgaaaagtcattgtaatgaagctttttatatttttaaaagttactatttaaaaaggttggtttgattgttgtgttttaattgccttttttccctccagtgtctcagtcatgcctgggaaagtggggtccatggttggtccagttgcattctggaacctgggaagcatctcaccagaaagtcctcctcccttttccctcctccctcctccctcctccctcctcccaccccatcaaaagtctgtaagggctgttgggctttttctagtccagagcatactacaccactgcctttggtctatgcaccaggcagaagtagactgggaacccctggctaagatgggtctcatgggcagcaccatgctcatatatggctgtccacggaagctatttgagcaaaattaggaaatttcaagtgaatatcatgtaagtagttcaagtaagcgtcatggtcctcgggacccagaaagtctgcattttttttcttgtaagcttcattgatgtagatgtgacgggagatgttaagcctggatcacagaagtgtacttttaaacgctgagcaaggcagaccacgggcaaggccaggtgaatgatcccaagaaggctggaaaagcagaaaagactgaaaagtagtttcctggccttcgtatacctacccatcgctgaaataagcctctcagaggaccaggattttaatggtgctccacttgttaatgtatcaaggtcactgtcggtcacaccggtaacctgctgtcccttcatggaaggagagtgccagcaaacaagggagggtcccagaatgaagcagtctaggcctggatagaactgctgtccacctggatcttgacagaagggctgcagggaggagccagcctgaggctgtgcactgtgacagcgccatcctgaccagcatgccctccagaccactctcttctccacccaggatagagcaaggagccagggacaacttggagctggttggagttggtccttgtgggtgggggaggggacagaaggccactggtaactcccaatagtttctgacagctcaaatacctggagctatctggtcagggccccagagagaaggtgactctccagccaccatatttgcttcccagatacccccatctccagatgattgttttcaaaggctcaaaagtatggcagggctaaagggtctcttcacaaggggttataaaataaccactatccccaaatgatgggaatatagaataggaacttggaaaacattttttagtactaacaatataaaatattctacatgcccccaaaaacaacaacaaaaaacaaccaggaagaggttcaggtataatggcatatgcctgaaattgcagcacttagaatggaatggtaagtggatctctgagttcaaggccagcctggtctactgagtgagcatattctatacttaggatccatttacaactattgcaccagctggctgaggcaagatgatcgctgtcagtttgaagctagcctgggctatctagtaagtttcaagtcagcttgatctacaaagtaagaccttgtctcatcctctccctactgcatccccagccgccaactctgaaaaaatacaaaatgacctttggtgtgtgaaaggacattctaaattgagtctttgattttttttatttattttttttttttactttttaacacccaagtctaagccatttcaacctatcacgggtcattgtctcaggaagggtagaggaccactgggtaggactcaacagcttgattggaaggaagactctaatgtagggagtaaggctacctgggccttctccgaaactactggttgaaagattgcttatggagggcagatagcccagagcagtcatgggactattctagaactcgcctgttagtcttgctcatctatccatcatcaacagcctattacctactcacatccatctactcttcactcatttatctagcatttatcccatccatccatccatccattcatccatccatccatccatccatccatccatccatccatccaatgtgatagactctcataagttctcaggcctggttctagtggctaagatgtaaggatcaatatgacaatcctttcacagagctctcagtcattgagagacaatgacagaaaccagctactatgctgtgaaatgtcatggcaagaggctttaacctgggcaagagactcagagcaaaagggcgcccaggaggaagagctgagcatacctgaaggatatagatgacatgccaaaaggaggtggggaggaatgctgcagagagaaggaacagcatgttctaaggtacccaacccaatctagttctgaccccatctttcttcctgccccagcccagcttgtcaagcttcagttcttggtgcctcttccctgttgttccccaggatgagcagagtgatggagagtcctgggcaaagaagatgcaggggactagggaaaagatagaccaagggtacagctcaggagcagaagggtcaatgcccatgctgaactctagacctctgggttcccagtgtgattgccattaaaagaccttaagccaaccattgccaggcccttgtttaagtaacatacctacctattctaagccactgtattcacatttcccattcctctgcttcctttaacttaaccctcatgaattcaccattcctgttgcctgacccctactccagacagacaaatagatgtatgggcaggtggatgtgctgatggatgtgaggatggatagatatatgataattagatgatgggtggaaagagaatggatagataggtaagtaaatggatagatgtgtgggtggagggatgggtgtatggatggaaggatggataagtatggatgaatgtgtagatggaaggatgggtaggtatgaatagatatatagatgggtacatggttggctagatcataaatagatggacaaattgattgggaatttggatacatggttatatagtagatttctgcttcatgggggcatgctcagagtctcataaagaactgatctcttagtgggaagagatgagaaatcttggggtgacaagtaagggaagaaaacccagagacacagagaagtccctctggtgagctcagagtcttccaatgttagaccctctactccatgctctccctggctcagagcatgcctcctgtgatgacagaggggaagacctactgagtatgacaccatctcaaaggtagaatgaaagaggaaaaggccatgcagcataggccatctctctgcttcccagcagagcacattgctctctatcatgacgttctcatccacagtccagaaatgacagctggcaactaccagctgagaactctgagcccaaataaacagcctccactaggctggctcgggcattacgtcatagttatggaagggctagcatactttccaggcagctcagaaagagcagaactgatggctcacaagtgagactttggggagttggtgactacatcaagccaggtgactggggctgtataccctgtgtctcctgggattcaagtggaagaaaccctaactaatacaccagcacacgtgtaaaaagtttggcatgaggagggtgagcatctaactccaaccctgggaatctgagatgggtagatcctgggatgcttgctggctagctagtgtaacagtgagcttcaggttcaaggagagaccctgcttcaaagagtgaggtggacaagcagttaagaaagctatccagatgctgatcgcttttctacatgagccacacaaggcagatcacccccatacttatatagtacacacatgcaaaacggagggagatcaacatgctggactaattctattttactagtatatctgatagaaggagagcccttagataaatagaaactcagaaggcagaatgaggagtccccaagcttagactaacacacccaaaactacatgaagcagttggcagtcattctgttatgacctaagcataagaaatggaggttttatgtaaatgaggaaaatacctagttaataaataaataaataaataaataaaaatttaaaaaaaagaaatggaggttttaaaaaggcttaaggggaactggtagaccacatggagaagagtggacaagggtaaaaagggtttgaatgacagacataactgataaagggttatgacacagaaccatataaccaacctttggaaaacaagcaaggtttggaaaacaccaggtgactcaggcttatcaataaaactaaacagataaagagcatacaaaggtcaacactcactcgacctttttttactttaatttttggtataaagattttatttctattttacatgcatgggtgtttgcctgaagatatgtttacacattacatatgtgcattgcccatggaagggtaagagtatgtcagatcctctgaaactagagttatagatggttgtgggccttcatggggatgttgggaatcaaaccctggtcctctgaaagagcaggcaatgttcttaacagctgagccatctctgccagttcctgtgacttttcttgacatatcaaagtagaaagcatagtgtgtggctatactaagcctatagccaagtattaaagttgacaaagttttagaagtattattttagcaagaataaagccaagaatatttttttatgatttaaaatttttattagcatatatcagtcatacaaagtaataggtttcattatggcactgtcagtgtctgggcttttatgatatttacccctcaaattaaccaacgtaataaggcaaaatgaagtgataaacacggatccaatgattgaaatgaaacaaggctgtaattatttgcagacatcttgtctgcatatagagagaatgtacaacaatgaaaacaaataagagagttaagtgacaggatccaggatcaatattcattaatcagtagcactcgattcataagcagaaaccaatgggaaacccaatgtaaaggaaaatgcacttaaaacaataaaactacccatggatttatctacataagatatttatggaggaaaaaccacaccatcctatcaaagattttaaaaatactatagatcacaagctaaactaagtgagtgatttaaaaaaaccaatctcacttaaaaggatgcctttctgagtggtctataaatgcagtattatgcaaagtcagagcaggttgttctttgtgtaatctgacactagaatatatatgaagagtaaggggccacaatatcacatatgactttgacgacaaacagggaatggacagaggatggtccgataacatagagcaatggaaagcatgctatcagtatggtgtagacagatcaacagaacccactcttatgaggcccataaatggaccatatatagggggaagtgagtccaaaacacagatagtggctgcagtggagaaaagcatcctttggcaaatatttcctggacagtgggctacctttccccatacccacagttcaagggtcaaacctaggactttgcatgcattgggtcaccaagctgccttgccacatttacattgccaacatggctctctatgtcacagaacacacgaagatcaatccaggggtctgggggctgtggttaacagctgttttagcttttagcataggagagctgataatgtgttagctggcttttgcatctgtgtaacaaacaaacaagctaacaaaaaaagccaccaccaacaacaaaacaaaagccaccacctccaccacctccaccaccaccaccaccaccaccaccaccaccaccaacaacaacaacaacaacaaaaacccctaacaacttccagaggaagatttctctttgctcacattttcagaagagttggttcaaagtccttggatctgttgaccctggcctgtggaggaacaaaacacgtaggcagcaggaacctgtggcagaggctactcacctcatgatgaaacaggaagcccatgctgtagtaacaagaagggggaggatacgatcccagagacctacttcctccattaggagccagctcccacagttgctccacctctccatagtctactcagaagttgagttcatcagtagattaagccactcatgaaggccaagctggcagggtccggtcactttccatggctggcagccaagaccccctgcatgactctgtggtcttgtaatcaccccatgaccctgaggagagaaagagccattgaacagagcctaggaaacaaagctatcatgagaaatagattagatagatgataggatgatagatagatagatggatagatagatagatagatagatagatgatagatagatgatagatagatagatgatagatagatagatagatagatgattgatagatagatagatagatagatagatagatagatagatagatagatgatagatagctagatagatgatagatagatagatagatagatagatagatagatgatagatagatagatagatgatagatagatagatagatagatagatagatagatagatagatagataaatttgatgttaaaattcaaattgtctttacaacaaaaaatgcccaacaagaaataagaaaacagtaataaaataaaggaatgcaatacttaccatcagcaaaacaagggcacctggattgtatgacaaattcagattcttccgaatcagcacgtgaattcgaaaagctagaggagtaggtagannnnnnnnnnnnnnnnnnnnnnnnnnnnnnnnnnnnnnnnnnnnnnnnnnnnnnnnnnnnnnnnnnnnnnnnnnnnnnnnnnnnnnnnnnnnnnnnnnnnnnnnnnnnnnnnnnnnnnnnnnnnnnnnnnnnnnnnnnnnnnnnnnnnnnnnnnnnnnnnnnnnnnnnnnnnnnnnnnnnnnnnnnnnnnnnnnnnnnnnnnnnnnnnnnnnnnnnnnnnnnnnnnnnnnnnnnnnnnnnnnnnnnnnnnnnnnnnnnnnnnnnnnnnnnnnnnnnnnnnnnnnnnnnnnnnnnnnnnnnnnnnnnnnnnnnnnnnnnnnnnnnnnnnnnnnnnnnnnnnnnnnnnnnnnnnnnnnnnnnnnnnnnnnnnnnnnnnnnnnnnnnnnnnnnnnnnnnnnnnnnnnnnnnnnnnnnnnnnnnnnnnnnnnnnnnnnnnnnnnnnnnnnnnnnnnnnnnnnnnnnnnnnnnnnnnnnnnnnnnnnnnnnnnnnnnnnnnnnnnnnnnnnnnnnnnnnnnnnnnnnnnnnnnnnnnnnnnnnnnnnnnnnnnnnnnnnnnnnnnnnnnnnnnnnnnnnnnnnnnnnnnnnnnnnnnnnnnnnnnnnnnnnnnnnnnnnnnnnnnnnnnnnnnnnnnnnnnnnnnnnnnnnnnnnnnnnnnnnnnnnnnnnnnnnnnnnnnnnnnnnnnnnnnnnnnnnnnnnnnnnnnnnnnnnnnnnnnnnnnnnnnnnnnnnnnnnnnnnnnnnnnnnnnnnnnnnnnnnnnnnnnnnnnnnnnnnnnnnnnnnnnnnnnnnnnnnnnnnnnnnnnnnnnnnnnnnnnnnnnnnnnnnnnnnnnnnnnnnnnnnnnnnnnnnnnnnnnnnnnnnnnnnnnnnnnnnnnnnnnnnnnnnnnnnnnnnnnnnnnnnnnnnnnnnnnnnnnnnnnnnnnnnnnnnnnnnnnnnnnnnnnnnnnnnnnnnnnnnnnnnnnnnnnnnnnnnnnnnnnnnnnnnnnnnnnnnnnnnnnnnnnnnnnnnnnnnnnnnnnnnnnnnnnnnnnnnnnnnnnnnnnnnnnnnnnnnnnnnnnnnnnnnnnnnnnnnnnnnnnnnnnnnnnnnnnnnnnnnnnnnnnnnnnnnnnnnnnnnnnnnnnnnnnnnnnnnnnnnnnnnnnnnnnnnagagagagagagagagagagagagagagagagagagagagagagaaccttaagaaaacattagaatgtagtttagaaatttgtgtagttgatctggtatgtttttccccttatacttatatactctacagttaaagatttaaggaaataggagatctgggaagatcaaacttcgtgaggagttgccgccacaatggtttctgatgactgacagggtctctggtggcatggcattcccaggagtaaagaacccagctcctgtagctcactgtgtcacctgggaaacacttgatctctctagtccccagcccagcaccttaccatccaccaacacattctgggagcctacgcgagccattcctggctgtcttgtgctaatgattctgttagcaggcgagagcagctgtctcatgcagaaacgatgtgggtgaggtttgtttagctttttgattgtgaactacaagcatagacagttgagggggacagtgtaatgactccatgaagctgtcacttgccctcaggaaatcacacctgagcaccccagctcatccactcacgatgtatcgcttccactggatgcttatctgggaagccgcagacagttcatcactgaaagagtaagaatttttaccaagtccaaaaggtaggatctagttg

SEQ ID NO: 1487 - DNA, 2840 bp, Mus musculus
ctggcttccgccccggcccctctcctaagtcttccaactcgcgctctcggcacttggccgccagagcccttttggctttgggggtggtcgggatgcccgcttccgggccccgtcgggagagcgttgaaaaacttgctgggaaggttctgggctgtggggtggtggccttgcggaggctcccggcggggagggggccagggacccagaggaggcacggggccgcgtggagcccttctgatgtgcccactcctctcccctatgtgtccttgtgggctccaggcaccccatcaacccgggcagccgggatttaaattcactgtggccgagtcctgtgacaggatcaaagacgaattccagttcctgcaagctcagtatcacagcctcaaagtggagtatgacaagctggctaacgagaagacggagatgcagcgccattatgtgatgtactatgagatgtcctatggcttgaatattgaaatgcacaagcagacagagattgcgaagagactgaacacaatcctagcccagatcatgccttttttgtcacaggagcatcagcagcaagtggcgcaggctgtggaacgcgccaagcaggtcaccatgacggagttgaacgccatcatcgggcagcagcaactccaggcccagcacctctcccatgccacgcatggtcccccggtccagctgccaccccacccgtcaggcctccagcctcctgggattcccccagtgacaggaagcagctctgggttgctggcacttggtgccctgggaagtcaagctcacttggcggtgaaggatgagaagaaccaccatgaactggatcacagagagagagagtccagcacgaacaattccgtgtcaccctctgaaagcctccgggccagtgagaagcaccggggctctgcagactacagcatggaagccaagaagcggaaggcggaagagaaagacagcctcagcagatacgatagcgatggggacaagagtgacgacctggtggtggatgtctctaatgaggacccagcaacaccccgggtgagcccagcacactcccctcctgaaaatgggctggacaaagcccgtggtctgaagaaagatgcccccaccagcccagcctccgtggcttcctccagcagcacaccttcctccaagaccaaagaccttggtcataatgacaaatcttccacacctgggctcaagtccaacacaccaacgccaagaaatgatgccccaactccaggcaccagcaccaccccggggctccggtcaatgccgggcaaacctccaggcatggacccgataggtataatggcctcggccctgcgaacacccatcaccctcaccagctcctatccagcaccctttgccatgatgagccaccacgagatgaatggctccctcaccagcccaagcgcctatgctggcctacacaacatcccatcccagatgagcgccgccgcagccgctgcagccgccgcctatggccgatcgccaatggtgagctttggagctgttggttttgaccctcaccccccaatgagggccacaggcctgccttccagtctcgcctccattcctggagggaaaccggcatactccttccatgtgagtgctgatgggcagatgcaacctgtgcccttcccccatgatgcactagcaggccctggcattcccaggcatgcccggcagatcaatacgctcagccatggagaggtggtatgtgctgtgaccatcagcaaccccacacgacacgtctacacaggcggcaagggctgtgtgaagatatgggacatcagccagccgggcagcaagagtcccatctcccagctggactgcctgaacagggacaactacatccgctcgtgcaagcttctccccgatggcggcacgctcattgtgggtggtgaggccagcacgctcaccatctgggacctggcctcacccacaccccgcatcaaggctgagctgacgtcctcggctccagcctgttatgccctggccatcagtcctgatgccaaagtctgtttttcctgctgcagcgacgggaacattgcggtttgggatctgcacaaccagaccctggtcaggcagttccagggccacacagatggggccagctgtatagacatctctcatgatggcactaagctgtggaccgggggcctggacaacaccgtgcgctcctgggacctacgtgaaggacggcagttacagcaacacgatttcacctcccagatcttctccctgggttactgccccactggggagtggctggccgtgggcatggagagcagcaatgtggaggtcctgcaccacactaagcccgacaaataccagctgcacctgcacgagagctgcgtgctgtccctcaagttcgcctattgtggcaagtggtttgtgagcactgggaaagacaaccttctcaatgcctggaggacgccttatggagccagcatcttccagtcaaaagaatcctcatctgtcttgagctgtgacatttcagcggatgacaaatatattgtaacaggctctggtgacaagaaggccacagtttacgaggtcatctactgaacaaggactctaacaggcctgtcaaactctgggagagacacccacgtggccctgacagggagatgctggccaggcccgaggacggcagaaggagggagcagcattgtggggctgccctccagaaggtggagaggacgcacgcccttcgtggattgatgtgtctgacagacttgaaggactttctcctctccccctaaccagtgctggcagatgcttcaattagatttctctggaggcttctgcttccgtttctcccacgaaaaacc

SEQ ID NO: 1488 - DNA, 2316 bp, Mus musculus
atgtgtccttgtgggctccaggcaccccatcaacccgggcagccgggatttaaattcactgtggccgagtcctgtgacaggatcaaagacgaattccagttcctgcaagctcagtatcacagcctcaaagtggagtatgacaagctggctaacgagaagacggagatgcagcgccattatgtgatgtactatgagatgtcctatggcttgaatattgaaatgcacaagcagacagagattgcgaagagactgaacacaatcctagcccagatcatgccttttttgtcacaggagcatcagcagcaagtggcgcaggctgtggaacgcgccaagcaggtcaccatgacggagttgaacgccatcatcgggcagcagcaactccaggcccagcacctctcccatgccacgcatggtcccccggtccagctgccaccccacccgtcaggcctccagcctcctgggattcccccagtgacaggaagcagctctgggttgctggcacttggtgccctgggaagtcaagctcacttggcggtgaaggatgagaagaaccaccatgaactggatcacagagagagagagtccagcacgaacaattccgtgtcaccctctgaaagcctccgggccagtgagaagcaccggggctctgcagactacagcatggaagccaagaagcggaaggcggaagagaaagacagcctcagcagatacgatagcgatggggacaagagtgacgacctggtggtggatgtctctaatgaggacccagcaacaccccgggtgagcccagcacactcccctcctgaaaatgggctggacaaagcccgtggtctgaagaaagatgcccccaccagcccagcctccgtggcttcctccagcagcacaccttcctccaagaccaaagaccttggtcataatgacaaatcttccacacctgggctcaagtccaacacaccaacgccaagaaatgatgccccaactccaggcaccagcaccaccccggggctccggtcaatgccgggcaaacctccaggcatggacccgataggtataatggcctcggccctgcgaacacccatcaccctcaccagctcctatccagcaccctttgccatgatgagccaccacgagatgaatggctccctcaccagcccaagcgcctatgctggcctacacaacatcccatcccagatgagcgccgccgcagccgctgcagccgccgcctatggccgatcgccaatggtgagctttggagctgttggttttgaccctcaccccccaatgagggccacaggcctgccttccagtctcgcctccattcctggagggaaaccggcatactccttccatgtgagtgctgatgggcagatgcaacctgtgcccttcccccatgatgcactagcaggccctggcattcccaggcatgcccggcagatcaatacgctcagccatggagaggtggtatgtgctgtgaccatcagcaaccccacacgacacgtctacacaggcggcaagggctgtgtgaagatatgggacatcagccagccgggcagcaagagtcccatctcccagctggactgcctgaacagggacaactacatccgctcgtgcaagcttctccccgatggcggcacgctcattgtgggtggtgaggccagcacgctcaccatctgggacctggcctcacccacaccccgcatcaaggctgagctgacgtcctcggctccagcctgttatgccctggccatcagtcctgatgccaaagtctgtttttcctgctgcagcgacgggaacattgcggtttgggatctgcacaaccagaccctggtcaggcagttccagggccacacagatggggccagctgtatagacatctctcatgatggcactaagctgtggaccgggggcctggacaacaccgtgcgctcctgggacctacgtgaaggacggcagttacagcaacacgatttcacctcccagatcttctccctgggttactgccccactggggagtggctggccgtgggcatggagagcagcaatgtggaggtcctgcaccacactaagcccgacaaataccagctgcacctgcacgagagctgcgtgctgtccctcaagttcgcctattgtggcaagtggtttgtgagcactgggaaagacaaccttctcaatgcctggaggacgccttatggagccagcatcttccagtcaaaagaatcctcatctgtcttgagctgtgacatttcagcggatgacaaatatattgtaacaggctctggtgacaagaaggccacagtttacgaggtcatctactga

SEQ ID NO: 1489 - DNA, 69173 bp, Homo sapiens
  misc_feature (27560)..(27579): n = a, g, c, or t.
aagagtctcccttttctagtaggccatttcacaggagcaaatgagatgtgaaattagagctaaaagactcccaaagcacgaggaaacacaagatcctcggaatgaggcatcaccaggacacctaaactataaaacagataaaaattaaggctgttctgattgaggtggaggaagcgatccctgtgaccactctctttacttcctcatcttctcagcactcccatcaacttctgaggatcccaggacctccttagggcacaatttgaaagcttgactggtttacagaaagaatcaatgccaatgccagaaggcctaagtctggtcagaattcgccatcgtcaacttgtgtggtggtggacaaactacctaaccttccttggccctcagcttcttcatctgccatggagataattttccctgctctacatgttgcgtcttaactagaaacccacagacacgacaatgctttaagcagaaaacacaagacaaaagtaagatggcgttggttttgtttgtaccttgcttcatactatagattttttgtggtaggttagtggtcaaataataagttggacctccaggccctcaaaattgagtctttttttttttcagttccactccaacatcaaaatctatagtcatctatgtgcctttcttacaagtgaagcccctttgccccttttcttgcccccatttctctctacttccagaactcccaggtccacctgcagcctggaccttcagagtccccatcagtctcttgtgtttgccccccaaccttgttccaacccacccctctctggttgccccatctccctcttgcagaacctcaacttcaggaagggcactccccaaaaaggcaaaaaataccccatcaccagtccactcctccctgccaaactccatacaacctaactgcatttagccttccaccctgacatctttcagggatgtgccaacagcaacttttgtgactattttccaatgttacgcaggcacctaatggccctgggctgtagtccccacttggaggagctgccagaggatcccaggacttctctagcattagctcttcataaagagactttatctgaatgactagataattgctaacttgtagagcaatctttaaaatggctcaaatactgcacaaggcaggaacctagagctgggggtatttgaattactttctagtagagagggcactgagagtagaggacagaggataggctttggagacagaggggcctgggctcaccaatcagcttcttcccttcctgaacatgtgacactttccttcctgtatctcagtttactcatctgcaaaatagggacatagagaatggcactatcttttttttattattattatactttaagttttagggtccatgtgcataacatgcaggtttgttacatatgtatacatgtgccatgttggtgtgctgcacctattaactcgtcatttaacattaggtatttctcctaatgctatccctcccccctccccccaccccacaacaggccccagggtgtgatgttccccttcctgtgtccatgtgttctcattgttcaattcccacctatgagtgagaacacgtgatgtttggttttttgtccttgtgatagtttgctgagaatgatggtttccagctgacaatgacactatttattaagattacatgagatagtatatgtcaggatctctcaacttcaggactattggcatttggggctggataattcttagttgaggagggtgttctgtgcattgcaggatgtttagaggcatctctgttctgtacccaaaggcactgctaccctgagttgtgaaaaccaaaaatatctccagatattgcccaaattccccttggaagcaaaatcaccctgagttaagagccactggtgtaagagaacacgcttgatacaaaatcaggctctcactattgctggatgtatgtgacaaactcacgtttataaattcatttattaaaaagatacaaagctgataacagatctgagagtgaaaatcaaatctgtcaggcaaataccctctcatctctcgttccctccccattccccatcccaactcagaacctccatcaaagaccaggtatgccgggcacgaattctacctaaatgatccatactgaccccagaactcccctccactggcgtggataattcttacagcgtgggcctccacccttgtgaagttgaatgcattaataccagcaaaatatttcttaatctcctaagcctcagctttgaatccttaaaaaggaacgaaagaaacagcacaaatctcttaattagaatgcccaatcacttcgataaatatttacccggttcgggcatgaggcatggaaaccctgtgccattagtcaatagaggtcagcaaagtgcaccttgggaacagtgggatgcaattcagctcaactttggagcgggtgtaggggagaatgtttccaggcttatgcttctgctaaagacaggtgaacaaacacattccatgcctaccctgcacacctgcccccccacaaagtctcaggtgggcatgagggcctcattgtaaatcatcgcctggtagtctggcttccaaagctttctggagagaggcagtggcttcctctgctagttgggccatggagcaaaccaaaccattccccagtgagtgttctctgtagtgccctggctgggtacctttgctcctatctggagctctcttccttcctcccctctgagccacagcaagggccaccctctataggcagcttccctaatagtcccagtccctccccacccccacccttctacccaataccatttccctgcacaggctctatttaactctgagggcctagatacagcctggaatacaacctggaactggggacagtctggccttgtgtatgttttcgaaggcaagggctttccttagattttggaggtaagctttctgcagattcttgccaggtaagaaattaggtgccattattctcattttacagaggtaaaaatggagaccccaggagtttcggggtcttgcccaagatcttgcagatcttccagactcctgaagcccaggttggtgctgccacacagtccggatgagtggatccctctctcctggctgtagtaaccttcagaggcatcctcactggagcctgaaatgggagtcgggataggggcagggtcttagagaagcaagctcttagctccgttccccagggaataaaaacagcttgtcaggtggcaaaactaagaaaagaccaaggaagcagaaaccacccaggtgcggggtgagggggaagggaagggtttcgatagaagtatttgttcatcctgtcccctctgcccaccacaacttctgtccatccttttgagctgagctcaagctccagccttccaggaagcccttccagaaccacccttctcacaactgttctcccccacttcatactttataggcttactttttgtggcttgtcttctcagaaatgctatgaatattgcactgtggtggcagacagatttctctctgcctctatccactcccacctcaccccagctttagctttgaattgcccctccccattccttccttcccctctcctgcacactccaagggtccttgggcttcagggatgcccaaggtcatctgaggaccatgataaagaatgggattcccagagagggagaggaaggcccagtgacctcgggagggccttcctgagagtccagaggagaggagctgggtgttcccacctgggcttggctgtgtctatgcagaataaggttggggctgctgcctggcttgctccccccagggctgggatagaagaccttcctagcctctccaggcacgcagaaaatgttggaggagttgaatcacccagatagttgtacattatcatcatggccaccacagctaactgttatcgatcacttaatgtgccaggttctgtactaagtacactacatgcattatctccatcgattctcgggacaatcctcctcaggtactggattgttatctccactttacagatgaggaaatggaggcttagcaagattaaataagtcccccaaggtcacatagcttgaaccagtcagagaatgggaagacgagttgggagaccctgggaagtcctctccttccactagccttggtcctcttccctgagatgaggtagctgcaggatgagctttataggagctccctctggggccctccagattcctgtggtccctcttgcagccctggcctgcattctcaggaaagccaagcttgtagatacagcagggcgtagtaggtaagggcaggcacactggtgcccaattgcctgggtcctgtccctgggacactgatgcccaaatgcctgtgtccatcagtcactgatgtgaccttgggcacatcattgtaccactgtgtatcaatttccccatctgtaaaatggggctgatactcatggcacccacttcatttcttgtgtgagtattaaatgtgttcatatttgtcaagtgcttagaatagcactgcacacagcttgagcactatgtaagagtttgttaaataaataaaaatttccctttcttttgctctatgtcgaggtgcttgcttgtggaggaaggtctgggatgcccggtgagtggaggggtgggggtaggggggacagaattactctagtcatgaagacaaagcaattggaggagccctatagaatcaaccgagggggtgtggcatggtgagggagatttctgtcctctctgagaagttccaacaagaggcttccacaaatcaaagccagtggaggcagtagaggaagggatgacagggagaggtttgcaaccccacccacggcactgtgatccattcctcaaataggtgaccacagcctggtggctggcctgagccataccctttaattcctaagggggtaaagcatatactaactcagctaaagtgcttgaagaatattttaaaagactcagagaagtggctcctcggactggcagacagttgctcaccagccaccttgcaccccaaataaggggctgggggctggggagccgctgctctgtaaatccaggccgggctttctgtctcacccgggtgacttttttttttttttttttaatgtgccaggaattcctctcccacgtggggtggactccgaggtactcaattaagcagccaatgaaaagtcagctctccggtagcaaatgaccctgacacttcttgtaacataaacagttgaaacgtttccaattagaactggagacagagacgtttgaactctttctctcgactcccctccttctttaaaataattgtcaagcctttggacggggtgttgtatacatgttttttattttcttttctctttctccagcataaaagacatgtatttttctccttgtttttcctaatttgtggggtggcatgttggggcggggtgggggggtgcggggagatagcggtggtaagcttaaagggatgttggcctggttccttacctccctgcccccttcctgctcagggttcaggcagccggtgagagcggggagtgacgctgggtgaggagtgagtgggagctacaggcaggagaggcctgttctcccaaagccaggctctcagaaagggctgggcatgaatgaatgaatgaatgccttttcttcagcaaaaacttgcacgtatccagcttgcgtaagcaaaggggtcgctgaggttggccattaaactggctgccctggattcgaatcctgaccctctgcccagctcggggcaaatgattgagctttctcagcctctcttttttgctctataaaatggggtccccagccaaactgcttccctcgggagtgaggtaagggagaggagagcgctgcctgggtagcagtgccctgccttgtacctagtgagcgctcaagcgctgttcttcctgactgcgtagcgtggttctaccgcccggctctgcggaggaggcggcgctctgcaaaaccgcgtcggggacacgcagccgcgaactcctccagcgtgccgggctcggccctggcgctggggctcacaggtgaactcgacgtgggtctgccctgctggagcgctctggctcgtgtggtcaccggggggcgtggacgtcggggcaggagggacacccgggcgagagacagagctgctgtccttttctgtacacaatcttcggaagacccgacctgggggccccgcggcttctcggccgcctgctggcgggcgccgtcggagccagtccagagggagactgagagggaggcccggcgaggcgccgcgtccctggcatcttgaaggcattgtgtttaataaatccgagcgagacgcacacccgctctcatccccctctcctctcagctcccaaatcgagacctgctgtaggacccccagtttacggggtcttaaaaccccctctactttgagtagcagcttcaaagagctccctttaaagttcgccccctcccccgcccccacgtcccctttcacaggccacccctcctccaccactccttctagacttctggaggacgacgacaacaaaacactaaatgcaagtttaaaggggggaggggaaagtcttcaggcttcctccagaacgtgggctgtggaagtgacctgtttcaggcgtgcgcaggagtcgccacaccgtagagtttgggttttctttttctttcttttttttcctcttttcttttccttcttctttttttttttttttttttttgtttgtgtgtgtgtttttaccttttattatttaaattgatacgtttcattactagggagaaaaataaaatattcctttgatacacaaaatcaaattgatatttagcctctgcttacttttttatgcatggctcctttataccacatggtagtgacagattgtttgagctggaaggaaaagccattcaaagctaattaagcagccattccaagcactatttgcaagcgggaggctcagaagcctcggcatttgtcagcgctcccccaccccgcgtggttttgactgacagctctggccgcggactgacagggcccagcagctccgccaatcagcaacgaagagccccttcggcggtccgtgattggtgactcgcaccttgctcggaggcgtggtcggcgtcccccacgtggggctggagcgagaaatgggcggggcgagtaagaagcgggtgcgcccacccgtgacgtaagggggagggcagagaagggggagggggaaaggaagcgccaaagaggagccattttgtttctaatgaatgctgcggccagatgctcgcatctgtcgagccgggcttctccctcccccgtcttcggtgcgcgccgaaacacgatttatgtttttatttaggagaataaataaatgaagaggggagcgcggttcggggctggcggccggagcgggcgcggggaggttcagttctgaggcgggtgctcacgtgtaactccccgcgctccggcctccgagcgcccgctagctctcagctcctcattaagatgcaaaagcgaacctccggctcctaatgaggggaaaatatagatccggggacgcgcggccggctcgcgcgcgggctcgcggacttgccggggagggccccgggggtcccgccttggccgtccaccgggcggtgcgcgctttgaggtccactccctgcttgctcgtctgccccgccgtaaccccgagcgcgggagggcgaggccatcggtttgcgggcaagctggccccggagtcgagtggcctgtgcgaccaagcggggggtccggggggcccggggccggggcgagcgagcgggggagcgtccgcgtccctcggagtgtccaggctagcgaccgagacacctacaggcttccgccaacgccgtggcactgccgggagcaggctgagcaaaccaggtgggaactcggagttcccgggcctcggccgagcagggtcccgacccccatccccaaccccctcagcctggggatgcagtgaggagcccgcgcggcgaggctgcgtcgagggtgaagttgtgcccacggggaaggcgccccgaatggggccagccgtggctgagcctgttgtccacgggcagccgggcccttccatctgcgctgcccgcctagccagagtccctcagacttctcctcgcaggcagccgccgcacatcaaaggagctgtttatttggctttctgaaaagaagggcgagtgaacaaaggagagctgggggctaatgtgggggaggcgggcagaagaaggggtgaagaaaaggggacatcctgagttccgagcaaatttttaaaggtcggaggcaactttaggagccaccgttttatcagtcctaaatcttttgaagtgaaaacattaaagtgacaaagtgattgtttgttttatagtatctaattgggctgctttgcagacctaatgagattagagggaggaatcgttcgccgccgctgcagaataaactgatacattactaccagccacaggttttgaagattgtacagcttgtcttattttcttttgttgttattcctctgtcttccctctttcctcctcccgctaaataattatttgctagtagaccgtgggaaaaaaaaggaggaaaaaaactcgagcagcccaggactataatatatatctatttattatatgtctttcggttaattcctgatctgaggagcgctgtttttcactcccatgcgaaagtcaccagcgggtagggcctgattgctacttttcatgcatagttttagacacaagagggcattgtgacgtcgcgcccagcggcacccagtcgtaggccgagtcccgcagccccacgtgggggccccgcgctcccattggccagcgccggacgaagctgccacattattttgttacttttcagtccctatttggaactgctctcgcggcagttcagacctcgtgctcgtccccttcgcctgtctgtgtgtggtatccgtaggtccggggcactttttttttggtgtgtgtgtgtgtgcgtgcgcgcgtgtgtgtgtgttgggtgtgtgtgttttgggggtttgccggggcgcggagaggagagccgggccgaggggaaggaaggaagccgtagagctccccggtctcgggctgcgtctcccctccagcgctctcctgcctgtgcgctccgacgcggcagcggcggtggcgctgagcgctcctcggtggggacgcggtgctcaagctgggagcagcgagaaccctttgcggaggcttcccgtgcccgctggacttaggatgccagggcgtttgatttgcacctactgagcccggagttcctccccggccctgggaagggcttgcagcggcggcggcggcggcggcagcggcagtagcagacggaacagcaggctctcctctccgagggggggcgtcgaagcgcccgcgccgggctcccgccctcaccctccggcgctcctgcggccccaagccaccacctcgtagcccgcctccttcctcttctcgccgcgagccccaggcccggacgcctctaggatcggacccgcgcgccccggatgcttggggctgccccggcgcgcccccctacaggcgcgacccgctgagtgacccggagggggcccgagctcgccccaggaggggcccccggcctcgggaccccgcgccggacctgctggggagccgacgatgtccgcgcagtcccaggcattgacgcgctcgacgcagcccagggaaggcggccggccgctgcccgccgagccctaggcgcacaaagcccgcgcccgccgcccggccccggcgcccgccgacgactttgccgcctgctccgcggctctttgtctccacttggggcgggcgcccgactctgggatttcgctgcgagaacgagctgggggggccgggggcgagctctcggtttcccggccgccccccgctcgggctcggctcccccctcccccgcacctccccggcccgggctctcggcgcttccacgctctcggaatcacgacccctccctgccatgtatccgcagggcagacatccggtgagtaattgcaactcggtttatttaagcatctatcatggcagggtaaacgaggcagtttatctggcacctccattttgcttgttgctacctttatggtgtgtgtgtttgtgtgtgtgctctcacacaaagggggatgcggccggggggcgccgttgagagaggaggttaattccgcgcgagtggcgcggggggctgcttgtgttccagggggagctgttcacgcggtccccggccccgctctgaagtctcccaactcacccggcttgtctcccgcccccgccttactggggagagggaggcccttggtgaaaggcatgggagccccgctgccgacggggagagatggggcgccccccctccgccccgtcggagagctgagaaacttgctgggaaggttctgggctgagggtggcctcttttggttgggcgccgttggggaggggccggggccgctctgagcgcggtctcatgcccccgccccctcccctgtcttgtcttcgcgggctccaggctccccatcaacccgggcagccgggatttaaattcacggtggctgagtcttgtgacaggatcaaagacgaattccagttcctgcaagctcagtatcacaggtaaggccggtgggggccgccccggggctggcggggaggggtgggtccctgcgcggctcctgccatcccccgcggggacggagggggctcccgacctaggggcggcggggcagcccgggcctccgccttttgtttcccctttccgagcgcgccgccttaaccctttactgcccgcagcagcccggctcccagcgccgcccgtggggtccccgaatgagggtctaggtcgcggcgagcgggttcactccgggttctgggtgtcgggagccagcgtcagggtcctactcccctgctgccgtgataagtcctttggctcgcgggaagtttcgaattgtttcacatccccctccccacggcggggacccaaatccccccgcgtccccaggctgtgggataatgggggcgcccccgggggggtgtcaggaaagtggaaaagtggctctagaggcccttgggtcggggcctcagaggaggctgtccaggcgccacgcctgagccggctcctcctgccctcgcagcctcaaagtggagtacgacaagctggcaaacgagaagacggagatgcagcgccattatgtgatggtgagatgcggccgcgggcctggggggcggttggggcgccgaccccggccgggggcgcggcgtggatctggggagatgagcgccaggtccccaccaccgcccagccgcagggcggccctgagagagggcataatctggtcttgccctccccttccccagcttccattgccggggccacttggaggagggtgagtgaggggaggggcagaaagagaaaccccgattccaggccggagacttctgtactatctttatgtgcctttaatttgtgttttgaaagtttcccaggggctgattgccattgccctatcttggctagtaagataggattggaccagcccatgtgaaattagggttggtaaaaatctctcttagtgacctcctgggagtgtttggaaacttttctgctttgcagctgggatctagccagagtaggacagaagccctccttccccagggtgttgtgaggagtggagaggccttgtaaagctctctctgcctccactcccctcctcagggatcccccagctgggtatcttctccacgctggggcagtaggcagactgtcttccttttgcccagcaagttttaatcttcatttgtgagagggcacggctccctgcactgctttccacataagaggccttcgacacagtgctaaataactctcagaggacaagagggtcccagtgtacacacgattccctgttgaacctgaaccttgtataaacaggatatagggcacatgtggtgcttgtgggagggaaggcccagctccccttactaccacataatataacgttctgttgagatgagaggaacgctcgcccttgtcagctcttaaaccgctctgtaagctggctttggggtttgatttaaacttctttagcaaatgtatcgtaaaagtatgatttggccaaaacctttccaagaaaaaactgattttgaaaaatgaccagatttctgtgttgtctgttaatagccattctttttacttttagtactatgagatgtcctatggcttgaacattgaaatgcacaagcaggtaagtgcttttctcttttaaaaatatatttcattttttaaaaacttatatatgtggacttcttatgttctctcttgtttgaaagtgagcctgcttcttcgattcctcccccttctccttgaagagtgaatggatccagtccttgaaatgcaaggtctgaggctttgctgatttttttttagacatgttgagcttttagcatttgagcttgtgaaattagtcctggtcttggatctcggtggaggataaaggaccaaagggaaagttgtacctccaggatctgctttacaaactcctgaaagcccagaggtggctggctgcttttatctgttttaatgtaaaattctcaagaggaaatgcaggaggattttttttttctttctccttttttttttctttttgcagaaatgtgatgttctgccttgataagattaaacttcaagaaccttaaaagccaggctgagctgtcgaaatttaagggaacgaagccactaactgcttaaaaatatgaagccagaatgaaatacaacttcagtgccttgcattgacaaggtggctttctcatccctgtcttgatttgaaggcagccgagttcccattttacagagaaggaagctgaagctcctgggtgaagtaacttgcccaggggcagcctagccaggactttcgagatggctgggggttgagctcagctttgaaatcctgaagtcaaaccagtttagctagtgtggtgtcgtttgatggatatgtaaactacctggtattgtcactcttctaataacagtatacctcaaaccgagcaaatacaaacaccctttatctcagtgcatatcagtaactagtcccagtgctaggctgggctgtgggagaggcctgtttgtgtatttgtgttctgaggaaaggctgcctataatttggcttggccaacgtttagagttgacttggcacgtataaatggagcaggcaggccggttgttctttttaacaattggtgttcatgaaatctcagaaggctgttgactcattctagcctttggtgaccgtgacttgaatggattttctgctctaaattaacagtcgtttacaaggtttcaattttgctctttaaggaggcaggacccagggcaggtgagaagggcaggtgaccctggaaagtgggcagattcctacccactcgggtggcttcctatagagcctttgggatctgtagtttcctttcccctcctggagggagcccccagtgttgggtgaagggaagccagaaaggggcctgagtttattgagcaatgtgtgggaagccagcttgtggcttcctgagggattagttagtcccttaggaaggcacatgaaggctaccatgtttttacttcttgacacacagaaataatagacagggctttatacgtaaagatatttctccttggaaaaatagaatagagacaggttctgcaactggaaggggccaggtcccggaagaatgcttgaaatggaactgggggcccaggtgtttcaaggaccttggggtgtatgcagggtgccacttcctccctttgtctgccctgtcttaattttttttttctcaaatagtatcttgggtgtgtttaaagagggtaattgcacccaggtttaaaatttatagcagcagttattggaagagcttggtaattaaggtgtaatgtctcgttgcatgttgaggtctgcatgggtggtgttccgcatgtctgtgaatgaatggtgctttggcactaagaatccaccttggctcgcagcagatctgttctgtgagtcctggggatgctgtgaacgcaggaagagttaaatatcttaacgcatttggtggtggggtttatataaagagcagctgtgtacatctgggatttctggccattccccaaacaaggttcttaaggggagaatgcctggggtttggctacgttgtctcatttaatcctctcagctgccagtggtggatagaggcattctttgccccctgtttataggtgaggaaactgaggcttcagggaggccaggagggcagagctgggattcaaatccagccctctggcttccccactgggcactttaccttgcttgccactcacctttgccctctagcctgagttcccagcctgaacatgtgtgctctgaatgcagtggctttgcaagcttatggcagtctctgagttgggtgaaatcaccctgtggctgtggaggaacaaagaggcaaggaggtgaagaaacctgtgccgtgaaatgcaaccctgatctaatggagctggccactccctaggtttgcaagggttctgtagaagaaagccctgccactaattgtagtgtgggtcttgggtgcatttggcgaatggtggttaggcctgagcaaacaagtttatcagctgacctgtttagcggttgactggtgttttatcggcacacacaatcaagtgactggagtgcttgaattattcatgcagtgtcctgccctctagacttgactgttcgtgtgattacatctgcctggaacaaacaggctggattcttcatctttaagctggggtgggggtggggactgtctgtacttttatataatagatgatctatagagctagcaccttgggaagtgtggcagtcctcagcctgcgcgcatacacgcacacgcactccaccatcaccaccacatattttttttaaaagctctcctttgctggctctatgggaaatgccaattagctgggaacctcgagtcctgccagatgggcccgggtattgacagagggcagctgatgaggtgcgtccagcccatttttattttactgagaggttaaactcactgtggctggctccttctctggctgtttctctgtctctctctttttccaagctgtcaaaatcccagagaagtaataaatggtttctcctcctgctcttctgcctccctccctaattatggtaaagcaaagattacagaatcacaggcctggcccgggacttcaagaggtcacccacctccaccaagccccctgcttccaggcagaatgtcaagggtggttcagagagtctgggaaggcagtgatgactgaccggctcatcacttgccatcttgtttgtgcagaggctttccagtgtcagccacaaataacaaagccagcttaaaaccaggggccccagagcaattgccatgcattggatttgaggcactggctctctgagaagctgggtcaggcagccttttcacccactgttggtgagcactgacatttttgaaagtggacttgagccattttgattttggggcagtgtcgtgccgacacaatacagtcacctttttctgtgaactgaacaacctttcctgtaagtttctctttgaatcttggaactggaagagccctttggcttctcatgcaaacttttcaagttacagatgaggaaacggtggcccagagaagggaagcttatgtactcagtcatacagtcccacgttagtggtaaagctgctactgctgcttcccttccaacccaggactcttttctgtaagactcaagaaatgaagagtgctccttttctagtgtattctgtgtctttaattactattgcttctttctgtgttattatccaaacaggctaaggctacaaaactggccccaccaaagtccaaagtgccccatttcgggttgtataatcatatcactgaacccttattgtccacagtcctgttttgaattgccagctatttgcacaactaatgatttgatgtgtgtaataataatacataatgcataactagcaatcccagaggaaagattcacagaccgggaaaggtggtatatataacctgtgaactttttaccctagccatggggtgccataaacacagggctgaggtaggaaatggaaaatccccatttgtcactcccctcccctccccgctctggatcttctcatctaaatgataaggggctcacctggaagatcttgaggcacacagaagttttgtgaccacggtgaaggtgcaaggtacaggtggccagagggagctaccaggcaatgaggttacaaaggactctgccaaggagttgagcctatcttgataggagaatgtgggaccacttgcaaagtagaaggggtcaaaggtccttagactagggaagtgcctatttgtgtggcatctgagttgagctgtgaaattttttttttcttttttgccagagtgctagcatccaagaaccctcccacccggccccatgccctggtatctgtcttgacttttcctgctatattgatcttccctggaacagactgtaatcacgagtcctctcactgagtgggtgcctgcctcgctcagctttggggtctgctgggctccaagctccctgcatgctgtctagctagagggaggttgccccacccctcaagactgcctttggaccccttttctctagttgccagtgggagtggtagagtgggggtttcagtgcttttggggtcttttccttcttgtgcatttgtcattgaaatgaccctgggagatgagcaaatggccccttgtccttactttacagatcaacgggtgggaacctggctcctaattcgggactcattctctgaactctcttggaccaggagcccgtggcagacacggagttcttcctttccttgaactcctccttcccacctaggctgtttgtttccattttgttgaaggagtgagtcagtcaaggaataaatctccttttgctttctacgtgggagaatgtcattctgtctcattgtttgtacaaaatactgggacaccaggggcaaaaacgtgacaaagacctaagcttggcagtgttttcccctgtgatctggcactcattcctcatctcatttttgtaggtatgaaggaagcccctctgctgaggtctctatagcacttagtatgtaataggtgctcagtaaacatcttggtttttcttcaaaatttactcaggttatctgagagtagagttccgattccctgagccctgtgagtaggaagtggggattttagttgtgggctggccgcccgctctgcaggcttcctcctatggcccagcatccagtttcttcatcagtgaaatgagggggttggattcattcccaaagcagttattaggggactgggatgtgctgggtgtgggctggggttggttacacagccgaataagacaccattccctctgcgggggagtcggatgtctaaagaagtaattgcaatgcagtgaggtaagtgctaatgtggcccaagtgtcataggaggagcacccagcacagaacagcttattcttcttgggtgagagcagacttcactgagggctttgcttggcgcgagtctgaaagggagggtagggtttatgaggcagaagtcggcagccgaggcccctccagggtggcaacagctcgcggcaaggcagtgagatatgttctagaagccacacgtcttcggaatgatgtggggcggggactgcacttgggaagtgaggcgaggtggtgacattttgcagcagagcgatctccaaggcccctctgcccttgcagtcgcggctccccacccggtggctccctgcatccctgcatggctggctctccagggctggcctgagtccatctgccgcggggtgggggtgggggcgggggcgggggcccgctctgggccgtttgtggcctgctctgcctgctttcctaccgtaatatgctgctttgaactttattccccaaagtggcattgtctcctttctcatattggtaattctgtaatgactggttatgacccgccccctcccccatatttaattctcatcagcccagctctccactttgctattaatgatagcagccagcaaaatagctttcaacatgccattgacagtctggtttaagagagcacttgaagtagtgctagacagctgaaagcacccataattgtgtaccagagtgagaactgcgtgctcaagggccttgtttttatatgcttaaagggacaatatcttgttttcaacaaatgctctctgagactcacagccaagatgctttcttcctttttccttttcctttcttcttttggctttctcttctccttcaaaatacatatttaaaaaaaattctttataaaataattgttcccttcaagttggggttaaggagaaacttaaggaagggggaaacgtcctgccgccatgtaagcggggaatatttggtgggtttgttgttttgaagcatcgtcctttgcaggcagcaagctgtgggtcagccttgccctactgagggtccttaggaccttgcgtttctcaaggaggtaatgggagagtctgaattcgcatcagcattgattttgaattcttttctttgctaaggatgttgcacaatcggtgggctgcagagctgtcactgtgaatgtttaggcagaggccaccttttgggggagggctggaggagaggggtcaccgtgttggagagtcaggccatgaccgctaaggaatcagattctaggaggctgtttgctgcagagttgatggcccaagaggcccgtctggaaatcaacagggtgggtggggcaaggacttgtattcttaagtacaggttcacaccaggcttggagggttaaccagggggcccggctagtccacccggcagattttatctgagaacaaatacttttctccccttcacaccagccgacttcattattgctttgaaaatgcagtcctttggaagaggtttcctttgcctctctgtcaccaaagcctcccattgccaatgtgtcctgtgaagggagaagagagaagcaacttcccatctgtggggcctgagaggccagggaaaccctgttggggcctggagtatatgtcgtcatgttctctcccaggctggctgctcttggtaaagggtaggagcatggatgggcttggctcgtgtgtcttaggtggttccttccatcacccactgtgtgaaggataggatccagtgttctggctgctgccaccaccaaataatcccaggggaagtactttccagaggacaaactgtttgaaaaatttgatcttccagatattatagattataatgctacggcctcttagaatttctgtagcacttgattgcaaagcagattcgacattttcatcttagcagctaaaataatgggtatttgggtccaggacagacagacaccaggataaaagcatcagagcataccctgaaagcttggggtgtgaagatgacctgtgtactagagggctgtgttctcaaattggggttggggaggtgaggcctgtgctgtgacaggactgtgagttccgtgagggacaggaccattttgtatttgttttcactaagggtcctgaaccctgagcagtgcctggcccatactggatacacagtgtgcattttgtggggactcaaggaaggaaggtaatattccagctcagggttctctctgaccctgaatagtgttatggactctttgggaaggatagaagctttcttagttttctgacagaggcctgtaggctgcaaacgttgtgtttgtagaaagagttgtaaaggtgtcatgagcctttatttaaaagtgtctttaatgtatcttaggcatctttttcttttcatctcacactatggacagtttaagtgcaaaaggggaagaaggcagggtgggggtgcgaagagataactgggaggaagagatgacaaagcagagatgcggaagagacaagtgctgagtgggtgaattggtaaactcggcttgccatgccttggctgtttgggcatggagttccaagtgttgtggccttatctcatgagccttttaagtttgactattgttcacagttcttctactgctttttttgtttgttaattttgaatgaaaactaccgcaggccgatagaagtttctttttcgtttgcgctggaaggctgaccctttcctcaagtggagacccaaatgcagaagagctcttcccactagtgttttagcactgaataccaaatgcaatttgggtacaggagagggctctcccttcctggtcagccatgaagacttgaggtttagactccaccaccctgccagctatatgaccaaaaggttggaggaggcggcctttcacccacttcccaaatctttcccttgggctagccctcgacaggtctttgctgagtttggatctgaaactgattaattctgataatactggcaggggcatgctttggaaccggtgatgctttgtgatttctgctggggaaaatgagaagaggaaggcagttcagtgcagactagtggacaagggatgggagtccattctagctctctggtgggggtgaggtacaagaacttctattaaccttcctggcctctgtccaggaagaagtaggacactcagagggctcagaagcagcaggtgatgccagatggtctggagtgagggtctaactggtcgggtgggatagaggaaggaggagcaggggagacagaggaagtgagcctgttggcactgattggtcaataggtcttcagctcatccttaaacccttacctgcttcttttcctagaaggaggccccttcctctgatctctctctccagtgaagaaagctgaagtccagttcttattttgctttgcctaacaacagaagtcctggggaaagacaggaagaattgagattgatggtacaatccctgtctcccatccctcaatcgctgggttttcatactttatcccagagaaatgggggatctccatgaagccagacttgaaatgggggagaagcagcctggtttagagctcgaaagacatgcccctctcctgcagggtcctgctgctgttggcctggtgtcggtctccatgtcacccagtccttgtgtgtggcaggcacccacaggcctggtctgcaggaacttgagaagtgtctagatacccctttctcttagccttttgggttttctcactattcttttacctggttttttaccttacttctcaagagacccctacccagctcttcctcactatccatttgcccagggatattgggcaaactccctttttaaactcccaggatgttgaatgcccattgggcctactggatgatggatggggtgggttcccagcaagccagtttttcttggccagtggattccctttctccctcagaagatcacaagttcttgccgggtgatcctggagagttaggtatagagcaccagaagctgggagatttgtcttcatggctaagaggttggctttggagtcagacaaatgtgggtttgagtcccagatcagttcatgttggtgtgtgactttgagcagactgtttgacctctgtgatcttcagtttgcagtggagataataataacacctgcctgttgcggcagtgctgtccagtagaactttcttcagtgatggaaatgctgtatgtctgcactcttcagtaaggcagccaccagccacgtgtggctcttaagcacttgaaatatggctactgcgactgaggaactgagtttgaaatttaattttaattaaatttagctagccacgggtggctggtggcttcataaattgtacagttacagttatagggagtgccatgaaggatgcatatagcctgcttagcacaaaaccttgcacatggaaaggccgaagcaaggtattctcacaaggggacagagtccccaaattgtcaaggcctccgacatagaggacaagatccttggtgttgcatatgttgtaagatttctcagagccctttcccatatgtgacttgttggctctacggtcctgcagtgtaggcaccgtgggcgccacgcatcagatagcagcactgacggttaaagaggttgagtaacttgctcattgttgcacagcagaccagtggccaattcagaactggaaaccaggcctgcttccctcgtggacctcagtgatctttatccataggctatatcaagatgaggtcttctgtggtcttcccacatgtctacccccagaccaccatactacaggcatcagttccagtgctgggaagaaaccagatgaaacctttcagaattcagtaaaacatgagcatcagccacatgtggatcagggattgccaccctgggcgctgtttacatttgggactggataattttttgtggtgggattgtcctctgtgtttaggatgtttaacagcatttctaatctctacccactagttgttgttatcagtgcccaagttgtaacatccaaaaatgtctctagacattgccagaatcccttgggggaaacaattactattggttgagaggccttgttatagaggaaggagtctggctctaacctgggagatttgcttaccacctggtcttcctgtgtggtcttcctgtgtgacagcttcttgccctctctgggcctcatttgactcatctgtaaaatgagaggtcaaatggtgtggcttgggaggaggtcagtttgagaaggagcatatcatataaaataagtttctaaatgaccgatcttgatttttatagcctaagaaatgccatcactcctgccttccttatttggagaaagaagaccctctaaccctttttattttaatttacggaacaggtatgctctttggttgtgaataagatggtaggtagatagaatggggctctgtctctgcccctcaccttgttcttccctcatgccacttgggttttccaaagagtccctgcccttaagaagtcctagccagcatttcatttgtagtgctgacctgatggggggagacccccaaaatttaatgagctgtctctgcaagggtaatgtgacttttacagcctgttgaggggcaaggggagatttgcataatgttccaagggggattaggtggctgggggttgccatggcaacccccacagggatgaattgagaatttttcctcctggcaggagttggccaatggagtctgggaaggtgggggagggggcagggggttatctgaggggagggaggagggggaaggagagagggaagggtgggggcggtgtgcctgggatgaatgggcagtgttgggggaaggtataatctgaaaaagcactccctgttctgtctgtacaagcaagctctttgagagccatctccccccacaagtaggggtgggaggcaagcagagtttagtgtgtttgggaaccaagaaattaaagtgaacaaatatttaaagattattggatcttgttaacaggaagcccggtagatggaaactgaaagtctgaggaatgaaactctttagagtcctaaagccaggagggacttgagctgtcatctgggccctgtggtgtctgcctccaagtctctgttgggtctccatggaatgctcccaagggcagggcactcacacagcacctaattcatttttgagagctccgattattacactggactcagattggacttctttattcggaaactgaggcccaagtgcaggatggatctgggctaggaatgcaggactctagactgtatgttgctacctgtttctggggttgggttgcctggatgcatgctagcttggcctaaccatccccagttcccttacactgtagacccctggaagaaaagaggaggtgggattcctttcagggaagtgtgcagaagggtcgtcccaaccccagcaaccccagagtcccttgccgttgatcggtcctagctggggaagggtgagtgtgtttcctcctccctgccctggctcctcactgtcatcctcacccgcctgtgaagggtacaggggctggtgcccagagtgtcctcacaggccggctcaggccagcatccccttcccttccggaggagacagatcctcagggtcacgctgaggggggctgggcctttcttgtaccaagtcctcccagcataaagaattcagcaggcttcctcggagggcataaatatttaatggcgttgtagttatatataatttgatcaatatgtcagtgctaaaagggcctttaagaaggctcacctgtcattgagtgatctgtgatgtgaaccttcaccagcccctccagtagcgggaggggctacatttcccaaggctgctgcatagatcatttgttgaccctcctccccttcttacattgtagcactgcttcccctcagagcccatggcgtggatggagcagggcctgagaaccccaccccagcttttgttggctgtcccccggcccccccatggatttcttcctctgttgataaaacacccacttgttttatttcagtgttctctgagctcggcctaaggagaaactacctggcaaggactatcctcttttagtcacatcattgagaggctatccatttagtattgcctaggaaatgcaatgggatattttaagttaaaattgcccagacgtggtattctgaatctgggtgattggcgcctggctgctgggaggctgctgggaaggttggggccagggccacctctttctgcacagcctcccaccccagcctttccctgcagctctgggatttaaatcaagatgaagcagactctcttcaaactccaaggactcagtcagagaagtaggtaaaacctgattaaaatttaagaacctcagagctgactgagatgacacccccaaacacacacattttctagaggagtaacctgagacccagaggcctgctgggatgaaaatcgtcacttccccatggctttgcaatgtaattcacctttcaaatgggcaggtcccttcctcatctcatctttcacacacatccgcaaactggtctcagactcacagtaccatgctctttgcatgacactgccctgattttccgaagaagaaatcctcatttcacaaatgtaactagaagcctagtagcatgggatggccgcttgcctgtctcacagacgtggaattacttcccgctgaatgcaacaacttggagaaccctggcctggttgtcttagcctcaccaaccagtcttcccttttgaatcacagaaactgcacagtaggggcttgacacttagaagtatgatatcattgttcttgcctagaggctcttccacagtgaagcgcagttttgctgatggacagatttgaatggctcgtgctctgaagactggtccttgggacccagcccaggtcagccagctgcccagcaaccagccagcatccatccacatctcaaggtggcttggctcttctctgctggtcttttgtaaattcatgtgatgctctgttttatggaggaaatgataagctgcacgccaattcgggaatatttagggttctaaaactctaaattagggctcctggatcttatacgttatctagttaatcccttcattttgcagacaacgaaattaatgcctagagaagggaagtgatttgcccaaagccacacaactaaatggaggcagaattggaggtagaagccagctcatctctgcgtggcgttggagcataacacactctttgaaggggcagttttctcttctccttgcctttatttggctgaggttaaaaggaattgtgcattcagagtccacaggtacacacgacagggcagtttaaaactaactagcagacagactctctggtggaagtagctctcgacggtgtgttggacacagtcacctaaattaaaaataagggcaaggactggctgggtgctgcaagcccaggagcaggaggttgctggggggtacagatcaagagcaggctccgtttcccttaatttagtgtcttgggtcaagggccaaggatagtctgaagtagcagcaaacgtgaatactagactgtggttagagaaatagacttttagaatgctcaagtaccctcggtttacagcaagatgttcagaggtcctgctttaatgaggagatgatcatgcaaatgggagctactaaggcgcatggaacagattgctgtttgggaaattacacttgccccccactatcttgttttctgtcatttatttgcctaacaatcttgacagagatgcagggcagatgttactcccagcgcccagttggtagtgcagattccggatgtagcaggacctctgtccccatttctctgaactgcttctctgtctgtatctagtagattagttccttctgaggaacaatgtttttccaccaacaaagcgcctgctttgaaccatacttgaaaagaaactttcaaaggcggcaccagcctccctgaacaccttttccaaagtgctttccaaagggagccatcttcccacctcccaccacctctcagattcgcttctgaagacctggctcaaaagcagtggctttgtgggaccgagatggagggaaggatggaggtcggcctctggaaactacagccgccttatcgataacggattgcgccaagttgccaaaaggagttttccaacatacgatcgagttccagtttgtgatttgtgacctgtcccaattgttgaagtcacacttgattttttttttttttttccttttttggaactgatgtttagagcttgtttgagttggatccaatgctgttttaacagctgttctaatcagaagtgctgtcaattattaaccttaatggtggtttttctttcaaaaatatttctctaagctctcttgaaatgtcaaaatttggcttcttggtaggaagtcatttagtgaaatcacttaatggctgggcatcagtttccccatctgaaaagtggagatgttgacaagcgccttctccgcggggttattgtggatgcacacatggcgagttgggtgggtgatatcagcggtcattactgttgttaggagggcttctgttaagccagctttccatttccaggaacttcccctcccccaagcgccaccctccaaaaaataaacatttctttaaaatgttgagcgaacagctttcctgttcatgctttgactctgcagagtgcacgcagcccattctcagggttgggcagcctttgtagagatgggggaggcccaatccctgcttccactttgtggggagaccccaagagggtactagcagatgatggcacagtgacagctgggagggatgggatgtgcttgcttcatgtccctttcccaaggggggacaggagagccaacctccaaggctccttcctcagtgcaagatcagatgccagggcttgtcagacggagggtccgctaacaacaatcttgggtacaacagagagtgaaacgaagatttttccctgacaggtgtgggggccagtgggcaaggccccacctgacccccgtccctatcacagctcatcacctctgnnnnnnnnnnnnnnnnnnnncctttgtgctgcctcaaccctacacagtcctgtctggtgacgtgccaaagtccttcctgccttgcagagaggcctctcttcgtcgaacatgggcctcaggaaagacagcctgaatgccactaccccaggcttgtggaaggttctgcatctgtgtggcattgttgcgatagccctcagttgatgcttgtttgtggtgttgggaggcaggaactactttaggagggtggaggggtgagaatgagagaggacttgccctgagccacccagctgtggtcacctgatggcccggatggctacataaatcctgggagatccgttgtcctcataaccagagtgagctgggctccagaccagccctatgggaagatcctgtctgtgggaagcctttggccacgtgtttgctgaagggtgtggggaagggcaaggtcagctacgtttcttttttgtcaactcccgagaccctgacccttggcctgtttaccagtggaaggaggccatagccagaacccttttataatcaccctgcctccctgctctcccagagactgtgagagttaatagttgctgaggaggccagaatgactggggatgttctgaccttgcccctgccttcctggctgtggggaggagtagtggccagggacccatctaggtggcttgcgattggcctggcttggaggtgccaccccaccccgttggtgaagggcttgggccactggccaccaagtgtatgtcaacactccatccaccacggcccctcccacagatgctgcccatgctggggcaggcccagatccacagcaaggggtcactgcaatatgaagtctcaataaatgcagagatgccagtgatactattctttgggccaaacatttacggagcagctactgtgtgccagacactgctctattgttgtttaagataacaggccttggacctgtgagcttcctaaacagtaaggttggttttttttgtttatttttgtttgctttttgttttttacatatctttctattcttatttggtgcatgaactcaaaggtgagagaacttgttactctgccggtttggagtgagctgcagcctatgcttgtttctagaactcctgccctatccaacccggacttttttgcttcattccccattcctactatcagttgatttaggcgaggaaaaaataagcagagtgaggaaggaccctgtttgggagagctcttcccacttaactagattaacaatttatataatgattatttagtaatcctcctgggttccttagagtatgaatgacgggtgtctagtgggtggagaggccagggatgcttttaaaagccctgcagtgcacagaacgggctccacacagcagtgaattatctgacctcagatgtcaatagcatggtgtttgagaaaccctgatgtatggtgtcctggctagagtgccccacacatgtgtcaatgtggagtcccagtgggtctgagctgggcagtttggaagtgggggccattgttgacacagttggcctgggatatgagcgacagtcctttataacaggaattgtctctccccaaatgccaacagtggtgctggctgggaaacactgactctgttcctgaggagctagagtgttctaggcagaaagctgacagcagtgattcctgatcctctccctgccaggaacccccactgtagcggacaggctccgtaggttggcgagccctgccaccgtggctggcagcccaggacacaggcctgcaaaaacccataaggctctttagttgatggcctgcctttccacaaaccagaggcgtcctctttagtggccaagggtggagggggtggagggtgttagcccaaggaattctcccgaggtccagggtctatttatgcgccttcagattgtttttattttaagtgcacaaggatttctcatccagaatcatttgacatgcagatgatcacagatttttaaaggctgttgtcatggttttgtctctgaaagattgctatgtgctgatgaaagctttgaagccagctttgggacctcagtcctggcgggctcaggattcagaatgagataagaaaagcaattctgagagtcgtctgtcagtggttctaggcctttctatctggactcagttaacccgtatagcaccactcttgatctgagatctaaagtttacataggatgctggtggaaactgttgactttctaaatgcagtcttttctagggtgttgggagatgaggcagagaattgatctacctttctaagattgacttctgtgagggattagggatctaatgaattacatctctgagcagcttcttagacaaggcaatgctatatcctaaaaaatgaagtgttggctgggcatggtggctcctgtctgtagtcccagccctttgggaggccaaggtgggcagatcacttgagcccaggagtttgaaaccagcctggacaacgtggcgaaacccagtctctacaaaaatacaaaaattagctgggagtggcagtgcacctatagtcacagatatttgggaggctgaggcaggagaatcacctgagcccaggaagtcgaggctgcagtgagccaaaatcataccactgtacaccagcctgggtgacagtgagaccctgtcttaatgggaaagaaaaaaaaagaaagaaggcttaatggtaggattttagcctggtagcatatatgtgggggagggattgatcttggtgagggagaggctagtcccagggaaccctttgccacataggaccgcttatcagcttagtcccatttatctgagagctcatgtcctattggcactgggcaccagtgggcagagcaattcctctctcactaaactgtgtttcactcttacagtgggttttgctgggttgttgggggtgatttttatttcgttttgctttaattagggattccatccagaggatgcaaactatattctgaaccagacatgtagactacctctgatggaaattggagctccctaaaatgtaggcagcctggctgcaagggagttgaaagagatttcttcatgctgtggatttagctagagcctcctggtaggaggctgactgagggcagaaaggatggagccccgtggagaggggctgtggtctggggggagtttgcatttccacttgcctatgacatttcagtgacttgatttatttgcctgagcttcatgtggtctccttgcctttgcagacagagattgcgaagagactgaacacaattttagcacagatcatgcctttcctgtcacaagaggtaagaccttcttttattatttcttccttttctttccaaatcagcccagtggctggtggggtctcactggagcctgagccccagccccagccccagcctcagcccctgtccattcatactgactgagctgacaacctggagatttccagagccttctccggccagtctggaggcagggggccatatcagagggaccatttgctccttcttctcatagaattgtttctctgccatcacctgagtccagagattggagtgctggcatgcgacctaaccatcagtgggcagtgggtgcctctttcccatccaaactagcatccccagcccaaagtggacctcagttcctggtacagagtgcccttgctgggagcatgacccaggtggtcatgtcactttctacgcctaccttccaagggacctccatttgggacagcggctggactagtgggtgatttgagataaatgcctgcaaagaagccccctggtgccgaccagacagacgggccgactttagtgggctctgtttctgtcctctgatttcactccagccagggcaggccctgccctctactcccactcagtggctgggaccatgtcagctccctcagggactcctaatggtgacctgagtaaatgattgaattaatatataagaatcagatatggcaatgccctcggagcttgcagcccagtaggagagaaagctgtgtatgtggctggtactacctcaaggccaaagggaattaatgcaaccactttttaaaatagactttatttttttaagagcagttttaggttcacagagatttcccatatcctccccactatcaacatcctcaccagagtggtacatttgttgaaactgatgaatctacattgacacatcatcacccaaagtccgtagtttacattagggttcattttaccactttttctttctctatctgttcatctggaaacatactttgttttctctctatttagacaggtatggataaggtatatgtagacatactttttccccaaatcctttgacggtaaattgcagatatcctgacaattcaccactaactactataactgcatctcctaaaaacggataccatccttcatgattacagtattgttaccatgtttagagaattaataatcatcctgtaatatcatctgatatccagctcatacgcaaattgcatggaaaaatttgtgtgtgtgtggttgactaatagccatcttttggcatgctctttgttttagaacttaaaaggaagtttcaattacaaaactaatacatgctcattgaaaaaggtctaaaagagaaagtaaaatcgcctgtcaccctcccccctacttgtgccctgtgcctgttcagtgggactcctctgtctgctctgggcctctccgagaggccctgccagtgctgcacagcctgtgacctcctctgtccaggaaagtggctgcatctaacgcacaccctcttccctccagcaccagcagcaggtggcgcaggcagtggagcgcgccaagcaggtcaccatgacggagctgaacgccatcatcggggtacgtggactccccaatctgcctcttaccgtgtgtatagcccttttattcctctcatttatcataaccagagattgaccctgaccttagctggcctcaaagaatggcggccccagggctccggcttctacaagcaccccaagggcttggacccatgtagggctgtttcccccttggctcccagttgcctcctagtcctcaaactaaaggggagccagacacgcctcaaatccacctcttcagccatctgcctcatcttccactggcttttggtgtccttgccattgaggagggtgggggcctagggtcaccttcaaggccaggccagctggccagtacctggccacctcctcacacttaccccggggcctgtctgcctcctccctggcagaagtctgcccttctttggccacctgggatcagaacagtctctgctgtactgttgatgtgcatcgtgctgtggaatttgggtttacgtcttgctgtcccatgcgcgaagctgcctggctgagcattcatcatgtacgcttgtgaactccagctggggagctgagactggttttcctgactttctagaagtcccgtctcccctttacacaggaagacatacccaagagtgctctgtgaggcccacttccggactggccccttagtggaaaagggaagctgggtctacctggcttgtatctttaatgcatttcttaggttcaagtggcatctttctcctgcttgctgctttggtgtgaggctagtgacatttaagataagcacctgaggaagaagagtctttttagtgtgactttgggcaaggctcttacccttggggtgtacctgtccacctttcatctctgaaatgaagagggtggacaggatcactgcttcccagtccacggaggagcttctggacggtacagatacaggggcacttgccccagaggtcttttccataggtctggggatgggactggaaatctgtgttcctaacgatttctagatcattctgaagtgtagttaggcttgggaagcagtagactgattcaactctaacattctgggaacctggttggtcttctttcctctttctgttctcgtgggaagtcactatttcaaggtggaactgaaggccccacaattttcctctgcttggtaggatacatgatgactcttgacttttccgcctggggcagagacctggaggtctgtgttttagtcatggttctcccccgatgtgacctttggcaagtcccttctcttccttgggcctcagtttctgtatctgtaaagggagaacgtacaccggctcatctctttgggcactcctgactcctaccaggaatgctgggaggctggaatcacagaatgacacttatggacaccggcccttccatcacactgtcaggacccgtgatggttgcagagtcctttgatgaaggcagcacagtgggtttgtccttctgggctgagcccatagggacacttctcagtgctgcttgggcaggtgggggatgcaagcattggcctggtttgaatcctggcctactgtgtggaatgggcagagaggagtcttgaaactggaacgtgaagaagtgttcagtgctggaaggcagcaccccaagaggggaaatcatgatattttaatgtttaaagtatcatcagagatcatctagcccggggatcgtcaaccttgacactgttgaaatttggggccagatcattctttgccatcctgtgcattgtgggatgttcagcagcatccttggcctgtagccactagatgtcaataacaccctgacaccctgatattcataggaggcaaaatggcccttggttaagaacctctgatctagctcaatgcccttgttttacagagaggggaagtgattatgatgtttaggaggaaagccaggccagaggcccaggtggctgactcgcagcccagggctcttcccctggccctggtgcagccctggagggtggcctgtgtcatctgtctcagtgaccagctctcagcttggtggtggttctgctagtggtagcagggggctgcagggttgggacataccttgtgaattctgttttccgacatttctcctcttccagctcctcaccccatcccctttcaaccatcttcttgaggtttccaggccaactcctcctacccctgcggtggccacagcagggtcccctctcaccctctgcccccctctttggaattaaaatcctcttatgaaaataattttttttaagttttaagaaaggagtaaaactgggggagaagcactgcttggattagctgtatttcccttaagtagtattcaggaagctacaagttaggtcgaggcagctcgaggcagacattggaattcaattaaagccaacgagtggggcctgtgacccccattttcaaggtaattgcttctccagctccaagtgaatgcagccatcgccctgtcattaagcaggcagccgtctaatcgctgcgcctgacagagcctcacaaggcaggaattacggacagccgagtcgtgctcgcactggggagccgtgcttgactgcactcccgcgaaggagtccgctaatctagtcagggcgttctttatctcctcctcgaggagagcagagagcgagcctgcagctgagctgcctctgggaagcaaggtgaagaaggataacggggtgcagagccatgggctgagcaaaagggcaggcatcctggccccagcaggaaagggcaggagagagagggtcccaagaggctcttggcagctttcagtggctacccccactgcactgttggatttgctgctctggaaggagacacagcctggcatcctggtcttggacttagaggagggctttgggcaagtcactttgttcctccaggcctcagtttctccatctgccctaattgtttagtggctctcttgctcattggatttgaaagattctgaggttgtggctcggctcaactcaactcaaagagaaatcagatacctccggcatgggcagggaggtagctggtggcatatttatcatgaggattagagtattcctggggtcttccttcctggtgagaaagggcaggatccaaggtcagggtggcatgtgtgaaaaggggaaggaaagacagacagagggaaccaggctctcaagccaagcctacccactcccctgctggaccacagggaactcaagtgtctaccgagggaagagaagtggaagattgtctctcttctagctggggcctggcaagacttggttacagtagccctgtttctgttacatgcttcttggatccaattaacaggaggggctttagaaggacaagattcctgagcacgaggagggaaatttgacacttggtcagcaacctgcagaaggcagcatctatatttcccaagcagatttaagaccctttgagccgatatatcacccatttctggaaccctcttgttacattgctatatcatggcccaagatctttggactggaaagtggaggaggtctcatctgcttacctactgacaatttggtcttcattcccttggaaattaacagtaggggagatgtcacagagcattgacttgattttttttttaagtgggagggaggagaggaagagggacgttgtagcttgtcacaaaatacacaggatattttgaagccatacctaaggtattcactccaggatgtggatgagctgcattcagttgactgaattttgtgtgaggggaaaggatggccaagagaatgtgccttaggatccgtctttcagccaggcagccatggtggaaggaggtaacgctgagtttgagtctgggctctggttgctgatggcttcatggagctgttcagcctcccgagcctgttcaccatctctgaagtggggatcacaagggttgttgtgagcactaaaagctattaccaaccccagaagctcaatgcgtgtggagctatggtgcccactgagtgatgtgaaagagaaggagcagtcggaggcctggagctgttctcgctgtccttggagggcaggaagtgttcattttacgctgtcaggaccctgtctgactcctctggtgggagcccttggcgggtcttggctctggaaatgcttagacaacttcactacgttcaacccaaatcatgaacctgagaaacgcagcattaaatcacctagcgaaggcctaaggcgtgatgtgcataatccaattacacgtactctgcaagcaagatcttcccttcaacctctcctggaagtgactgcaccttctgagccaggccatgggtgcttatcacttgtgtggagtacatgttcgttgtcctatttgtgctctggcaggaaatgttcaaggagggaaaagtgaacgcccatgcatgggcttggttccaggctcctagcgcctctttggggttagggatgcaagagggaattattgacttcctttcatattgtggatggaggagttcccatattggaaggaatggtataagctggagacaggcggtctctgattgtggaattgattccatttctctgccatggggaaagctacccagttgaaaacagtatcagcctcccactcagacatcactgtgtttgagcacattgtgctctgaagccagcagacgtgttgcaggggataggaatacagcctgaggatagctgtgcccgcctgcctgcagaggtgctgagctgtgatagggacgggggtcaggtggggccttgcccactggcccccacacctgtcagggaaaaatcttcgtttcactctctgttgtacccaagattgttgttagcggaccctccgtctgacaagccctggcatctgctcttgcactgaggaaggagccttggaggttggctctcctgtccctgcttcccagagtctgctggaccggtccttgctgtgccttcaaaccaccccaaggagacctcgagggagtttctggctctttgcagcaggttgctcttgcactcagagatgaggaacgcttcagttttgcatgggagattccttttctcttttgcaaagaggacgctcctacctgacaacactaaggcagaaaaccagcctctcagccttggaagcttaacagctttgaaagccactgtctgccaaacagccgctgctgcctttgttccaagtttctgacgtcggttcactggttcatgttttgggcaagcaggacacctcatgaccccattgatgcttcctgtcccaactaactgttctagctgcgtctaattgggccttggaaggaaggcatggagctgggaggcggttggcacctgtggacaccatttctcagcctcttcatataccttttccaaaattttcactaatttacccacaagacatgtactgagcaaacatgccaggcactgttagaggtgctaggatggagaagacacagtctctgtttctggaactcacaggttgccaagcagtgcacaaaggcaaaagaaacagtgtacacctgggatctgtctgtttgctaagattgagcacctgctccatttttacctgtagtcacacatgtgatcctggcacaacacagagaggtcggctgacttgtccaaggactcatagctgataaaggatagagctggaagtctgccttattctgcctggctccattgtctgtgccgttagagctcttagaacagagaaatccattctgacctgaagtgggagggcattcagaggatatggcctttgaactgggcaaagctgagcctagaaggttgggtaggagaagagacctttcctggtaagataagagtcagggtgcgtggagctattcaactccatcttgccttgggtacaaatgttcagtgcacattttctctagaaacagacttgttcatgaaaggagttagctgtgtctgcaggcagcaaagctacttctttgaagccttctttcccctcctcttctttgtctcttcctcaagggatcttattggctctgcactataaaatgtggattaaataccttgctttcagtccttgctttctgggattttactaaatagttatcaccagcagaattaacgggcctaccaacaatttgtctaaacaaaggggccctactggagactcattttaaaaccaggtatccagataaagttgtattgtccgaccacaccagggaatactaggtagccattaaaaaggacaagaaaatttcttcagaacattcctaaattaaaatcaagctgtatagcagtatggttcacaggagtccatttctgtataaatacatttgaaatgtgtagattttcataaagaaaaacctaggcagatttaacagtagaatcttccgagggtaggattgaagggtaattttaaaaactttttaatgtctacttatttttagtattttcttaaaatgggcatgtattagttttgtaataagatattaaaaattacattttcttaaaaaagaaaaagtggaggagctcagagtaagcgcccatcctagaggagctggagtttcttagctgggaggggttggatctccgcattggactctgtgatgctggctccaggggcccccatagctttgtgtctgccatagtgtctcagtgcagatgtggggtcagaccaccctgggacagtgcccatgaactgcctagcaacagacgtcacagaagtgctctgacagctttgaacaacggccgcagtgccagcctttcacccagaactgacaaagggagccctctggggccaggagtgccatggcttctgtggctgccgttaactttgggatgaggccaggtgggcagtttgcagcttagctgggggagagtagggccctttatccataacctgaaatgcttactgcctcctcctgccagagccatgggccttcactgtgttctgttatctgttcgcggttgccagaaaaccatctcatattgacaggcgagctcccttagtaaggtgtgagatctggaagcttctcagatctattctctatggcactttccaccaacccctcttgctttggggatcttcttaggaatgagcattctttggatgaggggtggtggttgacagatttactagtggtgggatttggccaattactagctacctactccagccccctaagcatctattaaatggccacaacccctcccttgccaggtggttggaaggtgcccaggcattcattcaggcattcagtaaatgttagttttcttctcttgcactagttgagaagaaagatgtgtgcataggtggataccagcatacctaacttctctttcagtagtggagaagaagttgggtggggcgaagggagaggaaagagaagcccaagcccctgaggctagtgttgagtggggaagttgggcctctggagccagggcagcggagtccttgactggggaggagacagggagaattgcattgttgttgataatactgacttgctgcatggcaagtttttagaagggttcagcaatccattttaaactctttgtaaatgttagctactgccatgaggcttagtagctgtgcgccatgagctgctgcaaacattatcttacaataatcctctggggtctgctgctttccccctttacagataaggaaatttgaggctccaggacttgaagtaacctgccccaggccacacagctaggaagtgccagagctgggatttcaatcctgttctgtctagttccaaagcctccactcttccagttaccccgttttccaccactgatgtccggtgacgttagctctcattccactggcccccagctcatctggctctggggcctttgctgtgatgacctgccctgcccctgctctgtaaggcaggcttggagttcctaagaaataaggagccttccccagggtccagcctcagggtggaagatgctggcagctaatgctgaaggcatgtatgcatgagcaaacactgccaggactgtgagcttaaaaatggatccctctctactcagagggaaccccatgactctgcggttttttaaatgcatgcattatttatctcaggcttggaaacaaacattgagaaattatttgtgaaacgggggtgcagggagttggggggtgcttgaagacataaatctttacattacagtctattaacagacttccttcagcgagacattcatgtgaactgagctgggggcaaaggttttgggggtgcttccccctgccacccacccagtgaaggagcaagaggaatgggaagagccactccctccctccctcctgaggtggccacgcctcccctgccctccccaactcagctgtactcaccaccgacttcattgcagcagcagcagctccaggcgcagcacctctcccatgccacacacggccccccggtccagttgccaccccacccgtcaggtctccagcctccaggaatccccccagtgacagggagcagctccgggctgctggcactgggcgccctgggcagccaggcccatctgacggtgaaggatgagaagaaccaccatgaactcgatcacagaggtgcggctgggctggggcagagggtggggcggggcaggggtgggcatgggcgctcataggcctcacagtgagtggacccagcaagtgctgtcgtcctaagaccaggagttaccaaggatttggagtcatctgttgatacctggtgcagggaagccagtgccatccgcatcccatgcaccttttcctactccttggtgtggacctggtattctctgtcctgaagaccctgtctgttcatctggagctcgctcccatcttcctacaacacccttgcctgtccttcaggggccagccccagtccaacccttcaggatgccttcctggtcagactaggggctttttcaagttcctgtaagagtttaagagttgggatgccaaagctgagtccttgttactgtcgtcttacatcctacccctggaaaatgtcttgtgctcaccacgatcattagttccctaggacaggtgccaagttcttgggtgttttccttacatctatgtctcaccaatgcagaaacctgggaaaggtgcacagtcagtgctcaggtaaaggtttgttagctggctgcctgtaagtgggggtagtgcacaccccagcaagagatcacatagacttggagtcagaacttgttctctgaccctctctgcagcccctaccatgaggacccatgaagctgcaccgagcttggcctcaggagtggttcattggatcagaaaagagaaaagcctggctccctgggaggcccttttcaaaaattggtgccaaatgcactctgcccttagatacggtatttactggggcacgtagccaacaccttctgagcactagggacctggaatgtcaccatcctgccttggcccaggccacagggtggtagccggtccagggaactggaggctacatttttttgtcttacagtaggatggtccttttggcagaggaagaggggcctctccatagcagacaggagaactggggagctagtgcttagctgggcacagtttcagaggcttcagcttttaggggcatcctgacaaagaatcacagaatggtgttaatttcaaaaacaaaattaaaccactgttaaattcctttttttttttttttttttaacaataaagttcttaactcccaggtcctactggtattttatatggcatgatccttctcaagcttgtgatcttaagacccctagcctgctaaagagtaaacttggtgccctctggcatgacagggagaactgggtcaaaggcctaccctccccaccctggggactgggcctcccttgcccaccctggggactagaggggtgggggcagcattggaatttgggtggcaaatttccaaaccgagaaacgccacctaatggccctgccttggctgatccacggagacagcaatccaggccttctgctcattttaaaaccagtgcactagcaaatcacaaaagccagctggacttagactgacctttttcctttcttttttgtctttttgttttggggtgcctgaccttcctcctgtcctggccttctttccccaaagagagagaatccagtgcggtaagtgttggcactctggaacccggaggggtgtttgggtgctgggaggaggtgggactcggggctcccagaatcgcgggcctgagaccagtcagtcggtatccaaagctggcttctgggttcccgcttctgctctgtgggttgtaactagggattttgttgtttgtttactcttgctgagctgggagcttcagtgctgatgtcttagtccagagccagtggcagggtgaggggtagctactgtcataaaatgggagctgctgtcgtcacctgttgagagtgaccttcagttgtggaagcccttcctctctccaggctttaggtctgccatttgtcaaatgaagagcttgggctaaatgagctctaactccgtttcatatgagaggtgatactctgagaggtcagctgaccagccctggatcttccattgcgaggggctttgtggagtctctgggctaaacccagggctaaggacccaggtgtcccatgttcagggccaaggtttttaccacccccctgctaggatgcctcctgtatgatcttgcatcctcctcattcccttcaaacgcctgcagtttctccctgctctgggctttcactcgatttaagaaagtgctagcaggcgagcattaaggccaggccgcctgcgtgtctgccagctctgagatttgttgtaaatctttctgatcacactgaggctccgaggttctgtttcaagtgaataagccttctgaataagcgcagtggagtctggataaaaaaaatcctccagcgattagcaaagctattttattcctcatcgctgtccttgtatctggggccatctaatctgttaggatggctttggttattacctcgtgttaagtaggacttggaaggtcaggcagttaactaaccatctagacagcagcttccttgcgcagctctctccaatccagccctccttcccttcctggccctccccctacccaggctgactttttaaacctcccattagcagtgaggctggcgtccgtggcctcttgacccgcctacatgctcagaaatccaggaccacatttgggctgaggaatggctaggtacctaagagaggagtcattgaagctgaaaatccatgttcactgcctcggtactgatcctctaacagtggcattttttcggagaggcagtttgcctagataggcggaggcctggattggacattttaaggctgaggtctggtcccagctttatgaggccctgtgtagttctcttggcctctctgagcctcagtttccttatccataccatgggaataattcctgcttgaccaacctctcagctttgtttcggaagaccctttataacctgactgaggatccagattacctggctagcagggacccacttcagtggaattggagggggagtgggaagcccagcactctctaaagagcatgagtctttacctcatcctcatccctattggcttctggctttgtgccccatctgtgaaagttttctgctaaaagaccccccctgggaacccccaagagctgggctgtttaccatgctcgctgaggtccatgcatggcacacatgggcctcaggaaactccagtgggaatgaatcaagatgctgggcagaggcagcagtgggcagggccgaggctgtgcgcatggcatgtggcgtggtgacggtgtcagcggcggtgtagactgaaataatcaggctttggaaaccaggttgtcaacagatgaggcctacggcaggaaggacagggctgtgtcagagtgggaggggggatggggggacgggctggaagctgtcccagaggggttagtctggagtccaattagtggtagcttcattcatatttccttgcctagccgaagcaataaaaaatacttagttttttggccgcctgccagccagaggcgggctggatcgatgccgctaaatgcctgacatgactctccggtagcggcgagggttttcagcctgactgcatgagaagaaagagctcgctgttctcccgagccgagcaccgggtcgcgaggagaaacacgagcagccgcacgccccctcccctgcccgcccgcctgcaaggggcagccagtgcgaggggctggaagcatttctgcttagcacagggtggccaccaccgtcagaggaaatgaaatgaaatgacggtgatttttctgccggcgattgcagcagctaattgaattgtggctgtgcgcgcatcgccaccgctcctgcacggctgtggggaaggttgagctgcagttccattataacctccattttttcttcaaggcttgataactctgccattttaatttgcttcgggcagaaacttggccgggtagggctgcccagaacccggcttaggaaaggaaattaagttctgaggctggttgccgcactattcccaccgaatactgcccagccccgttccctccaagtggcccttgcccctgagccacgcttggcctctgggaaagtggagaagagaagggaagcctcattccacttgccttctgatgctcttctcttctgaacagatgtccctctgggtctccatatgacctcctgtgttgcatggggactgggacctgggatggcctgtccttttcttccagctccatcatagctggaccatgagctcctggagggcagggattgtatctcattcattctgccactcctggcctgcagcaccagggctgacccagggcagctgctcggaaattggtgggtgggtgaaggtaaagtttggactcttagaaaggagtaaacctcaccaatatcatagaggggcattggtcctgatattagtctctgggcacagaggtttgctggcaggtgcccttgccagttgcacttccctccctgctccccagctcggtggtaacagccacatggtgatttctgaccactatcaacccctaggactactccgtcatcttccctcttcccaggcctcccatcccaaaggcttctcatcctcatttgctttatagttgagggagaactcacgaaattttggggttccctttgtgccaccttctgctaggggagcttgggcacattcaccaacctcttggggtctccacttggtgatggctacagaggcagtgactgtccctgcccttgctcctttccctgtctgtcagagggaaaggcttcatgacgtggcatttttgttttttttacaaccctggtgtttctccagagttgctgacagcctcaccgtggaggcgggggtgttcacacagaacgcttggctgctcatctccactgggaagttggtggctgcctgacgccctccttccctatcaatctccccattcctgtcgggctcagcaaatgaagtattgctcatggcccctgcctgtcagctcagatccatcttacaagactcagtgcaaattccacttatccctcctttgagcaaatgagtgtggcaagcgcgagatgggtggtgaatgagacccaggtgaccctcgccctcacagagcgtagtcccacaggccagaaggcagacggcttactgcagggttaattatttaatagcagtgcagagctgcaaaagagaattggggatgcgcccagggcatctccccggggactcagtctcaggggagtggggaaggcttccctggcaaggctctgatggagccacgatctgcagggcagagaggagttcagcttctcttccctcccctgacctccgtgtcacctgcacttagctgtgtgcggatgtgtgaattgttacacgcagcagaaagttttaaccccgaaccctctttttccttccagaataactctgtgtcaccctcggaaagcctccgggccagtgagaagcaccggggctctgcggactacagcatggaagccaagaagcggaaggcggaggagaaggacagcttgagccgatacgtacgtccaaggcgccatggcaccactggggtttctgttgggtagggcagggggtgtctgcagggcccaagctgtggccagggtcttcttgtggttggcagtgagtcagagaagcacaggttggcgataggggaccctattgaggagagcagggtgggaacagggctagggtgaagttcacacacgctatgagcatgcgagccactgtggggcggaggtggatggggaggtcgtcctagcctccatggggtctcttcccacagacaggccaacaaccccatgctgctgtcatggtgctgccggaatcccacttggctctaaggggctgctcccagtgacccccaaaatgtggaccctatagtcctctcagttggcctgaggcatgcactcacttggccacccagtcatggcttttactagccttttaatgggatgcccccggcacgtgagaccctagtggaagcatggctgttgtgtttcccctgtgtcaggctgtgcagggctgagagctgggacagagggaaggggaggatatggtgcagggcctcagcggtcttgcacccagccctcttcagccacatggctgctgtgtggctttggacacattgagcacccaaaggacactcagctgtgtttctgtgagaggaggcaagttaccatcccacacagacgggtgggaatgaccaggtgagagcagcacactgactgtgaaggatggtggatgtaaaaccagctgggaagaaggttctggcttcagagagaagcagaagggcaggctgtgggggcaggggcttagaactgctatgatggagcgggtgtcagtgcggctgcccagtgggtacaggagtggagtaacccggggcctgggctaggggacagcctcacggggagaccgtgttgagctggagtggagcctgttgaagggcagggctggagtagaaagcatggactttggggtttggcctggcttcaggtcctggccagtagaaggacagggtggtttgggctcagtcaggggtggggaaagtgtggcctcttactgaccagttggcttctctcttggttgcaggacagtgatggggacaagagtgatgatctggtggtggatgtttccaatgaggtatgggcaggcccggtcgcaagggggctcttggtttggcatggtttggaattattcctccccagggtgggatctattctgtctgttctagtattactggcagcctgagcagggagacaaggcctccagtcttggggtctcagggggtcaagaggagcagggcagggctttgctgcatggtgtctgggcatttatgggcctggagggcctcctgcaatgggtctccagagagacacccccaaagatcccaggtaggggccatcttctattccccgtgatcctccgtccccccagggtctcagcctcaggggcctgaggaggagctggagagcatctacatttggccaaacccagccatgctgattgaagtcctgaacttgtgtttgacattgggaagaccatccttccaccctccctaggcctcagtcagaccagatggttaagagctagtttttcctcactgtggggcccccagtctttcagccaagctcgtcttcccatcgcccatgccctctctcttcccactcccagagcagggaagcctcgaggctggctgttgctttcagtgcatctctgcatcacttgtgttttcaggaccccgcaacgccccgggtcagcccggcacactcccctcctgaaaatgggctggacaaggcccgtagcctgaaaaaagatgcccccaccagccctgcctcggtggcctcttccagtagcacaccttcctccaagaccaaagaccttggtcatgtatgtggggtctgggtggaagggagtgggaagggagcggcagggactggagctggggtggtgccgattggcaggcagaggggtggagtgggagaagctgggtgggtgattggccccggtttaccttctgtgcctgctgggcctgtgctaatgagttaacgtttctgagcctcggttgctacgtctgtaaaatgggagtgatcaccccagtccctgccaaacaaggttgggcaaggattgagaggctgttcggcagaagcttcataagggtctggctctgggcttcacgttgggaccggcaccagttgtgcccggctcctaggagaatggaagcctcatggcctcccttgttctgcatctcccctcttcagaacgacaaatcctccacccctgggctcaagtccaacacaccaaccccaaggaacgacgccccaactccaggcaccagcacgaccccagggctcaggtcgatgccgggtaaacctccgggcatggacccgataggtataatgggtaggcaccatgggctgggttaatctgattggggggagggggtctgctcttggccagggcaggggtgacacacacgcatgggatagagcacaggcagtgtctcccagggcctgcccctggggacttcacggtcagatttgaggaggtgacaccagggtttctgggacccctgctgggccagacatgaaagcagcatcagacgggtcagggctcccaaaatctgttcccacccctgtcattagtccagtgaggctctaagcaagcccatttgggcctccatatcctgctctgtaaaaagaggtgggtgcatctgccaagctctaagcttctttggctctgaaggcagggatcccacttgggtgggttcagtctgagaggactgcctggagcaggcagcttaagaatgcagggagggttattgctgggtgaggcggccatggccatgtcccaatccacctaaggcccacctccctgacgcccacccctcgcagcctcggctctgcgcacgcccatctccatcaccagctcctatgcggcgcccttcgccatgatgagccaccatgagatgaacggctccctcaccagtcctggcgcctacgccggcctccacaacatcccaccccagatgagcgccgccgccgctgctgcagccgctgcctatggccgatcgccaatggtgagctttggagctgtacgtagaccttttggctcctttcttggggactgggcgtggtgtggggagccagtggttggacgggtgctccccacatgctaaaggggcccctcagggtctcaaggccaggcagctgcccctgtgggaaggtgtatcggaaacaattgagacttggctggaagggtacactctttggggccagcagacctgagttccatcccccactggcctgtgagccgccctgtgacctcatgcaaggcagcctcccttttagtctgcaaaacggggctgacacctggctttcccagctctggggggtaggaatcccagggcgagtcaggtgatgtccatggagcaggggtctcgtagatgggactggttgtacaagactttctattgtggtgaataaataataagagttaggggtcgagcgcagtggctcacgcctgtaatcccagcactttgggaggccaaggcgggtggatcacctggggtcaggaaatcgagaccagcctggccagccaacgtggtgaaacctcatctctactaaaaatacaaaaattagccgggcgtggtggcaggcgctattcgggaggtgaaggcaggagactcacttgaacctgggaggcagaggttgcagtgagccaagattgcaccaccgcgctccagcttgggcggcagagcgagactccatctcaaaaaaataaaaataaaaagaagagttagggttggcggggagaggggccctttttcaggagacagttttcctttttacctcctggacctggggtggcctcctctccactggcaggcccactaggaccacaggagaggaaagaagtagggcagggccagctctgccttgcagaacagggaggatgctggttcacagtggggtctgcactgtcaccccttccctgccacgggctgtcctgggcctgtgtctcctctgaatcaatgggctctgctctgctcagcttgtctcttgggttacaaagtggcagagccgtgcaggtaggaccccgggtgggtggtggaggaggcaggggtgggggtgtgtggcagcacggctgatggagggctgtcttgccttgctttacaggttggttttgaccctcaccccccgatgcgggccacaggcctcccctcaagcctggcctccattcctggaggaaaaccgtaagctttggctatacttactgcatgctttgtagggtgggcaggagagagcactctacccccaattccaacaacgcccctcatcccctgaccaagggtttgccctggtgcacctccctttggaaaggtatctgtccctctagaggcaccgagggctggttgcaaccccaggaaactgtagccaagccacacttctgagcacccacagaagctccctccgacagaggagccatggagttagctaagtacatggccactgggctgggagagaaggaacactcctcaccgagtcacctggagctgtggtgggccttgccgactcctttgggttcgacctgctgggaaggccccagtgccgctggtcgcaggcccttccctgtcagcagtgcttccctcccctggagggcacactctccccggcccttcacttccttgggttgctaggaaactaaaagattgagcctacagataatgccgagacactgcctgacacagtcctctaattgtccacgagaatctagatgctgattgagagggcacccaccagagcctgaaacagcaggcaggccaggctggctcaccacaggctctgacatggactttcccatttgctattgcaggggcaagcagatcccttccctaataccaccggctcctaaagcaagaggtggcatttcagccaggccctttccagggttggcatgttgggggaatgtatggatcgtgggaaagggcattccaggacacctgtgggtttctggtctgatttgaagcaaggatatataactgggtgtaaaaatcaaagctggtctgttaatcactgtctacctcgatggagccatcccagtacatggggttactgggttcgaatggtttcagagcagagggggctagaggcagggcagccagtcgggggcagtgcagatgacctgggccaggcctatgggaactctgaggggccggggtggatggcagcagtgacggtttctcaccttttcagagcgtactcattccatgtgagtgctgatgggcagatgcagcccgtgcccttcccccacgacgccctggcaggccccggcatcccgaggcacgcccggcagatcaacacactcagccacggggaggtggtgtgtgccgtgaccatcagcaaccccacgaggcacgtctacacaggtggcaagggctgcgtgaagatctgggacatcagccagccaggcagcaagagccccatctcccagctggactgcctggtgagaatcccagggctgctgcgcctcctccagctggtgtaggaggatggggcagcctgggccacaggggagagccccagggcccggctcagcatcgtattggctgagcaactttaggcaagctgactaacctctctgagcctcagttgtgccttctgtgtgtggggctgattctgacctcctggtattcatgaaagatcaaagggttgtgaatttgaggaatggggacagcctggcagctgctgggtatagggggaggctgtaagcaggactggtgagggtgctcggtgttgctggacaggactctcctggtgcccaggaggggaagtaggcagcactcagccctgccccttctccctccagaacagggacaattacatccgctcctgcaagctgctccctgatgggcgcacgctcatcgtgggcggcgaggccagcacgctcaccatctgggacctggcctcgcccacgccccgcatcaaggccgagctgacgtcctcggctcccgcctgttatgccctggccattagccctgacgccaaagtctgcttctcctgctgcagcgatgggaacattgctgtctgggacctgcacaaccagaccctggtcaggtgagccggcaggagggagcattagtgcctcgtcctggggaagtttttacccatcctgcctggtcttgtttgctgtgaccttggccctgtctgaggcactgtggggtggccagaaccgttgggatgagggatgcacaggtgaaaagacagctccgcctgccttatgcgagggacagaggagggagggccattgggcccaggagttggagagggctctgggaagaaagtggagctggagcatgtctggggaagtggaggtcagattagtggagcaagcagagagtctgggagcagagccccagagaccagattagggagacccgactgggaagccacatcacgtggtagctaaacaagcctcaggacaaaactgctggctttgaatcctgcctccactatgacctagtgcaagtcgctgaacccctgcggctcagtttcttcctgtgtaaaacagtgacagtggagcatcttcctctgactgtgccgcagcgcaaaggcagacgggtgcctggcccagctgactcttgtatacatgggctgtgtgtgttattcagcgtgttcatggatggcctcagccccatagttcatgcaggatgaagagatagattaagagggcaaattgagggcgtgtggagtgcgagttaaggagctgtgtcctaaaggcagtggggccctgcattctctttatcagtcatctcacacgtagcttccccagggccttcctgccttcctcaccttcctgagcctccagctccacctcctccagaggcccaccctggagggactcagtctcagaaggctagtgcaaggtccctttttcacctcccccccccatttcccaggggacttgtccctgggcaaacccttccgtggaactggaaagaggcctggaactggaaagaggccggggctagctttgctgcaagctcgctaagggaccatgcgcatagtgcactcttctgggcctcagttttctcttctgctcagactgcccctgggatggccgccacctggcagtctgtggttcccgggactcaccctcctccctgcttggctttcgtaggcagttccagggccacacagatggggccagctgcatagacatctcccatgatggcaccaaactgtggacagggggcctggacaacacggtgcgctcctgggacctgcgggagggccgacagctacagcagcatgacttcacttcccaggtgtgcggcccaagactcctcccttcccaaagagcagtgtgttccctccctccggggccccagtggctgggtcagggacaaagggaccctcacagagtggccacggccaagagacttgggaccaacctgagccatctgggaaggcttcctggaggaagcagcagtgaaacagatggagatgaccttggggttggacacatttggcccaactgtggaaattcgattcattctctgctgctattgagcactttgtcctcggcgtcctcattcacaagatggaaataatagtagcaccctcctaggtctgatgtgggcacctgaaatgatccctctaaaaggcgtagccataaacccgactcacagaaagcattcagtaaatgccagggattattatttcttatttgcattcctcactttaatattttaatcttaaatttttaatattttagttttttttttttaactcacttttttcttaaggaaagatgaaagtctcagagacagagtaactgaatgcaaaatgtctgtgctttctcacctataaaatggggatggaaaatgacctcccatactcctgggttattgggtgggtggggagggaccctgagcctcagaggacctgagcagcacctttgggagccgccctcctcttgagggcagagaatgctgagctcagtccatctgccctcccaccacctgcagatcttctcgctgggctactgccccactggggagtggctggctgtgggcatggagagcagcaacgtggaggtgctgcaccacaccaagcctgacaagtaccagctgcacctgcacgagagctgcgtgctctccctcaagttcgcctactgcggtgagccttggatgggcccaggcctgatggagtggggtggggaacccagggcagcctggcccaacaggacagaagaggggcccaaagcttatagaataagctaggccctggaaccaggcctcctgacccctgagctggtgccccttcaacacccttaagtgatcttgttccacatccttgtttctcggatgcagatgtcaccatgagttattgaactctcaggacactaggccagagccagttcttgcaggcttggggcaaaggaacaggacagtagcagtgcaggcagttcctctccatggttacaaccacttgctttggcatctgagagccttggatgggaatgtctgctcctccactgacaagctgtgcagtcttgaacatctcaccctctctgaactctagtggatttttctctctggtcgggaatagcatggtgctcatggctttcagggagcataagggctttaacacttgtagagccctggccgagttcctgcttggaggaaggtcgcccactgactgctgtcttcagccaggtctccagactcccagggcttggatattttcagtatttcctgttgccttccagtagtagaatttagaaaggccagtcaaccttagtggctttaacaagaatcttttgaggcagcgttatcactgcaatgaacttcaaatcctaccttttcccatcctagccccgcccagccctccccctggatttcagagaaaggccttctccaggtgtccgcatgtcccatttgcaaaatgcctctcgaaattggagagttatactagttagcagttctcactgcttttctatggcagctggccatgtctagggcaggtcttgctttagagggcagtgagctacaacctgatcatgcctttgcctcccacctgcaggcaagtggttcgtgagcactgggaaagataaccttctcaacgcctggaggacgccttatggagccagcatattccaggtactgcccaccgtctgagtcctcctctgggttctacccagagttgaaacttggtgatggtgatgggagtgaggatagcagcaggaagaacaggaggagcctggagccaggatcagacctgccctggtcccctccccacccctacctgataggggagcaagattgggttctcccaaggacctggggacttcagcaggacacacaatctgctactgatggcttctgacccccgagggcaagggcttctaagccggggcgcttgtcggatttggagagtgaggaatagcataagtgtttttgctctgggctggatgctgagcacctgcgggaggtgcgctgggcacctgggcacccggcagccttgcccagagcagtgttgcctcctcaagtgagtgagtgtttccacctgcattcagcaccagcagggacatggacaggaaagagaggaggaaaggaagaggctttttataatctaccaggatctggggcctgccatactgcactgattggcacacacacgtgtgcacacacacacgtgcactctttcccatacacgatcaaactcacactcatttactcacgcacacttggtctcccccacacactttcttcctctctctctcttgcgcttccacacacacacttgcattctctctcactccctcagccaacatgccgctttctggacccaggctgaaatgtctggtgtgcagcgtgtcaaacctcattgttagggtctctagttacagcacatgcttcaaacatcaggtggcaatccttttcctaactcatcaggctgtgggcctgagctgctgacgccagctcctagcttggaaatgcttcttcctatttgtaaactcggaggagaagctcttgctaaagcgtcctgttctgatcattatgacttactgtaaagatcacgtgggagactgttactgagcttttccttatggaaaagcaggtgggaggggagctctacctgaaaatgcttcatgggtgctttaaagcctcccccacctcctcttcaccgcactgtgctccaggtcggagcatcagagaggggcagaggagggcaattgttgccgagagaaccgagatggtgttgagcactggaaaatgaattcctgtcttttttctccctgcaccccacgccttcctgctgcttctcctcgtcttcctcctccagtctaaagaatcctcgtctgtcttgagttgtgacatttcagcggatgacaaatacattgtaacaggctctggtgacaagaaggccacagtttatgaggtcatctactaaacaagaactccagcagggctgtcaaactctgggagaaaccgactcggctctgacagggagacccccaggcgaggggccccgaggatggcggaggatgggccgcaggcagccgagcgttcagggctgcgctccggccggctgagagggcacgtgccccgtcacagtctggactcctgggcctggattgatgtgtctcacagactcggaagggttctgctcctcctcctccccctgaacaatgctggcagttgctacaaatagatttattggaggcttatggctccggttcccccacagacccgctcatgagtctctgtttgttcttcccttttcttttgccctgtccctcaccttgggtcgggggtgctggagtggaccacaatgttgtgctgggggatgggggggtctctctttgccgattgtgcagtgcacaagatttgtgaaaaatgtaaataacagactcctattgcggactgatcagtgggagaggaggccccttcccaccggaaactctgagtgtgtatttcgcctgctgtatttgtaatccactcgtggtggtggctttttttttttttttttttaaataaacagatgctctcacctgggaagaggagacagggaggggaaccaattgaagaaagaggagaaaagtcttagagtgtggaaaaggcaaccaggttggccgtaaggtgcctgctggaatgcgtgtgcctccacacgggtctgggcatccggactgataaccagccggccagactgagggatggaaggcactgagatgggggcccgtccaggcggacacccgcagaaatggagctttctgtggtctcttgcactctggctgcctcttgccctctctgtgtctctctttcttggtctctccctctctcctcctcagcctggtctttctctttggtgcacacttagttattgttgtgagcaatggaagttcaaaggaactccctctccagctcttctgaatcttgggacacagcctaaaaaggacaaaaagttagaagacagcatagcaactcagctcagggagctaccagagaaaaatagcaactgatgtgggtgctttttttttttttttaatttgaataaaaagaattagaagtgatgtccttttataaaatgccttctcccccttcccgcctacagtctcttcctctccccttagaggggggaaagtgtataaacctacagggttgtgagtctgaaaagaggatccccctcacccccaccctgggcagagcagtgggggttggggggtgggagagggggacacagatcctggcacactgtggatatttcttgcagattgcagtctcttgtggcccaaacaggttaggtagactatcgcctctggcaggtgccaccttttggtaccaacatgttctgaggtgttaggatttgggttgggttttttttgtttgttttttttttccttttggtctttttttttttctccttttaaagaaaagctaaaggccgctgtgagtcctggtggcaggctctccatggatgtagcatatcgaagataatttttatactgcatttttatggattattttgtaatgtgtgattccgtctgctgaggaggtgggaggggctccagggaaagccacccaccttcagtgaggttgctccccagctgagcgcaccgggcatgggatgtggaggctggcgacacaccctgtgcctctccaaggctgggcgcgtggggcgtccagagtctctctgggtctcagatgtccatctgccacctcttgttaaggctctagccagaagggagggtgagggtagaagaaagttattcccgaagaaaaaaagaatgaaaagtcattgtactgaactgtttttatatttttaaaagttactatttaaaggttggtttgattgttgcgtcttaattgcctctcctcccagtttgccagtcccgccccccgccccccgggaaaacagccaggccactgttgctgtcacattctggagcctgggccagggccatttcccatcgatgtgagctcttctcatctcacagcattccctgcgctgcttccacccccttctccccttccagatacccagcatcgcagcagggatttcacaatcccatactgtgtcgcctcccatccaagcgccagggagggtggggggtaggagctaagacttcctctggacagatgggcagggcagagttcactgaggtgaaggaagaccacaggttaacaccaaagtattgtacagctgtcaatgcaaaacttttttggaaaaaaattaaacgtaatgaacttgaagcgaaactgcaaagtgtctgtgaacatctggaccttggaaacctgcacaattttattttaagcttaacacgtttaggtgggacgaggagatcttcaatctctaggtcacaaaggtgtgtttttggatgatacagaaggaagcatttgcagaagaggcagacccagaaatgcaggtcattgtccccagggagggagtcgggggctgggcgggaagaggagaatgctggtgcccattcccggggcggtccccaggctcttggatttcatgcacccattagcaaaagctctcagggcactggagattaacatggtttccaactccttattttgtcaaagtcattctcagcacaaacaattgcctgctgtcatttcatacaagaaagggaatctcacatttaaaaaaaaaaagaggaacgacagtctcagcataaagcacagtctttatgactagaagggacaactggcctctctccacacagaggggtcatttagctggagagggaggtcctctcaggcttatggaggagacaatgccagcaggtagaagggaccagacaggctgcagtgggctacagctctgcctcaaatggttgcaggggtgtgagtcaaacagctctccttggaccatacctttctcgtgtgtccatctctgggcattgcaacagagggctagggggctgggagcaggctctggccagaataagattgtgtgtttgtccagagcatgaggttacccatgggagccaagatcagggtggaattggggcttgcaggccccagtttggcagaagaggaaaatgtccatcagggaatactcacccccccaggcttgtcctactggaaagcaaggccaatgttactctttgaggagagactgaaactctgcaagtctgttcactgagatttcctgggcacactcaaggatggagagatgaccaagagtcagtccctgccacagaagctcacagttcaaggtcggggagatgatacagccccttacttcatttgacctgtgttcccactgctgctgtccttaatgccggcacactgggcctcccctgcactgagcctctctgcacgtgcttcctcctgctgcgtctccccatccaccactccactgctttccacccaaccctggctggcggcacgaaccacatctgggagcgtgttagaaatctagaatgagcccctcagtcctacccaagcagaatctgcattttaacatgctgccgcgattcctgtgcacatcagtatttgtgaagcattccagtctgaaaggaggggcccactccatggtaaacctattcccatccttaatccccccatgttgccccctttttacttaacagggtgacaggaggctttgatgccatttttctggcctttatcaccctccaagtgttcctttcctcttatgcagaaatccaggcttgtagcaaccatagcgtttacaacatgttcctgcacctatttgcttgtctcttcccacctagactagtttccctggagggcagtgcgcaggacctcatcagcccagggcagtgctagtgaatgatgagctttcaccagtttgagattatcctaattcacagtgtctggcgtgatacccagggcatccgatactcagtaacccgagcccagagaagtgaaatgatgtctggagtgttttcaattctattgtgctgtttttgctcaaagcaagatctgttttttaaaaaatggagggccacagttgtcagaggccaggtttaatgttttagttgccatcaaattataaacaaatgggctgggcatggtggctcattcctgtaatcccagcactttgggaggccaaggtgggcagatcacctgaggtcaggagtttgagaccagcctggccaacatggtgaaaccccatctcttctaaaaataagagaattagctgggcttggtggtgggcgcctgtaatcccagctacttgggaggttgaggcaggagaattgcttgaacccgggagatggatgttgcagtgagcccagatcatgccattgtactccagtctaggcgacagagcgagaccgtctcaaaaaaaaaaaaacaaaaaaaaaagaacaaatatttgggtcatctttggcaatagctgacaaagccaccctttctagcttccctctgagtcgcagcccccaggtggccccaaccccagcgtgggcagtaattgtctaacttgtagggtctctgagaaggtatggagacagagatctggacgctggagccagaaggatccttagcaagactgctaaatgttaggtactggccatcaaatggcccataatgatgcaagtgtaattttttttcccaataacttattcagtgtttacaaatgagcatcatttttaatataaagcaaacaaatctgaacttttaaaaaaattgtatgattaatggagcatttttaaacattataccaaagttggaccttttatatttgaagagacatctatactaagcccaattttatagatggggcaattaaggcccagggagggcaagtgacttaacatgactcacagagtccaagccaacattatgatgaaacatccccctcccctaaacccttagcacactcaggatggaaagctaggagggaactgcccagcctacaggacttgatgttgcttggaggattaatatccagggaatgagtcttcctgctcctctaccaacagtactggtaaggaaattactcatggaaaggagatggcccagaacagtcatggaaaccagcctcctgcctcaagaacttcctagaactcacccacccacccatcttgcccatccttctatccatctatccacccatccattacccacccacacatttatccgtataccccttcattcactcttccatccatctatctagccatcctattcacccgtccatcctaccaacatttatatagtaagaatctaatatgtgcctggcatggttctcgatgctaagatgcaaagatagtaagatgcagtgcctgcccttagagctctcagccaactgggagaaaacagaaactgacaattcccactccatgagatatgtgaaagtgcaaaccagatgtcaccacacatagctgaggcattgacttgagtatggaagggcagagcaagagggtcctggaaggaccaagagctaaacagaagtgaagaataccatgggcatgccaatgaaaggtatgaagaaaagtgttccaggtggaaggaacagcatgtgctaaggcctggggtaaaagagagcatggtcccaacaatgcatccctacctaacccatctagttcttgctcctccctccagctccatccagccttcttacatcccagttcttgctgcaacttcccgacccctcacccccaccagtagcctccaggccagaagctgggctaggattctggctgagcaggctggtgaaaccggaggagggagctggacagagaccacaattccagcctgaaccaggagaggcagaggaatggggagaagatggaaggaggctgcaattcagtgtctgagaatgcccatgataatgccccagggctctgagtccccaacacaattggcatcagaagacccggggatctgtgattggatcatggtgcatgatcagttccttacctgggtaatatacctattctaagctcccaccacattcacacagttacttttataaactgcacatctggccccatcattgcccatcttggagcccctcactggccctcttcacagcacaactcacccttaactcatctaggtgtgggccctgtatctctaaagtcatccctccccacttatcttgcttcccttcacacaccagcagcacagtacttccaatgccctgaaaagcaatgctctcccattttaggttttgcatgtgcttctctttcagcttgaatgtggtgcatccttctttgaatttctgctcattcttcaggagtaggcctcaatgtcacttcttccaggaagccttccctgactgcccacttccctactccttggtactctgagagtgttctctcccaactttaggtagcacataccaagcacaatgttagtatgattacagatggttctacttaggacttttgattttatgatgagtttattgggtattaaatgcatttttttttttgagacggagtcttgctctgtcacccaggctagagtgcagtggcgtgatctcagctcactgcaaactccgcctcccgggttcaagagactctcctgcctcagcctccggagtagctgggattacgcgtgcccgccaccatgccgggctaatttttgtgttttttagtagagatggggttacaccatcttggccaggcttgtctcaaactcctgaccttatgatccacctgcctcagcctcccaaagtcctgggattgcaggcattaaatgcatttttgacttagaatttttcaacttacgatgggtttattgggacataaccccattgtaagtcaaggaccatctgtatggtttaatgatatcctgtctcctgatgcccacctgaccctcccaccacacagtgggctctcagagaacagcgactttgtcttatatctccagtgcttagtgcattgtaggtactcaggaaaatgttacttgaatgaatcagtgagtgtgtgattaagataatacactaatatttctagagtgctagtgcatgtaaatcatgtcagtcagtgcttcataaatattgtttaatactcataactgacctatgaggtcattgctattattatactcattttatggatgaaacaactgaagttcaagttccccaaggtcacacagcttgtaaggtttgtatgacactgctgctgaatggttggatggatggatggatgaatggatggatggatggatggatgagtagatggatgcatgaaaggatggatggatggatggatggttggtggatggatggatggatggatggatggatggatggatgaatggatggatggataaatgggtggatggatggatggatggatgggtagatggatggatagatgaatgggggaatggatggatagacgaatggatggttgaatggatcgatgaatggataggtggatggatgagtggatgagaggattggcgggtgagtggaggataggtggtggactgcctgcctcatgaggactggagtagaagcttggaaagaactgatcccacgtgtagaggagatcagtgatcttaggtggaagagtatgggaagaagagccaagagacagaagctcccctggctaaatcagacctttcttacatccatttgagtacctctgtgaatgcccagaaaaccccacagtgtgctcaacctgacccggacccagttcccctctcagacaggtcagaagtgggccctagggagctcctgactgctgaggcaagagagggagttaggatggggctatggccttgtccctacagggtatcacagatggaagctgccctgtgcaaatgtttggtggcaacaggttagaagatgaaaagatcgggcctagaatttccaattcaggaaaatgaaacagcaagctaataaggattcactttgaccatgtgaacacagacatattgtataaaattaaaataaaacaattttgctaatctacatgaaagaaaggggaatcctttaatgtggtaaataaaagactttaaaggtagagtggagatccctagctcagaacaatacccaaaaactacataaagcaaaaatggacagaattacaaggaggaatgggaagttttatcataccactaagaggaactagtagatcaagctgtgagaaatttataaggttataaaagatatgaacaacataattaacaagcttgagacatagaaccctacaagcaactattggagcccgcaaattattttctagaacacctggaagtcttagaaagttttaccagtaaaaagaagcagatagagcattttacaaaattcaacacccattcatgactcccttaaagttacaaaccaggaatcaaagaaaactttaatctgacaatggatagctatatcagacctgcagccaaataatagataacagtaaagtttcagaagcatcatattaaagtcataaaaaacaatcaatgagccaggacagcagtgtgtacctgttgtcctagctacttgagagtctgaggcaggaggatcacctgagcccaggagttggagactagcctgggcaacatagcaagatcccatctctaaaaaactttttttaaacacaagaatattcattattactgtctctgttcaacgttgtgctggagggtctagccaatgcaataggacaacataaaaaataaaaggataaataaaagtatcatgattgaagtgaaagaaacaaagttgtaattatttgcagataatatgactagatatacacagaatataaaactgtttaataagggagtttagtcaagttgctggatccaagatcaaatttcattaatcaatagcattcctattcacaagcagcaaccaattagaaaatgtaaagaaaaatgcatttataatagtaaaagctacctatgagtcaatccaagtaaagctacgtaagatctttaaggataaaaatacaaaattttattgaagatttaaatgtaaaaagacctctgtatatcacaaactatgccatagtcatttatgagctttttcatttaagaagctgtattttacaactatttataaatacaatgttaaacaaatccaaatggaatgttttctgtgtaatttgataatctgatactgatatttatatgaagagtaagggaccaagaatagcaaatacaattttgaagagaaatgagggaggagaacttcgcctgccagatatcaagacttactgtaaagctacaggaagcaggaaagtgtgctcttgctgcatgtgcagacaaatagaccaatggagctgaatagagagtccataagtagactactatataggtgagaatgtgactaccacatagatggcattatgcatcagtggagaaaagcactattcagcaataagttctggagcaacaggccatcttcatggtgggaaaatggatccctacctcacacagtacacaaaaataaattctcaaaggattaaggtttttaagcttatagtacagaatattggagaacaacctcaggactcagaggatgggaaaaattattgaacaagacagtaagcaaaagctataatgaaataaagatcaatttgatgatattaaattttaaaatacctgtacaacaagagatactataaagtaacaaaacatgaaaaaacataaacacaatgcctacaactgaccgaaaaaagtggtgtctggaatagataatgaattattccaaatcagtacattgaaagccaacaactcgagaggaaaatgggtagaggacataaataggtgattcacaggagaggaagcagaaatgctcaacaaacacgtgaaaatacctcatctcaccagctatcagggaaatgcaaatttacaaaacaaaatgaaatggaacgacccattcccattagactggcaagttttcgagtttgatcatatgaagcttccatgagggtggtgaatgactagtattgtcaaacactgtgggagcataaattggttcaaccactttgtggttgccaaacaactattactattactaataggttactcttgccaggcagtttggcaatcatgaaggaggaaaagcacaaccctgtgacccactaaatctacttccaggtatgcaccctggagaaactcttcaacaactccatgaagagatatgtacagaatcttcattgcctccttgtttgagcaaaaataattagaaacaacctgtccattaatggatgaatggattttaaaagatctatgcattttcctataataaaattgtacataggcattaaaatgcataagctatatctttctgtagcagtttggataaatctcaaaaacaatgttgtgtgaaaagagcaagttgtggaaggaaatacatgatatgatactatttatataaaatagaaatccacaaaacaattctatatttgagcatatatatacatatatatatgagtagaaagaacaccctacaccaccaggataatggttatctgtggggagggaagaaacggaaaggtcagcgggagttcagctatacctatcacattttattactttttagaaactctgtagagaatgttaaaatgttcacattttaaaaatctgcgtggtggctttagaagggtcgtgttattttctgtactttgtgacatgtttgaaatatttcataattaaagatttttttttaaaaaggcagaaaagtaaagacttaagaactcgcccccgttatagtgtctggtgactcaaagggggcctggggtgggggtgcccatgcccagtggcagatagcaaagccccgggctcaccacatcaccttagtcacgtcacgggatctctccagtccttgatcttttcatcctttatgtgatgcttgaaggcaggtgaataatcaatccctgggtcctctccagcttggatgttttgtggttctaatgattttgtgagtgtgcaggggcagtgctctcatgcagagacagcatggattagatttgtttagcttttcattatgaaaaatgccaaacagagaagtagagagaacagaataatgaatctccatgtgcccatcaaccagcttcaacagttatcaactcagggctaatcttcttttatctataccccacccatctctaccagtcaccaccactggagtattatgtagcaaattccagacatttcatcattaaattagcacatattttactatttccaaaacgtaagacctgttttgaaaatgtaaccaaataccactaaacctaaaatataacttcttatatcatcaaatatccaatctgtattcaaagatccccaattgtctcataagtctttttacaaagtgtatttatttgaattaggatccaaataagatccacacagagcaagcaaaattgatatgtcttttagattcctgcttcatatcacatcctctctctcatacacatccatacacacacatatttatttactggaaaaaaaaccaaatttgtccttagagcttcacatagtctgaattttgctgattgctaaattgtagttagatcttggagcttgattagatccaggcttgattttggagggaggcagaatacttcatagattcattaggaaacacatagcagctagatgcttctccttttgtatgttagcagtcaccgatgatcattgtgtagattcattaactcattaggggctacataagggtgattccaattgcaacatttgcttgaatattgttataaaaagaaactgccccacaccaaccatttggttaccttgaagtacagttcatacaggaaaggcaagatgaatgcttgattcatttgctttatttgccaattttcaaaataataagttaattcttcagtatcctcagcaattgaccaatgaggtattcttttttaaaacattatgaatgtgtgaatttaaacatatttgatatgtttgagtcaagtggagttatctttattgcttctgaaatcatcctacttggggatcctcttgaagatgcctcctgagtctttttaatacgaccatactagtctttgagagcttccatgctttctggtaaaagacaatgtccctggctcatcttgtacattttccatcctggatgtggagttggccattttttccaatgaaccttggttctgtttagtggaaagtggtatttggagaccataatctgggtgcttggggtgcttgatgctaatgaaatgatcattgtttctgggccttttcagtagcagagctaagaaatgtgtatgtgcatatttatatatttgttaatatataaatagaccgtgaggtctactgaggcttctaattcaaattcagggttacagg

SEQ ID NO: 1490 - DNA, 2357 bp, Homo sapiens
gaatcacgacccctccctgccatgtatccgcagggcagacatccggctccccatcaacccgggcagccgggatttaaattcacggtggctgagtcttgtgacaggatcaaagacgaattccagttcctgcaagctcagtatcacagcctcaaagtggagtacgacaagctggcaaacgagaagacggagatgcagcgccattatgtgatgtactatgagatgtcctatggcttgaacattgaaatgcacaagcagacagagattgcgaagagactgaacacaattttagcacagatcatgcctttcctgtcacaagagcaccagcagcaggtggcgcaggcagtggagcgcgccaagcaggtcaccatgacggagctgaacgccatcatcgggcagcagcagctccaggcgcagcacctctcccatgccacacacggccccccggtccagttgccaccccacccgtcaggtctccagcctccaggaatccccccagtgacagggagcagctccgggctgctggcactgggcgccctgggcagccaggcccatctgacggtgaaggatgagaagaaccaccatgaactcgatcacagagagagagaatccagtgcgaataactctgtgtcaccctcggaaagcctccgggccagtgagaagcaccggggctctgcggactacagcatggaagccaagaagcggaaggtggaggagaaggacagcttgagccgatacgacagtgatggagacaagagtgatgatctggtggtggatgtttccaatgaggaccccgcaacgccccgggtcagcccggcacactcccctcctgaaaatgggctggacaaggcccgtagcctgaaaaaagatgcccccaccagccctgcctcggtggcctcttccagtagcacaccttcctccaagaccaaagaccttggtcataacgacaaatcctccacccctgggctcaagtccaacacaccaaccccaaggaacgacgccccaactccaggcaccagcacgaccccagggctcaggtcgatgccgggtaaacctccgggcatggacccgataggtataatggcctcggctctgcgcacgcccatctccatcaccagctcctatgcggcgcccttcgccatgatgagccaccatgagatgaacggctccctcaccagtcctggcgcctacgccggcctccacaacatcccaccccagatgagcgccgccgccgctgctgcagccgctgcctatggccgatcgccaatggtgagctttggagctgttggttttgaccctcaccccccgatgcgggccacaggcctcccctcaagcctggcctccattcctggaggaaaaccagcgtactcattccatgtgagtgctgatgggcagatgcagcccgtgcccttcccccacgacgccctggcaggccccggcatcccgaggcacgcccggcagatcaacacactcagccacgggggggtggtgtgtgccgtgaccatcagcaaccccagcaggcacgtctacacaggtggcaagggctgcgtgaagatctgggacatcagccagccaggcagcaagagccccatctcccagctggactgcctgaacagggacaattacatgcgctcctgcaagctgcaccctgatgggcgcacgctcatcgtgggcggcgagggcagcacgctcaccatctgggacctggcctcgcccacgccccgcatcaaggccgagctgacgtcctcggctcccgcctgttatgccctggccattagccctgacgccaaagtctgcttctcctgctgcagcgatgggaacattgctgtctgggacctgcacaaccagaccctggtcaggcagttccagggccacacagatggggccagctgcatagacatctcccatgatggcaccaaactgtggacagggggcctggacaacacggtgcgctcctgggacctgcgggagggccgacagctacagcagcatgacttcacttcccagatcttctcgctgggctactgccccactggggagtggctggctgtgggcatggagagcagcaacgtggaggtgctgcaccacaccaagcctcacaagtaccagctgcacctgcacgagagctgcgtgctctccctcaagttcgcctactgcggcaagtggttcgtgagcactgggaaagataaccttctcaacgcctggaggacgccttatggagccagcatatcccagtctaaagaatcctcgtctgtcttgagttgtgacatttcagcggatgacaaatacattgtaacaggctctggtgacaagaaggccacagtttatgaggtcatctactaaacaagaactccagcagg

SEQ ID NO: 1491 - DNA, 2319 bp, Homo sapiens
atgtatccgcagggcagacatccggctccccatcaacccgggcagccgggatttaaattcacggtggctgagtcttgtgacaggatcaaagacgaattccagttcctgcaagctcagtatcacagcctcaaagtggagtacgacaagctggcaaacgagaagacggagatgcagcgccattatgtgatgtactatgagatgtcctatggcttgaacattgaaatgcacaagcagacagagattgcgaagagactgaacacaattttagcacagatcatgcctttcctgtcacaagagcaccagcagcaggtggcgcaggcagtggagcgcgccaagcaggtcaccatgacggagctgaacgccatcatcgggcagcagcagctccaggcgcagcacctctcccatgccacacacggccccccggtccagttgccaccccacccgtcaggtctccagcctccaggaatccccccagtgacagggagcagctccgggctgctggcactgggcgccctgggcagccaggcccatctgacggtgaaggatgagaagaaccaccatgaactcgatcacagagagagagaatccagtgcgaataactctgtgtcaccctcggaaagcctccgggccagtgagaagcaccggggctctgcggactacagcatggaagccaagaagcggaaggtggaggagaaggacagcttgagccgatacgacagtgatggagacaagagtgatgatctggtggtggatgtttccaatgaggaccccgcaacgccccgggtcagcccggcacactcccctcctgaaaatgggctggacaaggcccgtagcctgaaaaaagatgcccccaccagccctgcctcggtggcctcttccagtagcacaccttcctccaagaccaaagaccttggtcataacgacaaatcctccacccctgggctcaagtccaacacaccaaccccaaggaacgacgccccaactccaggcaccagcacgaccccagggctcaggtcgatgccgggtaaacctccgggcatggacccgataggtataatggcctcggctctgcgcacgcccatctccatcaccagctcctatgcggcgcccttcgccatgatgagccaccatgagatgaacggctccctcaccagtcctggcgcctacgccggcctccacaacatcccaccccagatgagcgccgccgccgctgctgcagccgctgcctatggccgatcgccaatggtgagctttggagctgttggttttgaccctcaccccccgatgcgggccacaggcctcccctcaagcctggcctccattcctggaggaaaaccagcgtactcattccatgtgagtgctgatgggcagatgcagcccgtgcccttcccccacgacgccctggcaggccccggcatcccgaggcacgcccggcagatcaacacactcagccacgggggggtggtgtgtgccgtgaccatcagcaaccccagcaggcacgtctacacaggtggcaagggctgcgtgaagatctgggacatcagccagccaggcagcaagagccccatctcccagctggactgcctgaacagggacaattacatgcgctcctgcaagctgcaccctgatgggcgcacgctcatcgtgggcggcgagggcagcacgctcaccatctgggacctggcctcgcccacgccccgcatcaaggccgagctgacgtcctcggctcccgcctgttatgccctggccattagccctgacgccaaagtctgcttctcctgctgcagcgatgggaacattgctgtctgggacctgcacaaccagaccctggtcaggcagttccagggccacacagatggggccagctgcatagacatctcccatgatggcaccaaactgtggacagggggcctggacaacacggtgcgctcctgggacctgcgggagggccgacagctacagcagcatgacttcacttcccagatcttctcgctgggctactgccccactggggagtggctggctgtgggcatggagagcagcaacgtggaggtgctgcaccacaccaagcctcacaagtaccagctgcacctgcacgagagctgcgtgctctccctcaagttcgcctactgcggcaagtggttcgtgagcactgggaaagataaccttctcaacgcctggaggacgccttatggagccagcatatcccagtctaaagaatcctcgtctgtcttgagttgtgacatttcagcggatgacaaatacattgtaacaggctctggtgacaagaaggccacagtttatgaggtcatctactaa

SEQ ID NO: 1492 - DNA, 31527 bp, Mus musculus
tatcacctaaccatctctgccccagcaaacactggatcaaatcgacccctctgaatatactttatacttggagatcattgcagcttttcggaggggactaaatatatgagtcccagaaagggcagaggtaggcaggagcgactgtcagccttcctcttcatcagcccacccaggattgcacgggagggctggcacaagtcactgaccctgcgacagggtcgggagcttataccgcagagggtctcttttgtctggacgtcagggctttcctggaatgcaaacttctagtgtgcaatgtggggcagtcccaggggaagcaggctgcttggtcactgtgcatagccatgtcacctggtgaggtgagatcttgaaacagatttctggaaaagcgtcaagggtgctcatgaagcacgagtgttacgctctacgggtctggagaagcacttgcacacactcggggcagctacaccaagactgcggacacgtgctcatggtgcccaggcactcggagcgagttcgtgggggtgtgctttcaaagcaccaaggaccccatggactaaatttatggttgactgaggtggggttttaattggtgagctgtgaactggatgggaagaaagggggatcagagagcagtctgaagacagggtgtggggaggcttcccccacgagcaggctttgacagtcaggccattacagtcagcctctgtgtattgtgggtcagatatttatattacaaacctacatctatcgcttgtaggctccctctcccttctgctcctcttcactttctttccttgcaaggctgggaatggaagccagacctcacccaagccaggcaggtgctctatcactgagccatctccccggggcttttcagccactttatttccttggcgattatttggggctagcacgtaggtttccatggctttcctgcccaggtggcctgcagagaatcttacacagtgccatgcatggtctaagtgcctcaccaagggacccttgtcctgagatgggttttgtcctgtctccaccttgcatgtgctatgagcatgagcccaacaggttgggcaatctttccagccgcaccataagggcaagtcacatcaggaaatggcacacactgtctggggtacagccatactctggccagctatggtttgattctgagaacttgaagcacgtgggtttcccaagtacataggatcccaaggtgctgtaataaatcatatccctgagggtggagtcagggaagcttttgatctataaatcagatggaaatacaggtgccttcatctttttcatagggatttcggcctgggtaagctgagtgccaccccagcctctttcccttctgagcagtctggtctcacctgcttgttatccttgttgaatctgggccaggccggggagcaccacgttctgttctagctcggcctgtgggaggaaggggcctgtcaggagccccttgggccttcctgtatgggaactagctgttacaaacacattgccagccagcgaaggctcccaggatgacaatccctacgtaaaatgatgtgttagagagccacgtgatcttcagctcacagtctacatggagattgtgggtagattccctccacttcccctgccccattcatgtgtctgttgaatttgggtgctcagcactgaagtcagggccccatgcaggccattgcctgtgtggcgtttagagggtaattctgtggagttcagttctctttctccacctttgcatctgtctcaggcttgggaggcaagggctttctccatagagccacagggcgagcaccctgcattctttgtttctgaggagttttacacttataggaaagctgtgatgagggcatgggcagtttccatttctcgaggtgagttctgagggggcttcctgctgggtggggcccactacggtccatcagtttggtttttgtctgacttcccttttcagtggtaaagagtcacattgaaacgggctatgaggttatagcttctccaaccgaccctggtcctcacctgcatcccttcccctgcacgcacacaggcccatctgcagcctcttctaactgctaagcaatctctccagaccctaaacatattgtttctagcctgctgtgctgttacacatttgtagtcccaaatttggaagactgaggagaagccgtcttgaactacttcgtgagttcaaggccagcccgggttccataagaagactgtatcacaaattttacgtgtgcttttgaagagtggcactgagcacttagtgccacagatagccctctttgccagttactcggagtcatcatttctggcttctttgtgctttgggtttgaactgtgagttagagaggcgggcgggggggggggggagaatcccagctacctttcttttcccttcttcttcttcttcttcttcttcttcttcttcttcttcttcttcttcttcttcttcttcttcttcttcttcttcttcctcttcttcttcttcttcttcttcttttaattttgtgggttgtttgtttgtttcaagacagggtttctctgtgtagccctggctgccctggaactcactctgtagaccaggctggcctcaaactcagaaatctgcctgcctctgattcccaagtgctgggattaaaggcgtgcgccaccacgccaagctctacatctttcttagaagagaggaaagggcaagtactcttcttgcttgaggccagcagtgagttctggtgaccgtgaaggaaagagcaggtcttgaggctgatagagaagtctccttgctctctagcaccccaccacagcctctggccaacacagacaagctgagagtggtgtgtggggagactagagagcagtggggagagaagagaaagtggaaggctaggggaggagaaaatacctacctgacagacactggcattggggaagtaccgacacctgtctcagtggggaaagagatccgtgcctggcctaggtaggggctgtttttctagagtgcccaggttcaattcccagcacccacttagtggttcacaactcgtttcaaaggagccaagcacacacacacacacacacacacacacacacacacacgcagacaaaacacccacatacaaaacaacaaagacaatttttgtttgtgagacagggtctctctatgtagctctggctgtcctgaaactcgatatgtagaccaggctggcttcaaacctacagagacccaactgcctctgctaggattaaaggtgtgtgccaccatgccagctaaacaaatcaaaacaaactagagaggggccacagccgccctgtgctctgaccctgtggcagctgtggaaatgcaaacgcagaaagctcatagcatttaaagctggaagggtcatttaaggtcttccagattaaagcctttatttttgcagagcccagagatgggttgggccacacagctcctaattcccaggattgcagtccctgttcctgcaatttcacaatgccgccttctgaaagctctggacattcctgcaaacacattagctgcagcctacggtctgggctgctagaacaagacgcctggtaccaggtgattcatgcatttattcctcgctgttacagggctgagaaatctgatgctggcagaaacactcgaggactgccctccttgatgaccttaatgtgtcctcacaggatgcaagaggccaagcccttcatgccctaggagaacaaagccaaccacagggcacagcccttgagatctaattctcctaaggcccagccctgcaccttcacctcttgggggtgggggatgggtggcggcggtggcggcacgggggtggggtgggggtggggaccaggctttagcatgtagcgtgtgaatttggggtggagagacgcaatactcagaccatagcagcccctgtcatctgtgattagctttcatgttcttatccaattgaaatgattaatacttagagacagggcctggagaagtggctcagtagctaagagtgtttgctgctcttgcagaggatcagggtgtggttcctagcaccaaagttgagtggtcacagctgactgtaaccccagcttcaggggatctgacacactcttctggcctcaaagggcaccctcaaacatgtgcacacacacacacacacacacacacacacacacaatttgtaaaaatattttttaaagttatagtactataaataacataaaaacatgcatgatttgttgaaaagtctaagtttatccatgtgttgaacagaaaattgtttttcctcaatttgtattcttgtgtactgttatgccctgagttcacgggaaacccaggtgagcccaagaattgcaaagtccagcggggcgtggtggcgcacgcctttaatcccagcacttgggaggcagaggcaggcggatttctgagttcgaggccagcctggtctacagagtgagttctgggacagccggggctacacagagaaaccctgtctcaaaaaaacaaaaacaaaaccaaacaaccaaacaaacaaaaaaagaattgcaaagtccactgcaactcgcaaaagagtcttgtattttcaagtttgaactcggtttgcccacctagcacacactgcataaatgctggcaagcgatcctgagtccagaaaacattgggtttatatatagtataggaatagtgtgaatattcacagaacaggggagtagagggtggaatagtactgaagcgggaagggggctaatgggtgtctattcaaggactgtctgtgacctgacctctgtttaccttttactttttccatggtctcccttgagcttgttatttctctaaggtctcaaggacaggcacctagaaagttatcaggaggagtgttgggtgttggttttggacacacagaggtgcaccattctaactctaggggagggggagggagccagccccaggctgctgcaggaggatgtagcacagaaaccagctgtctgtgtatcatgcttgcggcaggctggaaaaatgatgggagcttctggcagaggggttggaggaaacgcaggggcaaactgtctgcacacaacaacactgaagtctctctagtatccttaatttgggggttgcaacagtacaagtctgaaactctccctgtttgaaacattgtggtactctgaccacacacagggttcccagcccagttctcatcttattcttccatagctgcctgccatctgccccgggctgcagtctgtgctgttggcagcatccacagagtccctgccactatcaatgtatctctccagcactcttttcttcgagttatttactgaacatatactgtgcattacacagttttgttttgtttttctttctttctttctttccccttcccattctccctcttgctctggccctgcttgcttcagcctataggttctttatttatttctcattatggatggttgtaagccaccatgtggctgctgggaattgaactcacgacctttaagagccactgagccatctcaccagcccttttacaggttttttttttttttttttttttttttttttttttaatgtttggaattgaaatagaatcccatggcttccccctccctggacccccttccttcccccctttcaattggtggactttttttttttattattattgttacacacatatatgtgtgtgtgcgcatgcacagatacatataaatgaatctgtttctgttgtctgtgtgtgtgtacagttccaaggacaaccacttggcattagacaaacaatccctgggagaggctacctctccttctggcagttgttagttgccttcgttctttgtctagaggaaaaaccctgacaacctttccttattccatgccagctcgtccgctgatatgacattgttcctgacttttcctccttatgcagccatttctagagcggctgttcacagcggatgccttggtcctctggctcctcagatctttcagctccctattcgtttgcttttcctgaaccatagacaaaggtgctgtgtgtccgtgtattccctgcagctgggctcctcatgacctgttgatttctgcattgtgtccagttgtggttttccgtgatgggctccatttgctgtgaagagaggccgctctgatgaggggtgggagctgcactgacccaggaaaggtaagctgagcacctactctaaatttttgagacagtgtgtcatgatgtcgtccgattcttaccaagaacctttccctttatttttctctttgtagaaatctttactaataacttcaaaacattgtcataaacccagatttcaaaccgccccaagtaatcctcaagatgactcactcacaaaatgtctgacccaacatcctcccaggccagtcttggagtctgcgggtggtgcagagctgctccttattacgcagtggcgtaccgccctctagtgggaagcttgtgtcagtacacagacgctcccggaggcgagcctggagattcttcagtgaacagagctaacgatgctagcctttagctaagagaaggaagacaaaaaagtagcaaagtcaggacaaaagccaggagcttgcccaggaagtgcactgtgggcccagggcacagtgcaaaaggtccctcccttgagatggcacacactgttaatggggactgacagcagaagcagattgggcaagaatagtgtgagccaggtcctgcaggagccagatggctgcccagagcagggtaggctcatctctccgctctcggttgattcctgccccacctcccatccccacccgatgaccccatactgaggactgaactcagggccttgtgtttgttggatgaactctataccgctgagaggaacccccaaagccaaccatttcccactttggtaattactgatttgtcctgtaaatcctcccccgccttttttattatggtggtcattgtggctgaacactctcacctagggcctctctctatactcccaggacagctcccccgagatacagctggcatggctgaatacttcagggatcatttggaatctctgtgtaagtcttaataacaggccttactgcatctttatttaacaaagctttttttttttttctgccttctctattgcaggacttacactggccacaagcagtttgatgttcagctagaaaacaatcacagatatcacgacagaattgatttacactgttctctgaacatcttggatgaggcccctcagagcagaggtgacaaggttggaattccgccttgcaggacaagttgtgtcctctggataaacataatagagggagcatgctgttgccttgagtaaaatcctgggcagaagcagctcaggaagaggtgggttcaactgtttcacagttcatcagccttggaaagcagagactttacagcctggcatggtgttgcatgccacaagcaggtggatctctgagtctgaggccagcctggtctacagagtgagttccaggacagccagggctatactgagaaaccctgtcatgaaaacaaaacaaaacaaaaccaaaaagaaacttgatgcttctggtcactttgcacctgcagccaggaaacaggaagagataaacaaatgtgtgtgcttacctagccttctcttttttatgtagtcctagactggtggtttgcatgagaatggtccccagaggctcatatatttgaatgcttggtccctacttggtaggtctgttctgggaagttattaggaagtgtagccttgttggaggtgtgccactaagggtgggctttggggttttaaaagcccatgccaggaagagtctccctctctctcccttctctctgtgctctgtggttcacatctcaatctggaagctctcagctacggttccagtgctatcacgcctgcctgccaccatgtttcctgacatgaggataataaaggactcactctctgaaactgtaagcccccaatttaaatgctttcttttgtaagttggcttggccatagtgtttcttcgcagcaacagaaaagaaactaagcaaggaccaaagaacattgttgcccacttttagggtgtgtcttttccattcgattaatttaacataaaccctcacaggcatgctcggaggctgacctaatctacgctgtctctacaagtgtacccaaaggcttgaccccctaggtgattctacatcctgtcaatcaacagtaaccaaggtggggtaaggcacgaggtagggatgcaagtggaacttctaacaactggaaggacaagtaccaagttagtcttgagaagctgagaaagtgtgttgtgtttggagcgaagagtaagagctctttgtctagaaagaagatgaaaggttgtgtgtgaagcaggctggtcaacaaactcaacataagcatcagtacacccatcacatacacaccacacgcctatacaccacatatcacaaacacaccacacacacaacatgctacacatatcacatacaacactctacacatcataaacaacacacacagcacacacacacacaacatactacacacattacatacgacacacacacacaaacataccacacatatcacatacgacacacacacaaacataccacacacatcacatatgacacacacacaccatataaatgacctcaggcatttgtagctccttatataatttctgagacctaaattaatcctacccctttgaggtgtgacaatgtccttgaatgctaatttaaaagttctcctggctggcaattccaattagcttatactaaattcagcgcacaaaatacatttatttttaacataaggaggcttctaattcttattaataggacattgggttctttttcaatcacagcatgaacagatattttaagaacaatgacccatttatgcagcagattattagctttctggtaatgcacattaccccccacctgctctggatggaagcctttagctccccttccccaagtcaaagcggggccatgtcactggctatgtgagctcaagtcagcaaactgcatgcagctcccggattggctattagggaacacctttttttttttttttttcctaacacacttttttggtagatgtcttagaagtacaatttggcagtgtggtgactctgttctgaatgcttccatactcagtccctaagctttggatacgtttctatgttcaacaggtctctcagtttaatgttcagagatctagactatgctaactgtgctcagaaaacacatgtcaactctgcgttattactatgaatatcctttattcttattattttttaattagttctcttctgggcagttgggcctagtttctctctctctgtctctctctctctctgggcgtggggtgtctttctcgcgggtgggggtaaggcagggaccctctacaaagctctggatgtcctcaagctcacagagatctgcctgagcgcgccaccaagccgggctggaacagggattctggctctctaggtgtgaggactataaagtgctcggtgcactcaccgcaccctcagggtcatcaaatcctcaacacacaagggcttaggttcaggacccgagtgcagaggagtcggaaaagggtggggtcaaagtggaaaggtcaaaaggccagtgtctccagtccagagcctcggacatccgttaccatagcgacttcagccaaggaatggaattaccgaggccccaacaggctttgcgatcccaaatcccaggggttttcggcgcggctcgtattccgtagagcagctagacgcagacaccaacgccgacgcggttgcctagcgacacgcattttcccaggatgcctagcagtgttgtgttttctcagccaatcagagttgagatgcaccttcgctgtggaccaatagaatgcgaggccgaagcccgcgacggttgacccggtggccggttgctcgccgactcaggcaggcagacgaggggctcgggtttcggcgcggttggcctgcagcgggcgagcctgggctccgagcggcgcggtggtgtggttgccagggtggccgctcgccatgccgtcccgggtggaggactacgaggtgctgcacagcatcggcaccggctcctacggccgctgtcagaagattcggaggaagagcgacggcaaggtgaggcaccgggcagcccttccacggcgggcttagggagaagcaagcgtcgcccacgctggggaggggcagggcggccacctgaactctcgtgaaggaccgggctgtagcctcctaagaagggacgggctcgtggagcgggcagccacggctgggaaccggtggaggcgcgaatccgcggcgagcagaaagacgagctcacgtgacctgcttcgccgctgcgccacacgccgtcccggactcaagcgctggggatggtaccgcccacatttcgggtgggtcttcccactaaattaacccggtctcgactccctcactgacacacccattgagttgttagtgttttgtttttcaactttggaaatttcaccctttgtctcacaccttggaaatgttgtatttcagatcctggtgtggaaagagcttgactatggctccatgacggaggtggagaagcagatgcttgtgtctgaagtgaacttgcttcgggagctgaaacatccaaacatcgtccgttactatgatcgcattattgaccgaaccaacacaaccctgtacatcgtaatggaatactgtgagggaggggacctggctagtgtcatttcaaaggggaccaaggataggtaaggtgaaagagccccacggttcgtatctaataataattaacttccatgtttgtacgctctgaatgacttgccccagattgaagatggcttttattcagggttgtgaaatgtgctttttctccagacagtacttggaagaagagtttgtccttcgagtgatgactcagttgacgctggccctgaaagagtgtcacagaaggagcgatggtggccacactgtgcttcaccgggacctgaagccagccaatgtcttcctggacagcaaacacaatgtcaagctgggggactttggactagctagaatattaaatcacgacacgagttttgcaaaaacgtttgttggcacaccctattacatgtctcctgtgagtattttagaattcaacttttttttttccctgagacaggatttctctgtgtagccctgactgtcctggaactcactttgtagaccaggctgtccttgaactcaaagtgatcctcctgcctctgcctcccaaatgccgggattaagggtgtgagctaccacacctggcctagaattcaactttttaatatcttaggtgaagcattcagatgcaaagaactgaggcttgggttgctagtaaatccagtagctcagaattcacaatacaatttaagtttgagtttgactttgttcccctaatgttggggattgaacctaggccctcaggcatttgaggtaagcactatgccactgagttacaccccaaagtcttttatatgtattatgtatttaaaaatgtttattatttatgtatatatagtatatgtgtcttgtgagtgagtgctatgtgtgtggtgagaccagaagagggagtggacttaccctatcccacacactcacgctcagggttccaggcaactgtgagccgtctgaccagatgctggaacttgaactcaggacccccgggaagagcagcaggtgcttaatcgctgacccctcctagatttgttttcaaagagacttcctggcaaacagttctctgtattcaactagagctttcaaaagaaaaagaaaactaaggacttatttatgtgtatgggtgtttggtctacatgtatgtaagtgtgccacctgtgtgccaaatgcccaagggggtcagaagacagcattggactctttggagctagagttatggatggattgagagactggaaaccatatccaagtcttctgtaagagcaacaagtgctgttaaccactaagccatcttcagtgtcccccattccccaatgtcccccatcccccagagtttcactgtagttctggctagcctggaattcacaaagatctgcctgccgctgctgggattagaggtgtgaaccatgttgctcagcttttgttttgttcttcaataaccacaaaatgctaaattatagggttacaaataatgtttaaggcaacaatgtttccaaggggaatagtgtttgtttgttttgttgttttttgttttttcaagacagggtttctctgtgtaaccctggctgtcctggaactcactctgtagaccacgctggccttgaactcagaaatccgcctgcctctgcctcctgagtgctgggattaaaggcgtgagccaccactgctcagctgggaatagtgtttaaaggcaacaatatttccgaagatgtcagtcctaaagtggtgacttcagactccctgggagtgtttattttatttttttaacatacggagtcctggacccaaagttaaagcaccgctggtcacgctgtctcagcaggcagctgaggtgaactgagatgctcaggtacttgctgctgctcatgagtttaggacccagacccagggaatggtgcctccacatttagagtgagtctccccagctgagctaagtctagattcccttagtgatatacacagagacttgtgtcctaggtgattttagatgctgttaggtggacagatttagcattacagtaactgaaagtttggtgaggctcaggtcttctcacagagggatccagtgttttagtgttaatttctgcatgtcctgtccttgctgctcttctgcatttacagggtgttcccaaatgtctcactatcataaggcaccctaggtgcatagccttgtatgaattagtcctcatttctgattattagattgtagaacaattgttagggcaaaaacatgacaggtttttaatctgtcattagatgtcaaggtcagggcctgctttttatcccagtctgatttgcatagtgagatcctgtctcaaaaaacagaagcaaagcacaagtaaataccaaccagccctcaagtctgtaaggggcagcacacacacacacacacacacacacacacacacatcctccgtccactgttataaaagcacagcagtatctaacactctccttacttctcccagctgatgtctcagggaaactgagcccattcaggcgctagggcagtggagggcagtggggaaggaggcaggaaaggccgtgcaggggttaacatctgggtgatttcctttgtacttaagcgttctgtgtgcaacatgacaccatggaaaaccgcccagctctgaaaatagtcacaagttcactaagttttatactgtcaccaggtctattagtttgattatttatctggaaagttctagaaatctctgtgaactactgaagaatcctctatatgacagtaactcatgtacccaagcttcctagaacttgtatagctgagaacaactttggatttctttttagaagattttatgtatttttatgtgtataagtatttttcctgaatgtatgtacaccatgtgtattcagtgcctgggagagcacagggcattggatcccctggagctagagttatagactgtaatgagtggccgtgtgggtgctgggagagaagcctgggccctctgcaggaggaccaccttggctgctgagatgtgtctctagctctagcccgccatcgttttctggtcctcatgctctatctcccaagtgctgagatgacaagtgtgagccatggttactttttttgagatccagccctgggctttgtgcctgctaggcaggccctctgctgaccaggctgcattccagccctcaggttgaaacaaagcaagctctcacctccttggtattttcttaccttctcctttaggaacagatgagctgcttatcctacaacgagaagtcggacatctggtccttgggctgcctgctgtatgagctgtgtgcactaatgtgagtgcgtggagacaggcctgcttcaggcaaacactctgggtcctgttacaatagcaacaaccaaacacctggcttgtacaaatttagaatggaacatgtgggactgggtcctgcttttttgttcagggatctgtgtttgcagtgggagggcagtttatagaccaggccaacaaagcagatgcgtcagggtcctggggaaggtctggggttgggagaacaggacgggctctgagtttgacactttcctcctgcgattctaagccattccccagaaccacagttgaacagggatggaggaaaggcactccatcacactggagacagtttgggctgtccttccagatctagcaggcagaagccacgctgctgcagaatgtccagagcgtatggacacaccccgagtcagagctgttcaaccctaaaatacagcagcaccgccttgccacagtacggtgggtgatgctgctaaccaccccgctaaccatagccagggaagagtcccagatgaggaagtagagtgtgagacagaggccggtcacccatttattcctgtcctttgtgtttatctgacatttttataacttctccccttctctctttctcgtccctcctttttctttccttttctctcttttttttcttttttaaatcctaggcctccctttacagctttcaaccaaaaagagctagctgggaaaatcagggaagggaggttcaggcgcatcccctaccgctactctgatggcttgaatgacctcatcactcggatgctgaatttaaaggtaatggttgcaaggcaccatgtgacagacatgacatgacagagactgagaggcgtattctgtgtaaagaccaatgaaacctaaaggagcatcggtttccctggctacagtcctattggcacaggtgggcggatgctcacaggcatggagacatgccccctcggcaaccgtgagcctcacttgcagatttcctttccatcttctgctacagtgaaggatggttagtggtatggaaggactgaggaaaggccaatttcagccctatagtgggaagggaaggagccaggatgcactgtgttcctctcccctcaccatgagggatgatggattatgaagggaaggtcaacagggaaagaaaagatcctgaaatggtcttctagctggtgggtggcctttgtcagctgaggaaagagtgaatccgggagctgtgggtttgtggaggatgcaggggcagggatggggaacaggtaagatggaaggtcatgaggatgtccttcttggtatttagagaaacaggtctcacttccccagagcagcccagtgatgcccagtgatgcccagtatgcatggaggagggaggagttgtgcccgcctgagccagctccttagaaccagagagaagggagaaacaggcagccaaactcaggtcatggtgcagacccagcaccttgtgaccagtgcacttgctttttcaacctgatatctctagatgcaggaactgtcttttgtcttgtttaccctgctaatgtagctgcttttcttaagatgaatctgatctgccagccacactgtttctctaggactaccatcgaccttcagtggaagaaattctggagagccctttgatagcagacatggttgcagaagagcaaaggagaaatctggagaggagaggacggcgctcaggcgagccttcgaagctgccggactccagccctgtgctgagcgagctcaagttgaaggaaaggcaactgcaggatcgagagcaagcactcagagctcgggaggacattctggagcgtgagtggtgccccgagccagggagtcagccgggcgcagtggggagatgggaccagggtctaaacagaagagcgtatattcacaggctgttagaaagagcctttatttctttttagttgtgggttctggggattgaacccaggatcttatgaatgccagtgagctacatcccagcatttttctctcaaggcaggatctctctaagttacccatgttgaccttccatcctcctgctccagcggcttgtgttaccaagcctgacaacttttataaaccagtgattctcagtctgtgggttgtgacccctttgggaggctcaaatgacccttacctaagaccaacagaaaacatttatttcccatgagtctccactcctttgtccatctccaggtggtacacacacatgcagatacacccaggcatggtaacatcatgacaactctatcacatataccctgaacaaatatatatatataaataaaacttcattagaaatattccattagaaaaccatcccaacaacaacaaaaagtaaggagaaagaagcattgtaagttctgtcagttttgtaacggtgagcacttaaaatagtcggtgctccagacagagctccgccatgtcttacggaagttaaatggctgtcagagggaaagggttttaaatgagtttttgagcttcacgatgaactcagaatgttcttagatagcaaggctgctaagttctaagcacttttcagtaatgaaagtgagttgcagacagtaacttacttggttgtaatctttgtcatcttgaatgagttacatttatgactgcaaggaccaaatacaacattcttcagtttatgtcaaaggatccgattattccaaatgaaacttcagctttggcaaaaacccaaaaaggatgaaaataaaatttacatgctgcctaccttatatgcttttttttgaggaccatgacattgaaccagacaaaaggattacaaagatagtttctgtgtgagaacacttgcacatgcttgcagacaagacatttcattgtattttccaagtctacatgatgcctgccccatttgcattgccagaagtccgttcattcagtcagagctgaagctcttcgtgagacagcacaagaggagttgactgaacttgctaacggcgctgcagtgagagccgacttctccacagtgccccagctacacaactctggatcaagtgtttgcagctgtacctgctgtagtctttaattttttaaccctgtttttaataatggttctcaagtgctttaaactgccttctccagcccaccacccaccagaggtagtggaaaaggaaggtattagggtacaggggcagtggacctgtttagcaattgttttttggagcaaatctcatttgtgttgtcaagaagtcagcagttgaatcatcagtggtggggctcttaatgcactggcagaccgtcagtctggtcctgttgggatagcagcaggatccagcagcagtggcaccgagcagagacgtgtgcccttgcatagactgccctgagaatttctgatctggtgagaaagcaccaacctccacttttgcattaaagtttgtttttactagtactgtcgcaaaatgtagcaccatgcttcaagacaaaactacatttatttgtaattaggagtaaatatttcacaatatataactaagtatatttttatgactaatcactgagctttaattatgttcaatttgtaacaatgaaaatagatcctgcatatcagatacttatgatttgtaacagtagcaaagttatagttagaaagtagcaacaaaaatagtgttatggttggtgtcaccacagcatgaggaagtgtactaaagtaccccagcattgggaaggctgagagcactgcagtgcagggaccttcccagcctgcaggtggcaggaagagagaaagataggatggccaggctgcagtagataggtttatggtcagagctccttactcattggtttcctttttcatccccttttccaagagaaggaacgtgaactttgtattcgagagagacttgcagaggacaaactggccagagccgagagcctgatgaagaactacagcctgctgaaggagcacaggctcctatgtctggctggtggcccaggtatgcccatgaactgcacacagctccacctcacatgaggatgtgcaccacagtgtggcccctgagtgggttagagccccagatttcaggatgacgtcattgagtctgtgctcctgagtggactgaggctctgctggtgcagtgactgagtccctggccgagagacctgataggaatggcaatttcatttcagcttcactcagcataccaaaagcggtggatggtatttaaatatttgagttttgaaatggaaacattttcaaaactatacatttcaagtttttcacaggtattatgttctttggctattgtggtttgaatagctacagcccccatagactcatgtgtttgaatgtttggcctatagagagtagcactatcaggaagtgtgaccttgttggaggaagtgtgtcactgtggggggcagattttgaagtctcctatgcccactgtggaagaaagtccctccttgctatctatggtcaagatggagaactctcagctcctcctccagtaccctgcctgcctgctgctgccatacctcccacgacgatgataatgatggactaaatctctatacctgtaagccagccccaagttaaataccctttgtaagcgtcgccgttgtcatagtgtctcttcccagcaatgaaaccctaagacagttatgtgaccaaaactatatttctctatattttcaagcaaaaatcctggtattttaaaactgtcacacctcagtcatagtaggaactgtggcttaacagccatggtagtataagtctgttatcccagcacttgatttgctgtgagtttgagaccagcctattagacatagtgagttcaagacagtccaaaagaaaggggatggcacttggctagagagatagctcgtcatttaagagcacacactgcttgtcttagtcactgctctattgctgtgaggatgcaccatgaccccggcaattcttaaaagagaaagcatttatctggggctggcttacaatttcagaggttcagtccatgaccatcatggtggggagcacggtggcgggggcagtgctgatgaagtcgctgagagctacatctccatctgctgggatttcctccagcaaggccatacctcttcctccttttcaatcagtgccaatgcctggtgactgagcattcaaatatatgagcctatgaggccattatttaagccaccaccctgttcttcctgaggacaagcagcagcattggagttaagacttcatgaattatagctactgggtaaatgtaaaatcatgtactatgaaatcaactactgcaatatacacgagtgcaccctcccacccaccatgggaacctaatctggatgctggtcagtcctttttaaatcagctgtgactgatgtcagtactgtgatagtaacagccagtgtgagtccctcctgcccggcacacacacacacacacacacacacacacacacacacacacacacagccctcctgcctgcaactccagctccgaggagtccctgatcacttgtcccagagagcatctcacaggaatcagtggataggtcagctctttgatctgtgtgatgtagttgatctcaggtaactcagatccttttctttctctttgtaaagaacttgatcttccatcctcagccatgaagaagaaggttcatttccacggggaaagcaaagagaacaccgcaaggagtgagaattctgagagctaccttgccaagtccaagtgcagggacctgaagaagaggcttcatgctgcccagctgcgggctcaagccctggctgatattgaaaaaaactaccagctaaagagcaggcagatcctgggcatgcgctaggccggcaaggcatggagctgggtcagtgttgatactgacaacccactagagattggtattcagctgctgtcgttttgtgtgtctggttctgtgggcaggaacctttgtgtgtggtgagctcgtggcattgcttgtggtctgcaaatggatgtgtgtgtctgcttcctaatgtccctgtgtgaaaagcaagctgtctttgctggttggttgggcttttgatcctgtgtgtgattactacttggaatatgagatggggcactatagatactatagatcttaggagaaaataatgttagggaaagaatatttaacctggagggctcagagaggctcacacgctgagtgataccgccttcactgtggtttccaagtgaggcctcagcgggtccatgacctcactgctaacgggatgcgtatggcagggcccacagggttgcatgtcagaggtgttgtaatgttacagggagagacccagcctctggcctgacctcctgatgagaagccactcaccagcattcccattccaggacgctcactgtgccagttaacatcagattagaagtggaggggaggggagggcgagggctgaagcttttaggatttgccttagggaagcgcgtgccatggccctcagcacgctgctgtcctgcatcctaggcaggcactggggacaggaggctctgggagccctgagagccccctcctgctgtgtgcagggcctgtccccgtctgtctgtatctgacctctaggtcagttgatgacattagttaagtgtttctgtacctacaagtataagccaaaaggtcggaaatgcctcagagtcacacatgtggtccccaaacatttaatttctgaagagaactgtcttcagaaagttggtctatttaaggtgactggggaaaaggcaggtttcctttgctctctgtccacagtcccttgagatggcttcagaagagaacagtgttcagtgtgcgttattgagggccctgtatgccttcacctgtgtgagggccagattgctgtttgtctacggtttcttgaagacctcagctcagcagaaaggagttcatttgccctaacaagtactgttggctgagaggggaggtcagaagcatgtaatgccattcgtttcatggctaaacacacagactccttgcattttaaaattctgtgcctttacttcctggagctataataacgtgcttgggtgtgtgacttgccgaggttggctttcgcaatgctttatgtaaactctgctgttggcacttgcagctgtagaagctgtcggagggattacttacttacggttatagcatctggggtctcttgcagctgcaatgcctgggatcttttgcaactctgactttttcagtagcagcttggaatgttaaaatatggtgagcctcttctctgtgaaggaagggcctgacaatctgccagcagggaaaagactgggaactcagtgcagtggttttcctgcctttcccttctcctttggtctatagtgatactgacagcaatacaaagtaaaatctgtgtatataaaaatcctaagtatgaggtcttaaatgttctggaattttagaaaaaacttaattggatgcaattgtttataattaacaagtcatcttatttataaattttccaatataatataaatctattttgtggaaatttatcactgtgatgtttgtattctctgtgtgtgtgcacacatgtgtacaaattcacgtgtgtgtgtgcaggtgcaggtagcatagcacctagagggcaacctcagatgtcattgttcaggaaccgtccaccttgagttttgataaggattctccctggtacaggatacaacagttttgccaagcttgctgtctcctaagtcccagggtacttccctctgcctccgcctccctaatgctgaggttacaagcacattttatattacctaacttttttttttaaagatttatttattattatatctaagtacactgtcttcagatgtaccagaagagggcgtcagatctcatcacggatggttgttagccaccatgtggttgctgggatttgaactcaggaccttcggaagagcagtaggtgctcttaaccactgagccatctctccagccccagcacctaattttttatatggttctgggccctgaattaagcgcgccccccccccccccccatgcttgcatagcaagtacctttctggctgagtcatgtccttagcccatgatgcaatttgtttttattccggatgtcatttgtgttccatttttctacagttatgtattcattccactgtaggctgtagtggaacgtactctgatcatggaggctagcactgcagagacgatcgaggagcactaggcaatgttgagaaacattccttgttctgctttgtttttccaagacagggcttccctatgtagccctggctgtcccggttctcagtctgtatagaccaggctggcctcaaagttagagatctgcctgcctctgcttcgtgtgctggggttaattaaagggccaggactctggttcaagaagaggagggaagtgttttctctacagcctccctgattcgtgttacttgctgttaaatgtccttagaaacattggggaactgttagcatgagttttatcatttgtcttcattctgggcaatgtcagttttaagtggaaatgctttgggcttgatcctgtgtggttggactgcacagctcactcactctggttcattcctggagagtgcctcaagcaaggcaggagagactgcactcagccttcaacaatgtgtgcacgtgtgcgtgcgtgtgcgtggacagctggaggaggacctgtgacttactctcccttccccagccctgtgcagtgcaatatcaggactcaggtctagcctaccaccctgctttcttaggtctgctgtcacatggattgtgactagccctgttctgagatgcctaacacctgttcccaggcccctgctgagtgtccttataagaagttagaaactataaccgaaggtgtaataccttccacgacagcagtctgcagtctcagtcacccataaaacttcattttgaagtctggagccagctagacgtggctatatctatctcagactaaccttaattcatgtactgtcaatggacagtcattgagggcctaccatgttaaaacctgacattaacccattaccctggagagcccgaagtctccggcattagatctgtggggtcaggcaatggggagcaaaataaagctggttaaaagagctaggaaatagttgtgtgtgaaccctttttggaaaaggggacattggggttcaagttaggaagaacagcaggtagggggaccctgtggggtagggcaggaggaagggggcttgcagggcagggagaagaagatccttgaaagcgtggaggcacacagccgacttttgcgtcctgccactgaggcgtcgacgcaagccagttccggtccatcgggaccgtatgctggaccagagaggaagctctttgaaggaaggggctgctctgagaggcgattcttctcattaggctttcagcaggttcaccagcgcctcagcaatggtagaaagtggcctcacggtggcgccaaggcgccgcgagtccagcagctgggaggccatggcccagctgagcaccaccagctcagttactttctgtcttaacacccctgcgaagaggtgtcagaaaaaccgaggcacacaggtcgcagatgagtggcacagctggtgacggactcccaagtcaccttggcttggtgaaggatcaggctcccaggaaggaagcgccctgcctgctcctctgcctcccagcatagcagcgacctctttcccacagtgggtgttgaagctttcaattcaaagggtcaagagatgtttattctggagccaaaaatgagtgactgtggcccaggcacacagattcaggttaccccaaaaaccatgttccagcgagctgacaatttcatggagtttttatagtaacaaagtcaggtgcatggaccatggcagggagcccctgctatagccctcagatgccctctgagagtctcagagttggggctggaagaaaatagagctagatgttcacaccaataggtcccacacagaagtgggcaacatgtggctgtctactgggttaaaatggcccaagaccattttgctctggacctgcaacattccaacgctccacaacccctgcctttctgatcacattcagcctggtcggtagcaggctaccacagtgtgacttcttcccagagcttagcgtgggttaaggtgaacgcccaccctgagcattgcctgttgcttgtggttccagcgctgtagtggctgaggcaagataattaggatataaggttatccgcagctccgtagccagtgtgaggccagcctgggctacacagtgtgaagccagcctgggctacatgagaccctacctcagaaaaacaaaaaacaaaataaacctttaaaaatcggtaacaataaacccccaaaccgccgggcgtggtggcgcacgcctttaatcccagcactcgggaggcagaggcaggcggatttctgagttctaggccagcctggtctacagagtgagttccaggacagccagggctgcacagagaaaccctgtctcgaaaaaccaaaaataaataataaaataaaaagcagaagagtttttaaaaaaaaaacaaaaaaacaaaaaaaccccaacccaagacaactgggcagtttagcaagatgggccagagtggtgtgatagagtcaggtggcccttagacctggcgctgaaagaggtgactgggcaggtttaggtagggtagagtagatttagctgctggttttaaagcaagaccccgggaggatgggtctagaatgatttttcttcctccagctttcctcgatgttgtctgccatatggaggcccgggccagatgcctgagacacccaggctgctcagggcccttccctgaagtctgtcccacttacagacaggtcttgttgtgagaccaaaggcaaggctcccaactggattgggctttgaaaggaatgaagagaatgcgaggtgtaccaggagtgctcagtgacttggaaaatgaggacccgcattgatgggtggatttctcagaaagatgttgaaatcagtctcaccccagggaggttcatgctggctgatggcctgcaaatggacctaggctgttcttacccttttcccatccagaacttatctttcccaagtgccagggttcctctaccaccagctgaatgtagtcagagccacgggcatctgtgcaaaacctcaggccagaacacctctgacccatgcatccctctgcttcctctcagcagccaattgaccttttgtttgaagacaatgtccaagtggctgctgggctgactctgcaagtggagatgccctgggggtggggggcacccagcagctacccaggctggttcattgtctaaccctctgagactcagttcctcaccggtaaacagaacattagtcctggaaaaggtgaactgtgtttaagggcctagaccagtcctgagcaaatgtattccatgtggccctgaggaggatccaaaagggcttgggttataatggatgggctctaataaaatgcaaatatttaaactaagggggggggagcatgagtgaaaccaagaataaatccaacataattgcagtaattacacccggagccaagccttgagggagcagagcattcactgaggtaaggcaggagagacatctcagggtgtggcataggcctttgctgaacctccgcctgcaatggaccgggcagtattgtctggacatcttgttaaaatatagattcaattcaacagatgcagggtgggccagataatctgtcctaactgctctagggtagactgctcgctgtttggtaatttcccaactgtacaggaggggctgagagcccaccaggctcagggagctgtgcaaagcaggtggttgaacaggggacaaagtagacccctattggctgctgtctctgccccagactgaagtcccatgtgatcacaagctgaattaatagagaagaaaggctttagaaggcttttcatgcccagatcccatttatcactctagtatatgggagagcatgatttgacacccccagagcccttggcatcctgtgatacaggagaactagagagccctcctgctctctgtatctgcctggaaggggtttctggggcaaatctgcctgggcaggagagggccatatatgggtcaggggccaagtgggccccaaccatgtttccaggatcgatcagaggaagtggccagtaggttgtctaaagcaaagtgacactcaccctccatgccagcaacagatgtcctcaaggtgcccaggacagactggtctagggcagcccatggaccagccagactcagagcatggagctgtgagccagccaggggcatagttcacctatggcaactttcgtgatgacacctactagggggacctgggagggaaaatggctcattaaagttgaactttggagttaactgaacatttaaaccagttaattaacaagcaaggactgtttccctcacaaaccaggtagagatggtgggaacagctgtcattgctccctgggtagaacagatacgtttcagcagaggcaacccaatctatagaggctgtcctcacagccactgcacgaagctcagccccacgctgcctcaatggatcaaagatgcaagaacaggagactggatttactaatgtggggagcactgggggttcccttagaaaggagaaaacagcagtatccaggagaggcagaaacattccagctggccgaggggaagggctatgagatgggctaagggaagcagggatgtggctcagtggttgagtgttttagtagcctactggaatccctgggtttgatccttaacaacacacacacacacacttcaagttcatgtccccagtgacctaacttccttccactccttcctttttgtttgcttatcttttgagacagggtttctctgggtagccctggctgtgctggaagttgttctgtagaccaggctggcccagaactcacagagatcttcctgcctctgcctccccaatgctgggattaaaggcatcccacccaccaccctttaataataccatgatctgggggcttggagagatggctcagtggttaagagcactgactgctcttccagaggtcctgagttcaattcccagcaaccacatggtggctcacaaccatctgtaatggatctgatgccctcttctggtgtgtctgaagacagctacagtgtactcacaaaaagtaaataaataatcatcatagtgatgatgacgataataataataataatacaatgagcagggaggaagcctttagcacatgagccttaagggaattgttcaggtgcaaactgaagcaatggcttgagagtgttcaaagcacttgtaatttctcaatgtgctgttctgttcttggccctggggagacagaccagtaatggagcctgtcagtgtgggggctgtagagcatcctggggagggctagctgccctgggtattggggatgctgttttcagggacctatattcttttgctctcttctcccggcccctcccccaatacaaattgtaagcgacgcacacatgcatgttgacatgtctgcccttgaaacatgctgtgcaagaggacaggaggtatcgggtgctggaaacgggacagcttggaacgctctggagtctcttgtgagggtgtggcttaattaggacgaccttcaggtgtcctgctgtagatttgctgtggcagtggttagctcttactttgcagtagggacttaggggtgtgggagggctacaaaagtcacacagagccagagagcccggcacctgaaaagcagtcactctgaggctcctggctgttctcctccatcacacagggcaggattaattattaatgtttacgatcccatagaagctggtctctgtgaaccacaagcctaacacttcttttccaacctccaaccacttaatcatggttttggctgggtcagcgtaacagccccataacctcggaaacagagtgctgtgaagtcctttatctgctgttcctgggggcaagggccaagttcactgggtgcagctggcggcatgggagctgataatgctctcgaagaaacccagatgtctttgttgcctttcagagctgggcctcatcacgcccctttcccggtgtgagtcttcccttcccttcttgttgcttagctgcggtcggcagagccttttcacacacacagtctcagtagctccctaacaaggctgcaacaggcctagacgaattctgttctcatacagaaaataaagatgcagagagctaagatcactgacacccaagaactccaggcatcccagtgttaaggcaggacgctggtttacagactttagtgtgctcgggactgtccatgacttccttgaaagggtcagtgggtggatttttctggtagcctacagacttcatcagactcttcacatctgagtcaggagaagtggttgctttcaaatcagcacaaagacttaccatgcctaccgatggtgccacctgctgggttctcagattggatggtagagtcatggccaagggtgtggccaccctggggaccttgctgctcttgaccatggaagactccagacggcaagcagcaagcctggagacctgaagttgaccccacactgtctttggggagcacaggcggcttccatggcagagagagatacacatatgacaccaccacaggtttgttagatcacaaggaattaaccactctgaaatgagaagtagccatactttcatagcacgcctgcaccatgctaacccatccattgtgttgcaaaaaagattcccctgacagtgacaactcagacgagtgaagatgtagggagtgtgaagcactcacaaaatccacattcaactgactgtagagcacatcatggtgtattcattaatactgaaatatccagtttgtcttgtctgtgtctgcatgtgtgtgtgtgtgtgtgcacacgtttgtgtatgtgtgtgtgcaagagtgtgcgtgtgcctgctcgtgtgtgtgtgtctttgtgtgtgcatgagtgtgtgtgtctgtgtgtgtgcatatgtctgtgtgcatgcacatatgtgtttgtgcgtgtgtgtatgtgtgtgtgtttatgtgtgtctgtgtaattagggcagaaaagtgccattcagcagtagagtgctctcctagcacacatacagacttgggctccatctcccaagcctgtgcagcatggcttacaactggtggctgcttggagcaggccccttttcaggctctgcctggggctaatctggagacaggtggggatggcttgctgcaaaccagctaaagtgacagtgttaccattccagggctcgaggaaactgtgagagtccaaagtctccggtgtcacgagccctgatgtcaaagattccctcagccagagcccagcttcccagaaacctcccaaacaatcagcgataggcaaattagctacaagaagctggctggcagccagcttggggctggatgccaggcctgagtggaatggacccaggagacttctgcccccggtggcctatgaggtcagctcctctcctcagcagatgctacacaaagtgtaggcacaggtagctagatcacttgaggctagccaaggctgctcagggataagctgggctgaacaagctatgcctcagcctggggcaggtccccagcaccttggcctccgaggacgcccagtacaagcttggtacatcctctgacatttagacagcagaactcacacaaggcaccttatatggccatgtggggcagcgagtgacctctctacatgccgccctgttttcactctgggctgtggtttatgagggagcatgtgaggacagcctctcaggtgggaagacagtggaggaagccacagggcagccagtggactttgagctggggctgtgtctcaggtgtaggtgcctagtctctcatcttccccataggggctgaggtttcctctagtctgtagttgaggaaacaggcttagagtcaaccagttaaaccctggctgggacgtttcgagctgaaggtagtaagactcgaagccacatgtatgagccacatgttaggctgcttgcccggctctctgtcattatgggacagttgtcacggatctgccactgaaaccccaggccagttcttgggcccagtgtcccccatcacccctgtcttgcttctttaagcacattcccagggcctctctgttctctcaggagttggtctttgagaacatggccatagccctcttgagcaggggtggcatatgacttgtccacaacacagactctccgagcccacacccacctagaaaaccaggtggatttggaagtcagcgtttaagaggaagagcttgtggggctagggctcagttggtagagtgtttgcttaacaaacacacggctccccagcatgatgtaaatcaggtgtccatgtggaacacgtgtctgtaatcccagcacgcaggaggctgaggcaggaggattggaagtctgtaggagtgacgataactaaggactcctcgccattctcttgcttccctgggcaccacctgagctggagggaggtcaggcttgacctttcatctccttgtgactttctgagccagttttccaagccactctcatctcaccacggagacccgaactggggcacagtctctttgacttgaagaaaatggaacgtattattgggatttttagaattcttcaatgagttgtcacaggaaaatgcttcgctgtggacttggtgtgagactggatgctgagatgatatccgctgcatcagctgggagggtagtgaagtctgcatgtcccagctgccccagcaaagaggcctcttcctcccacaattcactgcgcgcaacagggctttccgagaaggaaggctcacctgattggcttcactgcatggtgcctcacttccgagtgcgcatgtctacatcctgatgtctcctcaaccctggagattgaagcagcccgggaacagcctgcactgccggctctggaaaacgctggggactgggatctactggctttgttttttatgctgaatcagttttgaaacattctgccttggtttttttcctattactttgataaaaccccacgaccaaaagcaacttgggggaagaaacggtttatttcatttacaactctcaggccacactctaccactaaagaagtcagggctggaactcaaggcagagactgaagcagaggccgtggaggggcactgcttagcggcttgttcacgatagctcgtttgcctgctttattccacaccccggaccccagcccagtggtggtaccctctcacagtgatctgggctttccatatcagtcaccaatcaagacgggtcaatcttgtgggagtaattttctcaattgatgtcccctcttcccaaatgactctagctttatgtcaacttgggggaaaaaagaaaagaaaaggaaggaaaagaaaagaaaagacccccagctcacctctttctctcttcccagtaa

SEQ ID NO: 1493 - DNA, 3130 bp, Mus musculus
cgggtttcggcgcggttggcctgcagcgggcgagcctgggctccgagcggcgcggtggtgtggttgccagggtggccgctcgccatgccgtcccgggtggaggactacgaggtgctgcacagcatcggcaccggctcctacggccgctgtcagaagattcggaggaagagcgacggcaagatcctggtgtggaaagagcttgactatggctccatgacggaggtggagaagcagatgcttgtgtctgaagtgaacttgcttcgggagctgaaacatccaaacatcgtccgttactatgatcgcattattgaccgaaccaacacaaccctgtacatcgtaatggaatactgtgagggaggggacctggctagtgtcatttcaaaggggaccaaggatagacagtacttggaagaagagtttgtccttcgagtgatgactcagttgacgctggccctgaaagagtgtcacagaaggagcgatggtggccacactgtgcttcaccgggacctgaagccagccaatgtcttcctggacagcaaacacaatgtcaagctgggggactttggactagctagaatattaaatcacgacacgagttttgcaaaaacgtttgttggcacaccctattacatgtctcctgaacagatgagctgcttatcctacaacgagaagtcggacatctggtccttggcctgcctcctgtatgagctgtgtgcactaatgcctccctttacagctttcaaccaaaaagagctagctgggaaaatcagggaagggaggttcaggcgcatcccctaccgctactctgatggcttgaatgacctcatcactcggatgctgtttctcaaggactaccatcgaccttcagtggaagaaattctggagagccctttgatagcagacatggttgcagaagagcaaaggagaaatctggagaggagaggacggcgctcaggcgagccttcgaagctgccggactccagccctgtgctgagcgagctcaagttgaaggaaagccaactgcaggatcgagagcaagcactcagagctcgggaggacattctggagcagaaggaacgtgaactttgtattcgagagagacttgcagaggacaaactggccagagccgagagcctgatgaagaactacagcctgctgaaggagcacaggctcctatgtctggctggtggcccagaacttgatcttccatcctcagccatgaagaagaaggttcatttccacggggaaagcaaagagaacaccgcaaggagtgagaattctgagagctaccttgccaagtccaagtgcagggacctgaagaagaggcttcatgctgcccagctgcgggctcaagccctggctgatattgaaaaaaactaccagctaaagagcaggcagatcctgggcatgcgctaggccggcaaggcatggagctgggtcagtgttgatactgacaacccactagagattggtattcagctgctgtcgttttgtgtgtctggttctgtgggcaggaacctttgtgtgtggtgagctcgtggcattgcttgtggtctgcaaatggatgtgtgtgtctgcttcctaatgtccctgtgtgaaaagcaagctgtctttgctggttggttgggcttttgatcctgtgtgtgattactacttggaatatgagatggggcactatagatactatagatcttaggagaaaataatgttagggaaagaatatttaacctggagggctcagagaggctcacacgctgagtgataccgccttcactgtggcttccaagtgaggcctcagcgggtccatgacctcactgctaacgggatgcgtatggcagggcccacagggttgcatgtcagaggtgttgtaatgttacagggaggagacccagcctctggcctgacctccctgatgagaaggcactcaccaggattcccattccaggaaggtcctctgtgccagttaacatcagattagaagtggaggggaggggaggccgaggcctgaagcttttaggatttgccttagggaagcgcgtgccatggccctcagcacgctgctgtcctgcatcctaggcaggcactggggacaggaggctctgggagccctgagagccccctcctgctgtgtgcagggcctgtccccgtctgtctgtatctgacctctaggtcagttgatgacattagttaagtgtttctgtacctacaagtataagccaaaaggtcggaaatgcctcagagtcacacatgtggtccccaaacatttaatttctgaagagaactgtcttcagaaagttggtctatttaggtgactggggaaaaggcaggtttcctttgctctctgtccacagtcccttgagatggcttcagaagagaacagtgttcagtgtgcgttattgagggccctgtatgccctccacctgtgtgagggccagattgctgtttgtctacggtttcttgaagacctcagctcagcagaaaggagttcatttgccctaacaagtactgttggctgagaggggaggtcagaagcatgtaatgccattcgtttcatggctaaacacacagactccttgcattttaaaattctgtgcctttacttcctggagctataataacgtgcttgggtgtgtgacttgccgaggttggctttcgcaatgctttatgtaaactctgctgttggcacttgcagctgtagaagctgtcggagggattacttacttacggttatagcatctggggtctcttgcagctgcaatgcctgggatcttttgcaactctgactttttcagtagcagcttggaatgttaaaatatggtgagcctcttctctgtgaaggaagggcctgacaatctgccagcagggaaaagactgggaactcagtgcagtggttttcctgcctttcccttctcctttggtctatagtgatactgacagcaaacccaagtaaaatctgtgtaaaaaaaaatcctaagtatggggtcctaaatgttctgggaatttagaaaaaacttaattggattccattgtttataattaaccaatcatcttatttaaaattttcccaaataaaaaaaatctattttgtgggaaaaaaaaaaaaaaaaaaaaaaaaaaaaaaaaaaaaaaa

SEQ ID NO: 1494 - DNA, 1332 bp, Mus musculus
atgccgtcccgggtggaggactacgaggtgctgcacagcatcggcaccggctcctacggccgctgtcagaagattcggaggaagagcgacggcaagatcctggtgtggaaagagcttgactatggctccatgacggaggtggagaagcagatgcttgtgtctgaagtgaacttgcttcgggagctgaaacatccaaacatcgtccgttactatgatcgcattattgaccgaaccaacacaaccctgtacatcgtaatggaatactgtgagggaggggacctggctagtgtcatttcaaaggggaccaaggatagacagtacttggaagaagagtttgtccttcgagtgatgactcagttgacgctggccctgaaagagtgtcacagaaggagcgatggtggccacactgtgcttcaccgggacctgaagccagccaatgtcttcctggacagcaaacacaatgtcaagctgggggactttggactagctagaatattaaatcacgacacgagttttgcaaaaacgtttgttggcacaccctattacatgtctcctgaacagatgagctgcttatcctacaacgagaagtcggacatctggtccttggcctgcctcctgtatgagctgtgtgcactaatgcctccctttacagctttcaaccaaaaagagctagctgggaaaatcagggaagggaggttcaggcgcatcccctaccgctactctgatggcttgaatgacctcatcactcggatgctgtttctcaaggactaccatcgaccttcagtggaagaaattctggagagccctttgatagcagacatggttgcagaagagcaaaggagaaatctggagaggagaggacggcgctcaggcgagccttcgaagctgccggactccagccctgtgctgagcgagctcaagttgaaggaaagccaactgcaggatcgagagcaagcactcagagctcgggaggacattctggagcagaaggaacgtgaactttgtattcgagagagacttgcagaggacaaactggccagagccgagagcctgatgaagaactacagcctgctgaaggagcacaggctcctatgtctggctggtggcccagaacttgatcttccatcctcagccatgaagaagaaggttcatttccacggggaaagcaaagagaacaccgcaaggagtgagaattctgagagctaccttgccaagtccaagtgcagggacctgaagaagaggcttcatgctgcccagctgcgggctcaagccctggctgatattgaaaaaaactaccagctaaagagcaggcagatcctgggcatgcgctag

SEQ ID NO: 1495 - DNA, 32835 bp, Homo sapiens
cgccacacagcccttagcgtgttgcactgttgcagtggacaagctctccgggatctggcaaggatggtgaagtctggtcagaggctagatgccaggcctcacagcacagctatcacaacagaacctaaactggaaattgggtttttgctgttgtttttttaaaaatcccctgcatctttgttgttgttgttgttgtttgagacggagtctcgctctgtcgcccaggctggagtgcagtggtgcaatcttggctcactgcaacctctgccctctgggttcaagcgattctcctgcctaagcctcccgagtagctgggactacaggtgcccaccaccacacctggctaatttttgtatttttagtacagacggggtttcaccatattggtcaggctggtcttgaactcctgaccttgtgatctgcccccctcagcctcccaaagtaccaggattacaggtgtgagccactgcgcctggccaacatcttaaactaggtaagccacataagctagctttcaagatcttgaatctcgagtagatcccagctggtcttcagtttttatctgccactcaccaccctgagtcaaatacttaaggtctttgtgcctcaagtttctcattggtaaattcctatgggctgttgtgaaacagaataagatgatgcttacccagtgtctggcctgagagctcagtaaccagctgttctaagaactagaggaacaggctgtagctttaggctttcctttctgccctgggatgttctccctgtcaaaaacaacagcactgagactgctgtcctggtgggttccaccgaaggattaacactgaacagcaacaaaaaagggtgcgggctcttcctcctggaccgaatgcacactcgagtttgttgcaagtacctgagagctcattgcctgccttggctgtggaataggcccatgccggtgcttatgtctttctgttctatcccctgaaagtcaaaacaaaagtttcttgtcttgaggtaggaggtgggactcgactccagaggtggggcttggacaccagactagattgaggactagctaaaacagagccggggtgaaagcagctttgaatcagacatgcccaccactgagacatgtcaatttactgtagccatggcaacacctgggcattaccacccctttccatggtaatgacccaatgacccaaaagtgcctacccctcccctagaaatctctgcataaactgccccttaatctgcatgcagttaaaagtgggcataaatatgactgcaaaactgccctgagccgctactccctgcctaagttagccctcctccgcaggagcagtcatggagttgtaacactgcttcttcaataaagctttcttctacctctggcttgcccttgaattctttcctgggcaaagccaggaacccagcaggctacgctccactttcgaccttgcctgccctgtatcactgacttccttctgaaccctcctcacactaagcagatgctcagccacctgtcgccttttccccactcccttagcccttcccaaggtctgggctgggttgcattcagattggtgtgatcaccactttcatggtggcacagcttgcttggggaactcaccgatggcggataaggggaaggcgtgagttgtgacatgtcctataaggtactatgtcatgagcatggaatatgaaatcagctgcaggctgatgccatgtgggtggtgccctcctatgtcggggtgggaggcctcctgggcaggattctttttctcctggggcacaggaacaaggtgcaaacaggcagaagggcaggtcccacagctgctctggaaggctgaccaggctgtccacacacactctatcaacccccctcactatcttgtcccactgtaacttctgctggctggcttcagccccactcaacttgcaaatgctcttagggaggttgctatactctccaaatgaccaaacgagtgtttacaactctgcccttaccttatttgctctttctgcaacatctggcatcatggaccacttctgcattctggaaaccatttcttctatgggaacctgtgtgacaattttttccatattctctcctactcccctggatgcttcccttggtctccttcactgagttttcttcctctgcttgcacagaataacctccagggttccttcctttctcccttcctgctctgccactcttggggcatattcatcttcaaacgtggcttctgttatcacctcccagctctctgtctctggcctagaccaatctgttgagaccttgtatccaactgcgtgttggccagctagctcctcataggcctttggggctcaacatgaactcagtatcagctttacccaagctgctcctgccccagcatttcctcctgtggtgaactacgctaccatccatctggtcactcaagccaggaatttccctccgtttaccttatgtacagttgatcaccatgtctcatctaacccaccttccaggcatttctggactcccctcttcattcccacagccattgcctcagtttagccagtgtcatttccccagggttgctgcgatagcttcccacgctgtattcctatgccctgcattcactctttaccagagaagtctttctacagcacacatctagtagtgctcgtctgctcaaagcttccactgtgagtccatcaccttcagtagacttcctcaactcttgggtcttcctgctcacctgtccatccacctgtcttacaggtaacgaaccacaggtaccctttggtccaccaacccaacctgcagctcacagcaggcctccatgcttttacccacagtttcccttctcctaattccaactgctcctttagatgggattcaagtgtcacctccccaggaacatttgccctgacccccatgccctgccatctttatcagaatctgggtcctcctctttgcattttaggcaaagctctttcagagcaattatcatactacatagagagagctgatttacacagcagttccagtgaagttttggtgagaggggatggaatcacaacatttagagtaggaagggttcaacaacttcattttacagagcccagagaagggatgttgaaaagctaatgcagacatagctacttaacaaaaattgtcattcggggtcagaccaatgactaaacagcccagtgttccagtgaggtgaaatggattccctcggtcacataactcattaagacagaactaggccagacacggtgactcacgcctgtaatcctagcactttgggaggccaaggcaggaggatcacctgaggtcaggagttcaagatcagtcttgccaacatggtgaaaccccacctctactaaaaatacaaaaattagccgggcatggtggtgggtaactgtaatcccagctactcgggagactgaagcaggaggattgcttgaacccagaagacggaggctgcagtgagccaagatggcacccctgcactccagcctgggtgacagagtgagcaaacaaaccaacaaacacacaaagaagacagaactagaagagcctgggaacctggagctcaagctcactgctcctaccatcactgtgctgcccccgatggaaaaggtaggcgtgtcctctaaaacctcctaagtcccttagaaacacattatggtcctgtgcaaggtggttcaggctgctataataaaatactttagactgggtaatttatgaataacagaaacttatcgcttacagttctggaggctggaaagtccaaggtcaacgtgccagcagattcagtgtctgatgagagcccgtttctcatagatggcatgctctatgtgtcctcacatcatggtagggcaaacacatggcaaacaaactccctggggccttttgtattaatataagggcactaatcactcccccagaggctccacctcttaataccattaccttgggggttaggtttcaacatacgaatttagggaggtcacaagcattcagactctagcaggcctcaccgtccataattagttttaacatttgtcttatcacatttaggtgatgaatattcttagagataacaaatatcctgaatttacaagtaacaggaaaaaacatggaaaattatgaatgtctgtctttgtctgaaagtttatccttatattgaaaagaaatgtttttccctaatttgtacccttgggtataaattcaaaactattgccttttaaaatgtgatggagctcttaactaaacactgtttggtttcaaagataactttcttctcatcatatcctccagctgcctgccatttagctgaagctgtctctcagtctacatcttgtcctgtttatctcacgtggtatgtggctgttaagaacagtctgcctaacacctcattctttgttctagaacgtggttatttgttgagcatatagtatgtcatgcatcttttttttaaaagcatctcttagcttctgattgttataaacaaagaatctctccttttttctttctagaaatcttttttaatcactcgaaagaattgccataatccctgacttcaaattgcttcaagtaattgtggagataagacttatacacaaatgtcttgtctgattttaaatcctacacatgcaaatctggggatttcctgtagggacaggcggagtagtgctgccgcgcaggcgccagctcctcgtttattatgcagtgatgtacagccctctagtgggtctttaatgcaacataaaaaaacgaagctgagggcaatgaagtatggctttgttcattcatccattcatttgatgtacaagtgctgggttcctgctttgttccaggcacattttaggtgctgggaatactgcagtaaatcaaacaaacagcaacaaaatcagatacattagttactggagactaagaagatggagaggagaacaaatttgggatgaagatcaggaacttgatttttggcacattaagtctgggatgctcattaatcttcaagtagcttcttttaaacattaattaggtgccggatgcagtggctcacacctgtaatcccagtactttgggaggccgaggcgggtggttcacttgaggtcaggagtttgagaccagcctggtcaatatggtgaaaccctgtctctactaaaaatacaaaaattagccaggcatggtggcctgcacctatagtgccaactactcgggaggctgaggcaggagaatctgttgaactcgcgaggcggaggttgcagtgagccgagatggcgccactgcactccagcctgggtgacagagtgagactctatcacaaaaaaaaaaaaaaaaaaagaaaaagaaaattaaaattaaaattaatcaggccaggcgtggtggctcacgcctgaaatctcagcattttgggaggctgagaggcttgagcccgggagttcaagataagcctaggcaacttagtgagacctcatccctacaaaaagttaaaacaattggctaggcatggtgatgtgcaccggtgatcccagctaactcaggaggctgaagtgggaggattgctttaagcccaggaggttgagactgcagtgagctgtgatcgtgccactgcactccagcctgggccatagagtgataccctgtctcaaaaaataataataatagcaatcagtgtctctatggacatgtacagagtgcctgtgggagaaaatgcaagtgcaaatactctcttatttgagatttcaccaaatttaaatgaaaactgacaacatgagcacagttagcaagaaaagtgtgaagacagtgaattagaccatgggtgtggggagagtggttatcgagaagttcaagggttggccccactcttatagagttgctcatcttctttctctgtttaaatggaatcatctcagttcttcgtttgttttcttcttaattcttgccacaatttgtcacagtggagtttctctgtgtacttaggttacatccatctcttccacctacaggactatatgtctgtcctattcactgtggtatcctcagcatctggcacctgactcagcctctatttatacttgttggaggatgaattttccatttaataaggcagagaagatacatgcacatgagaagctagtaatatggcctagtataattctaaatgagtaaaaacacagttgattactcttaagagtaattagaagatagatcatagtgggttgaagtcaatcaggaaaaatttcagagaagaaattgggcatgagctgagacttaaagaatggatggaatatgaaggaaaaaggaaagaagttataggggaaaggatgttccctgtaacctgtccctgtttgactcccacatgcttctcatctcccagtgtctctttctattctggtgtctagtggtctctgctgggctgtcctgccctcactcatgatgcgggctaactctggccaacctttagggtttgtcatgtgagtgattcctatgctaccctttttttttttcttttttttgagacggagtcttgctctgtcgcccaggctggagtgcagtggcgcgatctcggctcactgcaagctccgcctcccgggttcacgccattctcctgcctcagcctccccagtaactgggactgcaggcgcctgccaccacacccagctaatttttttgtatttttagtagaggctgggtttcaccatgttagccaggatggtctcgatctcctgacctcatgatccgcccaccttggcctcccaaagtgctgggattacaggcttgagccaccgtgcccggactttttttttttttttttttttttttttgagacagggtctcggtctgttgagcaggctggagtgtggtagtgcaatcttggctcactgcaacctctgcctcccaagttcaagcgattctcctgcctcagccacccaagtagctgggactacagacgtgccaccacacccagctatttttgtatttttagtaaaggcagggtttcaccatactggccacacccagctaatttttgtatttttagtagaggcggggtttcaccttattggccacgctggtcttgaactcctgacctcaggtgatccgcctgcctcggcctcccaaaaggctgggattacaggcatgagacaccacacccagcctcctgtgctactctttattattgtctttggggctccactgtctttttttaaatgaaaagccagcatgtcaatacctatcatacctgggccatagcaagtgctcaataaatacttgttaaatgagcatatgtgcgtaggagccacattccatactcttgggatggctcctttccagatatttcgtctctgcctagagctggggcatttggcaattgagtacttgagggcccactcaaaatccttgcataattattaataaggggctttcgcagatttttatttaacgaagctttattgcatgccttctctattacaggacttatgctggctataagcagttcggagttcagctactgtgagagccatgtaaacaaataatgataagttttgatttatgtataaagtggtctatgaacactgtagatggaggattgactgtccaagtacgccagagaggcttctcagattacaggagaaaaagttggaattgaatcttgaaggacacgttatgtcctctgggcagacatgactggagtggataagggagtgggttggacagtattctggacaaatgcaatcacaggtgcaaagatggtggtggtggtgaggaactgagaaagtgtgcgtttagagcaaaagcagaagtggccagagagaaggtgcaggactggatttggggcaggataaccaaacggctcattttttttttttttttttttcttgagacggagtctcactctgttgcctaggctggagtgcagtggtgtgatctccactcactgcaacctctgccacctgggttcaagcgattcttctgcctcagcctcccgagtagctgggattacaggtgcctgccattgtgtctaatttttgtatttttagtagagacggggttcaccatgttggccgggctgatcttgaactcctgacctcgtaatccacccgccttgacctcccaacgtgctgggattacaggtgtgagccaccgtgcccggccagggctctgtcttatacagtttcatgttgctataataggatgccacagactggacaatttataaacaatagtttatttggctcacggttctggaagctaggaagtccaagatcaaggggtagcatctggcagcagccttttctctgggtcataaaatagcagaaggcatcacatggtaagagaaacagcaagggaaagccaaactcatttttataaccaaccgactctcaagataacccactcctgtgattacgttaatccattcgtgaggggtagccctcataacccaatcaatttaaaggtctcacctcttaacacttttgcattaagaataaagtttccaacacatgaactttgggggatacattcaaaccacagcaagctctatggataccaatctgtaagaggcacaaaaataaaaaaatgatgctaattaacacagccacttgcagtgccttacataacttttgaaacctaaattggtcctattcccctgaggtaagacagtgcccttgaatgttaatttaaaaattctcctggttggcaattccaattatcttatgttatattcagggcatgtaataagtcccttatttttacataaagagcttttaaattcttattaatagaaaatcaggtgtcttttaatcctttgctgaacagatatttaaagaaaactggcctgttcatgcatttccaaattattagctttctggtaatttacatattcctctaacaagccctggatggaggcctctaagtcctccttccctggtaaacatggggctgttcatttggctgggtaagctgagaacgttggtgtgtgggtgcgtaaaagagaatctgtgttcaatgaagtattgtcgatagggttaattgtgtatttggcacacataaacgggacaagacgtgtaaagtacttggtaggagagcgacagtatttctccttttttttttttttttggagactgggtgtcactctgtcgcccaggctggagtgcagtggcgcacggctcactgtaacctctgcctcccaggttcaagcaattcctcatgcctcagcctcccaagaagctgggattacaggcctgcaaccccatgctctgttactttttttttttttttttcatttttagtagagacggggtttcgccatgttggccaggctggtcttgaactcttggcctcgagcaatccgcccgcctcggcctcccaaagtgctaggattataggcgtgagccacagcgcccggcctaattttcgtattttcagtagagacgaggtttgccctgttgcccaggctggtctgaactcctgggctcaagcgacccacccacctcggcttcccaaagtgctagggttacgggcgagcgtgagtcaccgcgcccacccgggagtctgtatttctaatttgtattcagctctcagcatatcctcaacgtgaccccacccaggttcagggtactggaacctgagcgaggaaggcgtgtgccggggagagtaggtagtgtgaggggccagagtgcaaaggtcagaaggcatctggtggaagcggtgtgcaaagaagcctgaggggaggtccttagatctcggttaccttggcgatctctatcagagggttagagttgccgagaggcgccagctgccgcttcctctctcccgccctccgtttggcttagctcgccgggttctcccacaggttaaaagcagacgccgacgcggttgcctagtgacacttttcccaaaatgcctagggtattgttgtgttcttcttagccaatgagagaggcgaagcggcccaccgcctgccaatagactgcgagatcagggcccgcgacggttaaacggggcccaaggcaggggtggcgggtcagtgctgctcgggggcttctccatccaggtccctggagttcctggtccctggagctccgcacttggcggcgcaacctgcgtgaggcagcgcgactctggcgactggccggccatgccttcccgggctgaggactatgaagtgttgtacaccattggcacaggctcctacggccgctgccagaagatccggaggaagagtgatggcaaggtgagcgtgggacctaccctgcgcctgcccctgcttaggtttcgtcgcctcggggcgagcgccctgcgccaccgaagggaaccgacagggctgaggaaatgggtgcccggaagactaaaccgtctttcctgggtctgcatctgacagcctgtcctgggtggcttaaaggatgggagaccgcttcttttgatatatgtatttccatcttttcccgtttctctccccatttctctctttctcctgctttggcttgctaaggaccttccattggtgacaggtaactaattcctgagctgtttttagagctctaagagtggccctctcaggcacaagaaaggggcaggactaccagaacccgaagctttgtatctgcagtcagactccctcaaaatatccattattaggattattggattcatatttcccaatgtatataggtagaacttttacagaaagtaacattggacaggaaactgcctggctgctgatggagggatctttaccaaggtgtctcatcctgggaaaacacgactggggtggaatggggcagggactttgaccaccttcaccccaattttgactatagtaccttttagccaacttcccactaaccaactgagggtaggggttgggggagtcctcatgtgcctcattcccgtttgtctccccacaacatacatttactgcttagaactggaggaagattatggaagtaaactcacagctccttaagttcattgaactaaattagataatgaccttgattgtaggatataattaaaagggaggtaatttgttaaatcttggaactttcattctttgtttttgagcataatgagttcattcataccttggaaattcttatttcagatattagtttggaaagaacttgactatggctccatgacagaagctgagaaacagatgcttgtttctgaagtgaatttgcttcgtgaactgaaacatccaaacatcgttcgttactatgatcggattattgaccggaccaatacaacactgtacattgtaatggaatattgtgaaggaggggatctggctagtgtaattacaaagggaaccaaggaaaggtaagcataatcttttaaaaatgtaagctgaaattggtctagtttcatttattttaagcatcttgttttaggatcagtaatatggaagagtgtatttgtatttgtttggtaggtccacagtactttagaaaattcctggtgaatcaacacccatattttatatcaaaataacaatttataggctgagtgtggtggctcacacctgtaatcccaacactttgggaggccgatgcgggaggatcacttgagcccaggatttcaagaccagcctgggcaacatagtgggaccctgtttctacaaaaattagccaggtatagtgacatgtgcctgtagtccaagctacttgggaggctaaggcaagaggattgcttgagcctgggaggtcgaggctgcagtgagccatgatcgtgccactgcattccagcctgggtgacagagtaagaccctgtctcaaaaaatataaataaataaataaataaattccctatttgtacactggataatttatatcatcccatcttggcaatgatttttttagaagttatatgctgtataactgctttggttttaggcaatacttagatgaagagtttgttcttcgagtgatgactcagttgactctggccctgaaggaatgccacagacgaagtgatggtggtcataccgtattgcatcgggatctgaaaccagccaatgttttcctggatggcaagcaaaacgtcaagcttggagactttgggctagctagaatattaaaccatgacacgagttttgcaaaaacatttgttggcacaccttattacatgtctcctgtaagtatttcagaatttagctactttttaaaacatcttttatttttgttttcttgtttgtttgtttttgagacagagtctcgctctgttgcccaggctggagtgcagtggtgcgatctgggctcactgcaatctctgcctcccaggttcaaaggattctcctgcatcagcctcctaagtagagtagctgggactacaggtgcatgtcactatgcctggctaatttttgtatgtttagtagagacagggtttcatcatgttgaccaggctggtctcgaactcctgacctcaagcgatctgctcacctcagtctcccaaagtgttgggattacaggcgtgagccaccatgcccagccaaaacatcttttaatgttaagcattctgaagcagggaaattgagttttctgttcgtttagtaatatctagtagccaagaattgaaaatactgttatatttttccacatggaccaccagaccaataaagtctatatcagtttttgtttgctgcatgagttatgtgcattaatgtaagtatgatgaagacagattcctagtctaaggtttgcgccgtttgtcatctctcactgggttcaattttttgagcattcatgcaaattaaagcatattcagttcaagcttttatggaatgactatgatgcattaaactcaaggattacaaaaatgaaatggattttgtccttgccctcaagagttgtttcccaatgtgtaggtcctagttatctgcatcagactcacttggagtgtttgtttaaaatgcagagttctgggtcccaaacccaaacccaaatccatcgagtgaatttcgatctctgggtgggttcttgaactctgtttttttttttttttaatattttactttttattttagactttgcatttaagaggctctgtaaatgattcttgtgtatgcagaatcagagctcaggaagtttgctcacttcagatagcatgtttttacaatgttaactttttgtacattttatttttttgttgcctatccctgaaatatcttgctgagtccactcaccaattacctctattgctggatattttgtttccaacatgtttcaccattcttagaagtactgctctgcatatctttgtatgaattattctttcttcctttttggttatttccttggagtgtagctcataaaatgaaattgctggggtaaatgtttatggctgttattagatattgtctgatggcttttaaaaagtttaagtcaattgtgatagcactaatgtgttagtatataacatctgaacagataaagatgaagaaatatttgttagtattttagtagttcacctttctaggattttccaaatatttataaattatgttaacagatcttactatagtataaaactttgtaaattaatgattttggttttgactaaaaatagccagaacagtaccattttctcactgtatcaaattccaaatagaatgtttttaacataaaggacaattatccagaagtggttcttgggaaatttgaaacctattcttttgttccttttccctcctgcccttgtaattagagtggttcagctttcctaaggcactgattgtcaaaaagtggcatcagactcaccagttggactttaaaacactaaccagccactagagattgcttctattccctctgttgagaataggagctctggtaggctgttgttactgtagatgtggaagaaaggcaaacaataaaataggtaaggataatattagttactactgtgatttatggagtggactaagacaaaatataaatggataattcaattagctatttatgtctatatccatttaaatgtggactagatacatattttgactattcttaaatttcctctagttcttttaaaatggtgtttcttaatttgccttgagagtagaagtctctcatattcacctctgtattgtcagtgcctagtctatactaagcactttcatttgtgaatggaaaatgagtgaatgaattatgtatgatggagtgtattggaacaagatcattgccttttttccattataaatttcaagataaagtataagctaaaaactttgaggttctgtttttatctcaggagtaatttaatgtgttttttaagtttcaaaacaaaataaactcttaacaccttccactttcttaccctttttccctgtataggaacaaatgaatcgcatgtcctacaatgagaaatcagatatctggtcattgggctgcttgctgtatgagttatgtgcattaatgtaagtatgatgaagacagattcctagtctaaggtttgtactgtttgtcacatttcactgggttcagttttttgagcctctgtgctaacgaaagtatattcaagtctgaaagaattgtaccctgggtaaaattaaggtagatagatgaacaggctaaaagaaactattcacaaattaaaactataagccatgaggctgggtcttgactgttcaagggtcttggctggttaggtgctttcttattagattgacacttagctcaagggagagcacataggtcaggcaggtaaggtaaagctactgtaaggatgtggaagaaatgaaacaagactcgggtagaggtctggggatctgtagagcagggaagagctccaattcttttcctttgttcttcttttcattttctttccctttgaaactattctgtagagcagtgattctcaactagggataagggaagcaaatttgcctcttatggggcatttgatgatgtttggataaatttttagttatcacagctggggagtgcttctggcatctagagggtagagggcagggaggctacaaaatacctataatgcacaggacagccccccacaacaaagaattatatgacctcaaatgtcaatagtgccaaggttgggaaacttacttataagaagaaaatcccagaagtagaaacttaaatacaaactggagcttaagctgtgcttttgatttagttcctattgtatattttcatttttacaatttgaaaatgtcttcgtcgtcttcttcttcttttttaaccctaggcctccatttacagcttttagccagaaagaactcgctgggaaaatcagagaaggcaaattcaggcgaattccataccgttactctgatgaattgaatgaaattattacgaggatgttaaacttaaaggtaaagatgataagatgatatattgtctgtttctagctgtcagttaagtgtcagagcatacattctctcttgtagatcaatggagactgaagaaacgttaaatatactttcttagctaaatttactgtgttaacacaagtgaaaacatatgtaaatttggcaaattgcacatccttgctggcccaccttctgcgctttctttatttctcctcccactctgtcatgctaacagatggtcggtagcaaggaaagattgcaaaaagaattcaaattctcgttccccttgtccttgcctacctcacagtggcaggtagtgagggaaggggccagaaataagagtttattactctgcctctagctctaattgagagattaaagaccagaagaaggggaggggtgatggagggcggacggaggacagctaaaaacagagggaaaatcaataaagagattatgtggaaaaactctggctatagaatggggaaggagatgttctggggaccaggctgacataagagaagaaggaaaatgccgtaggatcacagagaaggatacagatgaagtgacaggattgagagtcagtgagagagtatcttgctaaatgtagtttagaaatgcaagggcagtacttcccctaaaacagaccctagcaatgctaccaagccccagcacaagatgtgccaatcttcagggattgaaccttcttagaaaggtgaaaaggggaaaagggaaaaaaggtaagttaacatctgcattaccttgtggacccagaacctcatgagttaaaaccaccagtgaacttatttttccaagtgtttaagacctagccataaaggagtcctttcttttgtcttggaaacacatttttgtccttttattttaactgctgtcttaggaggactattctgttatgcaatctgactataatactgagtattttttccccaggattaccatcgaccttctgttgaagaaattcttgagaaccctttaatagcagatttggttgcagacgagcaaagaagaaatcttgagagaagagggcgacaattaggagagccagaaaaatcgcaggattccagccctgtattgagtgagctgaaactgaaggaaattcagttacaggagcgagagcgagctctcaaagcaagagaagaaagattggagcgtaagtctgaatgggggtcaaagcaaaggagaactaccaagtgggttattttgatgtgtctgaatatctctttgagcagaatattttatacatacagatcttattagaagcttttgaaaaatacttgagaaaccaaaatatgtattttagactttttaataatcaggcttgctggcaccttcatgttggacatctttctctgagatcagttgctagttatatattattgggccttaactgtgatggccctaatacgatagccttgtattttactctagagttacttttttctttttcgtctctactgtgaataccctaatgttttcccactgtaaaggaaggtcttaaaattgctgctttccataataaaaaaccatgacttttgtcttttgaaatggccactccaacagaattccaggtctaaaaccctacagtatgtagatgagatatgttcaggcaattcttttctttttttttaactttttatttttgaaaatgagatggggtctcactatattacccaggctggtcttgaactcctgagctcaagtgatcctcccatcttacctcccaaagtgctgggattataggtgtgacctaccacacctggtctgttcaggcagttcaatagagaatctagatacaagatattttaagtctataaataatactctggtgggtattaacattgacttatgagtattaactgattagatgctaatttagttttgatattgaaagtgtgtctactccaccaagatgagagctactcgcaagcatttagggttatgcaaggtagctacagagtgaggttcttcattttaacatcaggagacgagagatggggtcgtatttgtgacctgtcaccctcatgactcacctgattttacttctgcagctttatgcccaatccaggctttaaataatgaaatattgtatagtcctgtgagatatgcttactgtataggtacaacctatacttacttggaaacctctgtaaaaaataagaaagctttttcttataactttccccagtgtttcataatttcttttcttttttttttttgagatggaatttcactcttgttgcccaggctgaagtgcagtggcaccatcttggttcattgcaacctctacctcccgggttcaagcaattctcctgcctcagcctcctgagtagctgggattacaggcgcctgccaccatgcctggctaatttttgattttttagtagagatggggttttgccatgttgacctggctggtcttgaactcctgacatcaggtgatccacctgcctcggcctcccaaagtgttgggattacaggcgtgagccactgtgaccagccataatttcatatagcaactgaaatctgaatactttctgaatttggggccatgaataaatagtaacatttgttattaatactaatcctatgaactaccacctaactgaattgtgttttttttcttttgtttgggtgtggtcattcaaccagaagaaggagatttttgtactgtgaggccagatcatgccctgaaaattagctgttgcttatcttcagtgaagagcagagatagctttagttttttgttttcccaaatgagttactcccacaaaagatgaccaaaggttgaagctaactttgtatttgtttaaacaagtcctttcaagaaaatctaagataacatacagcctactaaaacactcaattaaaaactaacataatcaggttgactgaggcatagtgagaatcctttccccaaacattgcttatcagtatcaggcatgctagtagtgataagattgccaaatgtaaattgttttttagtcaaggtcagttgttaatttttttttctttgtccattctctttttaaagagaaagaacaggagctttgtgttcgtgagagactagcagaggacaaactggctagagcagaaaatctgttgaagaactacagcttgctaaaggaacggaagttcctgtctctggcaagtaatccaggtatgagaatcaacttggtcaacagaagctggtgctacaaatgaagaaatgtgcaccagtgttgctcccaaagtggcttaggtagcccttttcatttacaaatctcaaattttaagatggatttcattgaatatatgcatttcaatggaaacaaaattctgttatagcagtgatttatttcctgggttcatagacctgaggcaatgagtcatagaatttcatgtttgattttctttaccttatcaaactacatgtttagtaattgatacttatttttattatcattatttatttttttattttttttgagatggagtctcactctgtagcccaggctggagtgcagtggcacaatctcggctcactgcaagctctgcctcccgggttcacgccattcttctgcctcagcctcccaagtagctgggactacagacacccgccaccaagcccggctaatttttgtatttttagtagagacggggtttcaccgtgttagccaggatggtctcgatttcctgacctcgtgatccgcctgcctcggcctcccaatgtgctgggattacaggcatgagacaccgtgcccagccgatacttatttttaaaaattagggcatttacaaaactattgtatgtttcagatttcagagagataaactgcatttcaagtaaaaataaacattttaatattgccatgcctcatttttcatagaaagcatggcttaaaaggcatgataagccacctgcagaataggctgtcacgtttggatctttgctaacaccctttcaagttgaaagacatatttgttgaaatttgattgtttaatatctacatatgttctctgcatttccttctttatttaaagtctggtatatagatattcagctttctcagggccctgcctttgtgtggcattgtcccttcactctgccgcactgagatgtggttatcgtatataccagtgaaccattgtctaacattctccattttatagaaaccctcaatctaatttaatcgactctttaagattatgtaaaatgcaaactgtgaaacatctttttgcttgatttatgacacaaactaactgttaaaagttgttggtttcaaaaatcgagcatctgaattttcaataaaattcagagtttttataactcccttattccatgtaggacagcatatatgaaagctattattcccatctttaataaattgagatgtagtgtgatcaatttagtgagcattggcagcattttgtaaatggaacagacaaaaaaccctacttaagttagattgatgatcacaataactttgtagtgaataagtgatggaaagaaatgaaactactgatagaagtaaatgaaacaaggattatatgaaactttggcttcatctctgttaaaataccttcttttttcccaatattgcagtctaccatttcaatattataaaaatatttattctggcttttcatagattccacactgtcatccataaagacaaaatagacttaaatcatgattagggtgataaaatgaggagaaaattttacctggatgaatttcatgcatcaaacccattgcagagaattacttaagaccctgttggggatggctgttcggttaaagagtttatttacatttgccctgatagtctttgagcaaaagatgaaaatagctaagtaaggatgatgtgttttactttataggatacacagataagtatgggaatctacttatatgtgaatcatggcaaatatttaaaatgagccataggaatcaagtatccactggggcaagcagacattttagggtattgagtgctgaaagtagtgaacacatcagagctataagataagcatcatagcagtggggagcgggtaccattctgaactcaggacagttggaaatattctctccccatccttgggctataaaatccacacgtgaggaagccatcacaagtatattgaaatcatcacagcaagcagcagtgtcttttttaaaagctgttcttttcgtatttgatgaaatattcattcttctatttaatggaagaattttaaaaatgtttttaaaacactttctttcttataaaactgtcccattaagagccaagtgtggtgacgcacctatagtcccagctactctggggctcaggcaggaagatcacttaagccgaggcgtccaaggctgtagtgcactacagctgcacctgtgactagccactgcactccagcctggaaaacatggcaagaccccatctcagacaaaaacaaaaacaaaataaaactatcccattagtaagacaatgttgacttacaaatgtaaaggtatttgtggtaataagaaggtggatagagttgaaacagtggagataaggtctaaaagcaatccagtttgctttgaagcagaagcgacgtatgaagcgggaagtcacaggacccttggaaggcagtgcatctgtgtgccagcctttcctatttcttctgcctggagcactcttcatccagacagccctgtggcttcttacttcagaaatgctgtatgaggctttgtatcattacacccagcacccagcacccagcatgtccctgtttccagagctatttttcctaatagcacgtattaccatcaaatattccccaccagtacttgtttgtttgtgtttggtttatctcctcctactagaatagggcctttgtttggttcacagtggcccatcctatgagctcagtaaatattcgaacatatttcctttaacacaaaaaataaaaggattctagaatctgtaagcctccagcccccagtaattctgtcagcagttaatagtgttgccactttaagtaaatatgattattatttattttttccatgtaaagaatagtttacagtttttactactcttacttgatttaccttttccacactgaatttgtttagattttttggaaacagatttctcgtccattaagatgctttgaactaagtgttcttgaacatttaaccaaaactgtaggtgttctctatttaaaaaaaaaaaaaaaacaaagacagaaaaaaacctctgcttctacacttttctgtaggtaaggtgttctgcatagaatggcacttattttcaaggacagagataaataacattgatttccaaaagttttatgttgtccataatactcagtgtgtttaagagtaaaattgattgttggttgttaagagaataaaacttatgttccttgaattttggcacattccaatattattttttcaatgctgtggattaaaaggctgatttctgcaagtcctacacccctaacctcctatcccagagaaaataaaacaggcacctagatttcaaatgtgagccataagagcaaatactttttgataagtataagtatgaaggagttgaactctgttcaagtaactcagagccctttttctttttccttctaaagaacttcttaatcttccatcctcagtaattaagaagaaagttcatttcagtggggaaagtaaagagaacatcatgaggagtgagaattctgagagtcagctcacatctaagtccaagtgcaaggacctgaagaaaaggcttcacgctgcccagctgcgggctcaagccctgtcagatattgagaaaaattaccaactgaaaagcagacagatcctgggcatgcgctagccaggtagagagacacagagctgtgtacaggatgtaatattaccaacctttaaagactgatattcaaatgctgtagtgttgaatacttggttccatgagccatgcctttctgtatagtacacatgatatttcggaattggttttactgttcttcagcaactattgtacaaaatgttcacatttaatttttctttcttcttttaagaacatattataaaaagaatactttcttggttgggcttttaatcctgtgtgtgattactagtaggaacatgagatgtgacattctaaatcttgggagaaaaaataatgttaggaaaaaaatatttatgcaggaagagtagcactcactgaatagttttaaatgactgagtggtatgcttacaattgtcatgtctagatttaaattttaagtctgagattttaaatgtttttgagcttagaaaacccagttagatgcaatttggtcattaataccatgacatcttgcttataaatattccattgctctgtagttcaaatctgttagctttgtgaaaattcatcactgtgatgtttgtattctttttttttttctgtttaacagaatatgagctgtctgtcatttacctacttctttcccactaaataaaagaattcttcagtttccctgtagttatgtgtcttgcatttgttggtctcttagttgatgggagttgtgtttatgatttgtaggtcttcattgtagggtacagaaggaaacatggatctgatgctcaagggagtggcattccagtcctaaactgtatggcgctttacctcccatctcattaatccatgtatgtaagccagtggtccttaacagggtgattttgctcctcaagagacgtttggcaatgtctgggggcatttttgattgtcatgatttggggtagggtgctactggctgctagtgggtacaggccagggacactgtaaacattttacaatgcacaggacagctgctgacaacaaaatgtccatgggtttggatcataatcctgaatgatacaatctcaaatgcgaaaatcctgaaagaccaaaatccctaatgtcttaaatcccaaaagatcagaatccctaatgtgtgaacttccaaaatcacaatcctgaaagattaaaatcccagatgttaaaatcctgaaagccgaatttgaggttagggattagtgccgtttcagctgtatacaggataattgcatcatgttaggcagaactattaccttgttattgtcttcatttggaaattaagtatggtttaagagatgtggatggatatcgagttgataaggggtgaacttgttgatttatgtgtcaacttgactggattaaggaatccctagaaatctggtaaagcattattttagatgtgtctgtgagggtgtttccagaggaggttaatatgtgagtctcagtagactaggtggggaatatctttcctcaatgtttagtgttttgaagatcataaaagcgacttttcaggtgaaaagtacaagaaatctctcctgccaaattattcagttatgtacaaattctgctccttcatgaatagtgccacgcttgccttaaaaaaatgccctttgtcagagaataaaattcgacaagctgaacgaccttgtgaaccaaagacacttgctgatactgaggttcctccagtgttacaaaactcattaaccaaactgttcttggttagggatttgactgtcgaagaagatagactgcttatatttaccactaaatctaacagaaaaactatcgcatgttttcattttggctagtggacggcactttcaaaactatccctactggtttttatcaactatacatgattcatgcccctgttggttctgaagattctagaacttatctagtcatttaaacaattatttgaagatttgctgcactttgcagaagaaaatagctttcgattgaatccccaaaccataacaacagatttggaattaggtgtgatcaaagcttctaaaagtgaatttcaaagtgttaccaataaagtttgttttttttccattcagcccaatgcatttgatagaaaattagatgagtagataggccaggagatacagcaatgacaaaaacttcagtttagaagcaggaacccgcatccaggaatagagccctttgctcctccctcagaatgaatggagatcaaaaatcagatgcttatgcccaagaaaaacaggatttcattcagcacttctcccggattgttagggtgctgactgaggatgagatggggcacccagagacaggagatgctatcgcccagctcaaggaggtcctggagtacaatgccatcggaggcaagttatcaccggggtttgacggtgcttagcattccgggagctggtggagccaaggaaacaggatgctgatagtttccagcgggccctgatggtgggttggtgtgtggaactgctgcaagctttcttcctcgtggtagatgacatcacggattcatccctcacccactggggacagatctgctggtatcagaagctgggcgtgggtttggatgctgtcaatgatgctatgcttctggaagcatgtatctactgcctgctgaagctctgttgttgggagcagccctattacctgaacctgattgagctcttcctgcagagttcctatcagactgagattgggcagaccctggaccccatcacagcacccccagggcaatgtggatcttcgcagattcaaggaaaagaattacaaattgtcaagtacaagacagttttctactctttctaccttcctatagctgcagccatgcatatggcaggcattgatggtgagaaggcacacaccaatgccaagaagatcctgctggagatgggagagttctttaagattcaggatgatcactttgacctctttggggactccactgtgactgacaaagttggcactgccatctaggacaacaaatgcagctggctggtggttcagtgtctgcaatgggccactccaaaacagtaccagatcctgaaggagaattaggggcagaaggaggccaagaaggtggtccaggagaaggcactatatgaggagctagatctgctggccgtgttcttgcagtatgaggatgacagttacagccacagccacattatgggtctcattgaacagtatgcaatgcccctgctcccagccatctttctggggctggcgtgcaaaatctacaagcggaaaaagtgacctagagactgcaagggcagggagaggaggctctcaataaattactgtgtaaccttgaaaacaaaacaaaaaacttcagtttaaaaatgcactttccagctgggcgtggtggccaaggagggaggatctcttgaacttagaaatttcataacagcctgggcaatgtagtgagacactgtctctagaaataatttttttaaaagttagccaggtgtggcgtgtgcctgtggtcccagctacttgggaggctgaggcaggaggattgtctgagcccgggaggtggaggctgcagtgagctgtgatgaagccactgtactccagcctgggagacagagagagaccctgtctcttaaagggcaggtgggtggggggtgggggaagagtgtttccttgtgtacagtatgtattaagagatggggaaaaaatgtatcattcgcctgccttggaattccttccagctgatgacattctagaaacttttaatgaattaaagccacatttgcctgaagacgtcagcaaagttactgactgttttgaaaataaatatgtacatggtaggataagaaaatacacaatggtgttgctgtttgatcaccagtactgtttctgtcaaatctgtggcctaatgagtgcatgcagaacagatttctgagtacccaaaacaacacagaagcatgacacagaaaatagggaaatttagtagggaatgctcctgtcagtgtatatggaatcatagaagaatgccaggaagaacagcaccatgtagaaaatgaatgtgaacatattctccaagtagagccatgccctaaaagagaaaaagcagctattcctcatgatgcaagactttaaaatatagttaatgattgtggaggttggccagctcttatggactatctccatgcaattgcccataatccagtcctgtaatacacttttttgtatgtcaaattatcttttttttttctgttttatgtttttttttcactatttaaaattgttggcattcttttttacaatttgctatgctatataattcatcttcaaatcatttctgatactggaggcataatttgtgtagagacttagaaagttctgtttttttgcaaatttgactccatgaaagtacattgtcacagcattgactgtgtgtaagcattgttcctgtacataaaaacattgaagcatcctcagtaagtgaagaggtgtcctttttgtacatctgcatttgtgaaaggtaaaatgtttgaacatcttggctctttaggtggctgcatatgcagtagtgacccatcctgtttttgatagatctcatcaaaagaatcttaggttgttatggtatttcagatgaccaaaggcataaaactgggtgcacacatttaccaaccatggggatatgcatttacatttcccttcttgacctatttctttttttttctttcctttttttttttttttttttttttttttttgagatagagtctcactttgttgcccaggctggaatgcagtggtgtgatcacagctcaatgtagccttggcctcgtaggctcaagtaatcctcccacttcagcctcctgtgatggagtctcactgttttgcccaggatggtcttgaactcatgggctcaagcaatcctcccaccttggctgggattacaggtatgagccattgcgcccagcccctttatgacctatttctttatgaatatggcttgtctgttcattactgatataattatgcaactttcattagtatatatgaatgtttatgcttgcacaaaaatgtatgttattattgcctattttattgcataaagtgacctatgaagtgttctgtgttttcatatgtttctcaaataaattccctttaaaaatgtaaatacatgtaaatgtaaaaaaaaaagtaaataaatatcttttaaagaatttttaaattatattttccggaattacatttttggaattctgctctttcaggattatgattttcaggttttagactttatggattttgaccttttgggacttcagcattatgacattcgggattatggcattaaaaattgtatctcctgggactatgatcggctcccaatgtcaatagtgccacttttgagaaacctgatctaagctcaaacttgttgggacatatctcagccttgaaggaaagttattttggattttgatggatatttaaatatgtatatatctgacttttagtataaattagcagtctatgctgtgccttttcctttgtgagattttcctggcaatgctagtccttttagcttaatgaaataagaccaagttttaaagggttaataataaatgagaggaaatagctcctttatatatgtaggattattacacagctggcagcatagttccatcaagtacaaatgatactatccaaacacaatcagaaactgattaccagatctttaatcctaacagaatcaccttgacatgaatgttgagtataactcctggccagctataaaatttgcaagacctagtgcaaaatggtaatgcgggactcttgttcgaaaagcaggaaacaagtaccctgaaaggtacctacaatgcttttccctttcttccaaggtttctctctctctctttctctgcttattgtgatgttatttgctatttaatattctaagtaaagaaaaattaaaaatttaaatgattagcatgaattttaccatttatgtcgtgcaatgcagattttaaatgcaaatagcagagcattcagctgagatagggaatgaatttcacaattcatattttgtgactcttctctgagggtgcctcaagttgaccagaggagacagacacaccagaccctcaggcatctgggaacccctgactctgacacctgctcagttcccctttcctccagtcaccagacctatgcaatgccaggccaggaggagcagagcctggcatcttccttttgcacaggccaacggccccagcccatggcagtttggccacctccaaggatctttaaacctccaagctgggactttatacttggaccagggtacctcgatggcccttgtcaagacatggccaccagacatgccatggggctgccatgggggagaggggaaatggcttcagaacagctgctgccatgacctgcctggggatgcattggagcctagatactcaatgctgacccttcccttgcctgtgcccaggccccttctggtcatgggaaggggaggttgggtggggcccagtgcactagagggtagggaggggtctgagaatcatcctgggagtctatggggctgatgggaggtgggatcatgcatgaggggaggccctgagccaccacgcaggctcccattgtcccactggactccacttacaaaaggcaaattcaaagacacaagtagtagccaggcgtggtggctcgtgcttgtaatcccagcattttgggaggccgaggtggggtggatcacctgaggtcaggagtttgagaccagcctggccaacatggtgaaaccctgtctctactaaaaatataaaacaaattagctgggcttggtggtggacgcctgtaatctcagctactcaggaggctgaggaaggagaatctcttgaacctggaaggtggaggttgcagtgagccaagatcacaccactgcaccccagcctggttgacagagtgagactccgtctcaaaaataaataaataaataaataaatataaagatacaagtattaagaatttcaagacttcagcctcagagcactagactccaggtgccaggcccttcctaataccaggtttttctacatgtggggtcctgtatggctgtgcaggttactcggctgtgaaaccaccactttctctaggaaactcctttctaccttagaaaataatacgttttcttctcactttgaaacctgaggcatgctggacaacttctctaattttccccatcccagatttcacctttattttcattcatggcttaattcaaccaacaagcagttattgagcacccactatgagccaggcactgtttaaggtgctgaagatacagccatgaagaaacattgaaatccctgccctcactgcccccttcaaatggggcgtgacagtcagcaactaatcagccacagggcatgtcagcaataagcgttaaggagcagagcaaagtgggaaagaggagcaggagtgggggcttgcaatttcagaagaggtggtgatgaggggtgcagcaggaagaggaggagactaaccatagcaggttacagtggaggtgggggtggaggggaaaagcaaagggaatgggagacctgagcgggtccggagagaggaaagacagcagaccagtggtgggctagggggctggggaggggagcgggggtttgagtgaaactgggagaagcaatatggcaggacttggaaactgaggagacattttaaatctgatcatgaatcccctctccttgctcttaagctaacaaaaccttgtttccagttagtcgctgaagctgggaacgtctggggtatttgagcagtcatggtagcttagaagggggtccctttgatgggggcgtggagagcgggttccttccaaacgatgtttctccagcatcgcactgtaagatctttccaagatgttctgttagacactagcactgtacttaccattacacagtttacatgtttaaataataatgagttcaacccagcacaggcctactcacaggcgcttgaaaaagggtcactggatttgaatctgattaaccgactgtcctggccgacagaaccgcaaggtggcgccatggctctgctagagccgcagtcccaccctccccgactagcctgagcaactgggagttactgcgagagtctatgccgggcattggataaatgccttctccccattatttccttcaatccctacaatacccctgtgaagtaggtatcattcgaatcacattttacacggggaaactgagactcagagatcacagctccggagctcaggcttttggcaataaccctccactgcctgcctccgcaagacagcaaaaggttggctttgttccccaagtcatccagtttcccacagtgatgggttaagcgtcataacccatggctttatccaagccatttgaattgaagaggaaggtggacgcagagccagcatggttagggccagtggcctttccagacttgcgtgccaggagagatgggttagcgtgggggaggccggagaaggggttttcaagtgaccccggtaggacccccacgtctctctcccgcctttgctcagcatcatctatagcatggctttgcatttcctcaaaagcccaggccagatgcccagtaccttcaggcggtccagtgtcccccaccccctagagccatctcattcaggactgccctcccctgaaacgttttatgtttccagaagacccttctccttccagggcaaagccctttcagttaggcaagctagttccctcagtgacttaagataaggctgtcctcctaggctggacttgggctgaatgcaaaaggcgacacaaggcagctgtttaaaaaagaatgaagcaaatttatatgcaccaacaagaagagattattgctcattgtgacttggtggctgggaaaataaggatccctattagattgatggatttcacaccaaggaggaggatagaaccagccctcccagagggctgtgcttgctgcaggctagctgatgagacacgtggcttactttacccctcgctcagccccagcctcagcctccctccctctacacagggaagacagaggtcagctgctgagggcctcctcccatgcgaaaggttgcattccacccggcattcagaggggcaccctcgctaacctccatggaggcaccttgcttacatttctgacaccacagccacagcgacagctctggggccctacagctcccctcaagctgctgaaatcccagacaaccaaagctgctcatcccttgatgccctacgaccacccagccaggaaacaaatcccccctcctcccactgcctggactctgagacaatctctggccatcttgatgcaacagagtgttccataatcatagtcacacgttcacaggaagtgttcacagatgattcactctattaaaaaacaaaacaaaacaaaacagttaaatcatgaagtgacaacatcgttgtaaaaagttctaacaatatggaaagtatatatagtgaaaattaaaaggtaaacattcctcacccattagcctagtttctatctctgctttcggaagtagctattaacactttggtgtttggtggtcctttctagactctgtgtgtgtgtgtgtgtgtgtgtgtgtgtgtgttgcgggatggggatagagtgtctctgtgtatgggggtctgtgtgtgtgtctgagtggatccatctgagtatgtgtatttaaaacacacgtaggctgggtgtaatggctcacacctgtaatcccagcactatgggaggctgaggtgggcagatcacttgagctcagaagttcgagaccagcttaggcaactggtgaaacccaaaaatgcaaaaaattagctgggcgtggtggtgtgtgcctgtggtgccagctactcaggaggctgaagtggaaggattgcctgagcctgggaggtggagcctgcagtgagctatgattgcgccactgcattccagcctggcgacagagtgagacctcatctcaaaaacaacaacaacaacaacaaaaacacactgggaaaaataggatctgaatacatgcactattctttaattgtttttccaattaaaaagaatcctttcttgttggtttagataaataaacctttctttttcagacagctgccctgtgtcatcatttaccttcatcccaagttcattctagaaggcagcttaccttgagtcttcagggaactagcctgcctagatcagccagaaaggtggagagtcagcttccacctcaagaactcagggcctggcagccgagatgggcacacatctttgaagcccttacttattcccacaaagcagttaatcagctccagtcacagaatcaccggtcccagtgctatccttaagaatctcgtgcttaaggccaggctcggtggctcatgcctgtaatcccagcactttgggaggccgaggcgggtggatcacttgaggccaggagttcaagaccagcctggccaacatggtgaaatgccgtgtctactaaaaatacataaattagccaggcgtggtggtgcatgcctgtaatcccagctactcgggaggctgaggcaggagagtcacttgaacctgggagatggaggttgcagtgagccaagattgtgccactgcactccagcttgaccaacagactgaaactctgtctcaaa

SEQ ID NO: 1496 - DNA, 2119 bp, Homo sapiens
ggcacgagtaggggtggcgggtcagtgctgctcgggggcttctccatccaggtccctggagttcctggtccctggagctccgcacttggcgcgcaacctgcgtgaggcagcgcgactctggcgactggccggccatgccttcccgggctgaggactatgaagtgttgtacaccattggcacaggctcctacggccgctgccagaagatccggaggaagagtgatggcaagatattagtttggaaagaacttgactatggctccatgacagaagctgagaaacagatgcttgtttctgaagtgaatttgcttcgtgaactgaaacatccaaacatcgttcgttactatgatcggattattgaccggaccaatacaacactgtacattgtaatggaatattgtgaaggaggggatctggctagtgtaattacaaagggaaccaaggaaaggcaatacttagatgaagagtttgttcttcgagtgatgactcagttgactctggccctgaaggaatgccacagacgaagtgatggtggtcataccgtattgcatcgggatcttaaaccagccaatgttttcctggatggcaagcaaaacgtcaagcttggagactttgggctagctagaatattaaaccatgacacgagttttgcaaaaacatttgttggcacaccttattacatgtctcctgaacaaatgaatcgcatgtcctacaatgagaaatcagatatctggtcattgggctgcttgctgtatgagttatgtgcattaatgcctccatttacagcttttagccagaaagaactcgctgggaaaatcagagaaggcaaattcaggcgaattccataccgttactctgatgaattgaatgaaattattacgaggatgttaaacttaaaggattaccatcgaccttctgttgaagaaattcttgagaaccctttaatagcagatttggttgcagacgagcaaagaagaaatcttgagagaagagggcgacaattaggagagccagaaaaatcgcaggattccagccctgtattgagtgagctgaaactgaaggaaattcagttacaggagcgagagcgagctctcaaagcaagagaagaaagattggagcagaaagaacaggagctttgtgttcgtgagagactagcagaggacaaactggctagagcagaaaatctgttgaagaactacagcttgctaaaggaacggaagttcctgtctctggcaagtaatccagaacttcttaatcttccatcctcagtaattaagaagaaagttcatttcagtggggaaagtaaagagaacatcatgaggagtgagaattctgagagtcagctcacatctaagtccaagtgcaaggacctgaagaaaaggcttcacgctgcccagctgcgggctcaagccctgtcagatattgagaaaaattaccaactgaaaagcagacagatcctgggcatgcgctagccaggtagagagacacagagctgtgtacaggatgtaatattaccaacctttaaagactgatattcaaatgctgtagtgttgaatacttggccccatgagccatgcctttctgtatagtacacatgatatttcggaattggttttactgttcttcagcaactattgtacaaaatgttcacatttaatttttctttcttcttttaagaacatattataaaaagaatactttcttggttgggcttttaatcctgtgtgtgattactagtaggaacatgagatgtgacattctaaatcttgggagaaaaaataatattaggaaaaaaatatttatgcaggaagagtagcactcactgaatagttttaaatgactgagtggtatgcttacaattgtcatgtctagatttaaattttaagtctgagattttaaatgtttttgagcttagaaaacccagttagatgcaatttggtcattaataccatgacatcttgcttataaatattccattgctctgtagttcaaatctgttagctttgtgaaaattcatcactgtgatgtttgtattctttttttttttctgtttaacagaatatgagctgtctgtcatttacctacttctttcccactaaataaaagaattcttcagtta

SEQ ID NO: 1497 - DNA, 1338 bp, Homo sapiens
atgccttcccgggctgaggactatgaagtgttgtacaccattggcacaggctcctacggccgctgccagaagatccggaggaagagtgatggcaagatattagtttggaaagaacttgactatggctccatgacagaagctgagaaacagatgcttgtttctgaagtgaatttgcttcgtgaactgaaacatccaaacatcgttcgttactatgatcggattattgaccggaccaatacaacactgtacattgtaatggaatattgtgaaggaggggatctggctagtgtaattacaaagggaaccaaggaaaggcaatacttagatgaagagtttgttcttcgagtgatgactcagttgactctggccctgaaggaatgccacagacgaagtgatggtggtcataccgtattgcatcgggatcttaaaccagccaatgttttcctggatggcaagcaaaacgtcaagcttggagactttgggctagctagaatattaaaccatgacacgagttttgcaaaaacatttgttggcacaccttattacatgtctcctgaacaaatgaatcgcatgtcctacaatgagaaatcagatatctggtcattgggctgcttgctgtatgagttatgtgcattaatgcctccatttacagcttttagccagaaagaactcgctgggaaaatcagagaaggcaaattcaggcgaattccataccgttactctgatgaattgaatgaaattattacgaggatgttaaacttaaaggattaccatcgaccttctgttgaagaaattcttgagaaccctttaatagcagatttggttgcagacgagcaaagaagaaatcttgagagaagagggcgacaattaggagagccagaaaaatcgcaggattccagccctgtattgagtgagctgaaactgaaggaaattcagttacaggagcgagagcgagctctcaaagcaagagaagaaagattggagcagaaagaacaggagctttgtgttcgtgagagactagcagaggacaaactggctagagcagaaaatctgttgaagaactacagcttgctaaaggaacggaagttcctgtctctggcaagtaatccagaacttcttaatcttccatcctcagtaattaagaagaaagttcatttcagtggggaaagtaaagagaacatcatgaggagtgagaattctgagagtcagctcacatctaagtccaagtgcaaggacctgaagaaaaggcttcacgctgcccagctgcgggctcaagccctgtcagatattgagaaaaattaccaactgaaaagcagacagatcctgggcatgcgctag

SEQ ID NO: 1498 - DNA, 92880 bp, Mus musculus
  misc_feature (6406)..(7434): n = a, g, c, or t.
  misc_feature (7738)..(9069): n = a, g, c, or t.
  misc_feature (29342)..(29415): n = a, g, c, or t.
  misc_feature (49297)..(49316): n = a, g, c, or t.
  misc_feature (63491)..(63510): n = a, g, c, or t.
  misc_feature (77047)..(77066): n = a, g, c, or t.
tggtacttttgttgcaacttactgatgatgcaaaacgtatgtatgcctctcctgttttctgaataattctcaaagttagtagtcttcttttcaaccctacttcctgtgagatgcatgggtagatattacctcctgctacaaactgaaagattaaaggaccaaccgaagtccattcaagtgtataaactgtgttgggtttcaaatgcagaccttaggttgaaaattaagcaataggatagaaaaaaatctaatattgatgctattttatgaagtgtagcaaaatatcctttgcaccactttagaatgtgatgtgaagaacttacagattcggctgcccctttagaagcctgcatctgcctgtccatgtgttaaagtgccccctcacatgtgtctctttttaacactcatgcttaaatatagtttaagacactttagtaaagctcagctttgcttttacaagaaacaaaatgtgtataaatatgacctccaatttagcttcaaataaaatgaatacatacattaactaagtaaaggaggtgtaagatctaaaacggaagcagtgcctctcaaaactgagctgagcaacgccaccaacaaacggggcagactgagacaccatctaccagaggagcatgggagagaagagattaaatcagaaaaggaagaaagctaatgacataatggccagccacaaatgccacaaatgacaaacagtgtacgtaataatcgctgcaattattctgtgtgcttgctccagtgtctccaaacactgaaaacattagatctctgcttatggctacatgtatctaatatgtcagctggtgttttacctcctctttaatcccttattgcttcaagcaagttcttctaatagagaggatttaaccaggacaaacaccaatggttaatagacagaaagagaagctggtattttaagttgtttatgacgaaagaaaagaaaagggcaaaacaataaaaaaaaaaaaatacagggaagggaagatgtagcatcctcatgccacattttcaaatttccatgttaactctagaaaaagaaacatataccatagcagagctgattctaacagcttgaaatatttgtgtgaattttttataacaaacatgtcttctgtaaatagaaatattaaagcacacagaaatgggacattctagtttatctgggcttcctttgaaccccttatgtgtttctcaaagtcacaatgttcaagaggcatttactagctatgatggcttcaggtagttcggacagtgaacaagaaaagttgtgtcggattaccatatagctaatattttcaaaactattcattaacaagaaagcatatttatatttaacatcatagagttaatggaatgggtacaaaacaaaaaaaaatgcaagctgagccatgaaaaatgatcatagctggaggaaaataaattttaaagaagtgtctctttgtaagagaactcacatgataaccagtagcacaggtgggcctggaattgctatgtagagtctttccgtgaataagatcttttccaacaaaagtcacatcaattcatcccaataagtccaagttctgtagtcttggtgaaagactaagcactggtggccagcagtggtgaacacagagccaaggttcctccagacatttctctggctaccagctgagctctccaggctcttgtgttttccctcatgtgtgttttcatattaaggatgagacatgagtatgaaaagaagccattcttctatacaacctaaatggaaagatgctacaagtgatttcagtcaagcagtgtgcatggaagatgcttcaaaagatgagaaagaatcacaaacaagaagaaatctagtttgttctgtaagtgcttttgatatctttttctacttttttgaagaaccagagaaatttgacattaaaatgactaataattattaggggaatttgaaattaaatgactaatagttcttaatgataattgagtatataatatgcctcatgaattaatatacttcatatatagcaaacttgattaatctttgtaatttaagttgctattattttattctcactttacaagtggtcataactaacgtatagtgagttacagagcttgttcaacattaccctatatagatactggcattagtcccaatacactgtgagaatataccacccaggaaaaatgaaatagcactcataaaaatgttagacctttattctaaggtgaggcaactaaacgttcactgatggattttaggttttagaaaacaaagttttcaagttatccatcttgatggttctcttgctttcagtattaaataaataaccttattaagtttaacaaaagactaatcaccacttctagaaggctttgccttctataaagggcagacagaagatgatggacttagcagcaaaattggacttgtttcactgcaatagagagcccctgtatatgctgggtcaggatcctcatatgatttgattgatggttttgagggggatcacctgacccttttgttattgggttatttcaatgagaatgaagataattaaacagatgagcagaaatgaaaatatcaaaacattaagcgatatataaatgctttccttattcttcactcttgtctttcttcctttattgctgctgcttctgcttcttccttctccttcttctcttcttcttgttctcctctcctctgtctctgtctctgtcatctctctctgtctctctctgtgtctctctctgtctctctctctctctctctctctctctctctctctctctctctctctctgtgtgtgtgtgtgtgtgtgtgtgtgtgtgtgaggggtggggggtgcatgtatctgtgggatcacatggagaccaaaggaggattttgggtgtcctgctctatcactatcttattcccttaacagggtctctcattgtatcttgagcttaggtagagaccagcaagccccagtgagttttcctgtctctgtgtaagggggtggggtggggtggggaaaatttacaagcacctgatgccataacagaatttttatgtgggttctgtttgagcagaaagcattttactttctgagcaatctttgcagtccaaatgctacagaaatgtaaattgtgatttggttgcagctcaggcttattaatattttgtttgtcttaggacataatagtcaatacatattcatcaattcactcaattaacacccactgagcatcaattatacactgcataagaagtgttgaataggaagtctctgtctttcagtcttatattctagtagggagaaagaatataacaaaagttcacacaacaaatggactaccattctaacatgttaccaaattgtgcaggatattgtaaaattataatgtgttctagttgtttacgggtaaagtttggaaattaaaatccacacggataagcataaaaaatcttgagtagcattcataaactttgtgttaagtcatttagccaattcaacctcaagtaatattatgcccagatgattaattgactcagcattattatcataactctgtaaaatattaccttaaggctggtatatatgggcttctgttccagggacttaacataatgaaaaggatagatcaggtttttgctagatagagtctgaatatatcagttttattcctatctcctcttatgagataataaaatacattctctctgaggtagggatttatactgtctcttaccttgtaataatactaacttcctagagttattgatgagtaagtaccatgttaatgagttaagagtaatgtataaaaatattgaatagtgtctggtggacagatgcttaatagttattaactataataagaatcgtgttatcaaaatcttaaacttcatctgtgtacaatggacatttctctgttttaaaaaaaaactatttaatttctttgaaattcagtgcttaaattccatgagtgcttaagtctttcaagaattcataatgccccttcatgtaaattatgggatccatgaggaaaatctctcttaacattactggattccatccttaaccctgaggagctatgtgacattggatcaagttctgtaagttccagttcctcatgctgaaaaatcaagtcggactaacatgtcggacagttttatgtcaacttgatacaagttaaggtaagttaagtgaaagaaacctcagttaagaaaaatgcctccaagcccattgtggatggtgctttccctgagctgatgatcctggggtctataagaaagaaggcagagcaaaccagtaagcaatattccttcatggcttcaggattagctcctgcctccaaattcctgctgtttgaagtcgtgtccttactacttttaataatgaactgtttatatggaactgtgaatgaaataaaccctttcctccccatgttgctcttggttatggtgtttcatcacctcaatagtaaccttgactaagacaactagcgacatagttcattggcctagtgagtactttcctagaatataggatccccagtacttcccaagaagtataataaaatatctattttattcaacacttccagcaaactgagcagaagagtcaatgaatgttaagcaaattattttcataattatttttcttactgtgtagatatgattagttgttgagagtttaggctaatttttaaagcagtatggattaaagcatgagatgtttttctgttgaactaatagactaaggcatagttaggccactaaagagaaaaaactggaaaaattcctatttctgttcaatttaaaatatttggaactgaaatttaaaacttaaaatgaagtattcttctacattaagaattactaggcatgcaaaaaaaaggaaaaggaaaaatattaagtaggaattcttgtaaaatcataaattattcaaaaataaaagaacacctaccatttacaactcaaacatgcaagaaaaaaatgaagtagattcttttgatgagtaattcagttacttaggtctgtggtgtgaaagtatacataaaatgatatatgtgcacaattcttagttccttttaaaaagtgatcatcttcaagggtaagtatgagttttatttagaattgagtatcccccaacacgcacaaatacaaaagaatctctttgaagtctggggaccaaattcagaagatatctcatcccagtagttgagaaattagccagcaaggaaagccaagtcataggtctaagttctcaatgttcactatgaacctggttgacttggttctctcttcttaaaaggtttattgtttgtttgtttgtttgtttgtttcctttctttcttttttgttttcaacactaagtggttcaagggctcttcataactcctctcctggagaaggaggtccgcactgggatgggttttccttcttgaggtgtcaagcttcggctcctttgccaagatggcggccctggctcccatggaggtagcgattgtgcagcacctctggcccaggggccgtcttacagccacggcctacccgcgcaaagcggaagacacattgggcagcctttacattttccatccaagaaagggcgcctcggttttgaagctaaagagcacctctgccaaaatggtgaccgtgtggcgtcactgctctttaccaagatggcggcgagagacttccggcacgcgcttccccaatcagagatctccaagaggtcaggcagaggagaccgccctcggagtccaagtgctgcgcgatcggctgggggagagaatggggtggagccacggcagcctcagctccgatcagaagtgccaagcgctggcacctgtgggggagcaaaagttacttcctcgcaccccaaagcaacaccataacaccttactccccaacccccaggcccctaaaccgtagcgtgcggcgcgaggtagggggcacggtcccagagtcgccccagtctgcccaaaggggcgggcagcttaggggcaggtcccgcgcggcggctgcactgtcacccccacgcccctctcctgtcctagggggaccggccacgtgtttctcttggagacccggggctcgccctgggaacagctggagggagctaaacgctgacgttgtaaagatgcgtgttttgttttatttggaggggcagaggggtccctggaactcagaaagaaggcagagcgaggcactgagcctggagcagcaaatgtcaagatttgggggaggggcctccgcggggagcttggatgctggccccgaagggggtggaaggagaggtcaggagtttggggtaagaggagggcggacttcgccagcaacttactattccgtctgcaacttgcttctaggcctgcacacaccccctcccgccccgcaaggcttccttaatcacannnnnnnnnnnnnnnnnnnnnnnnnnnnnnnnnnnnnnnnnnnnnnnnnnnnnnnnnnnnnnnnnnnnnnnnnnnnnnnnnnnnnnnnnnnnnnnnnnnnnnnnnnnnnnnnnnnnnnnnnnnnnnnnnnnnnnnnnnnnnnnnnnnnnnnnnnnnnnnnnnnnnnnnnnnnnnnnnnnnnnnnnnnnnnnnnnnnnnnnnnnnnnnnnnnnnnnnnnnnnnnnnnnnnnnnnnnnnnnnnnnnnnnnnnnnnnnnnnnnnnnnnnnnnnnnnnnnnnnnnnnnnnnnnnnnnnnnnnnnnnnnnnnnnnnnnnnnnnnnnnnnnnnnnnnnnnnnnnnnnnnnnnnnnnnnnnnnnnnnnnnnnnnnnnnnnnnnnnnnnnnnnnnnnnnnnnnnnnnnnnnnnnnnnnnnnnnnnnnnnnnnnnnnnnnnnnnnnnnnnnnnnnnnnnnnnnnnnnnnnnnnnnnnnnnnnnnnnnnnnnnnnnnnnnnnnnnnnnnnnnnnnnnnnnnnnnnnnnnnnnnnnnnnnnnnnnnnnnnnnnnnnnnnnnnnnnnnnnnnnnnnnnnnnnnnnnnnnnnnnnnnnnnnnnnnnnnnnnnnnnnnnnnnnnnnnnnnnnnnnnnnnnnnnnnnnnnnnnnnnnnnnnnnnnnnnnnnnnnnnnnnnnnnnnnnnnnnnnnnnnnnnnnnnnnnnnnnnnnnnnnnnnnnnnnnnnnnnnnnnnnnnnnnnnnnnnnnnnnnnnnnnnnnnnnnnnnnnnnnnnnnnnnnnnnnnnnnnnnnnnnnnnnnnnnnnnnnnnnnnnnnnnnnnnnnnnnnnnnnnnnnnnnnnnnnnnnnnnnnnnnnnnnnnnnnnnnnnnnnnnnnnnnnnnnnnnnnnnnnnnnnnnnnnnnnnnnnnnnnnnnnnnnnnnnnnnnnnnnnnnnnnnnnnnnnnnnnnnnnnnnnnnnnnnnnnnnnnnnnnnnnnnnnnnnnnnnnnnnnnnnnnnnnnnnnnnnnnnnnnnnnnnnnnnnnnnnnnnnnnnnnnnnnncccctcgctcggtcccgctcgcctgccgcggcagggcggccctttagagtgtccgcgctccccccccttcccctccgcctcctccattttgcgagctcggagtcagtgcctggagcccgagtcgccgcccgcccgtcggggacggattctaagtgggtggaacaagacgccgcagccgggcggcgcggcgccgggacgggagaacgcgcgcggggagacgggagcggcgcgggggcccggcttgtcagccgggaacgggtgactttccgcgataggggctctcccctcccccaggaaaagaggnnnnnnnnnnnnnnnnnnnnnnnnnnnnnnnnnnnnnnnnnnnnnnnnnnnnnnnnnnnnnnnnnnnnnnnnnnnnnnnnnnnnnnnnnnnnnnnnnnnnnnnnnnnnnnnnnnnnnnnnnnnnnnnnnnnnnnnnnnnnnnnnnnnnnnnnnnnnnnnnnnnnnnnnnnnnnnnnnnnnnnnnnnnnnnnnnnnnnnnnnnnnnnnnnnnnnnnnnnnnnnnnnnnnnnnnnnnnnnnnnnnnnnnnnnnnnnnnnnnnnnnnnnnnnnnnnnnnnnnnnnnnnnnnnnnnnnnnnnnnnnnnnnnnnnnnnnnnnnnnnnnnnnnnnnnnnnnnnnnnnnnnnnnnnnnnnnnnnnnnnnnnnnnnnnnnnnnnnnnnnnnnnnnnnnnnnnnnnnnnnnnnnnnnnnnnnnnnnnnnnnnnnnnnnnnnnnnnnnnnnnnnnnnnnnnnnnnnnnnnnnnnnnnnnnnnnnnnnnnnnnnnnnnnnnnnnnnnnnnnnnnnnnnnnnnnnnnnnnnnnnnnnnnnnnnnnnnnnnnnnnnnnnnnnnnnnnnnnnnnnnnnnnnnnnnnnnnnnnnnnnnnnnnnnnnnnnnnnnnnnnnnnnnnnnnnnnnnnnnnnnnnnnnnnnnnnnnnnnnnnnnnnnnnnnnnnnnnnnnnnnnnnnnnnnnnnnnnnnnnnnnnnnnnnnnnnnnnnnnnnnnnnnnnnnnnnnnnnnnnnnnnnnnnnnnnnnnnnnnnnnnnnnnnnnnnnnnnnnnnnnnnnnnnnnnnnnnnnnnnnnnnnnnnnnnnnnnnnnnnnnnnnnnnnnnnnnnnnnnnnnnnnnnnnnnnnnnnnnnnnnnnnnnnnnnnnnnnnnnnnnnnnnnnnnnnnnnnnnnnnnnnnnnnnnnnnnnnnnnnnnnnnnnnnnnnnnnnnnnnnnnnnnnnnnnnnnnnnnnnnnnnnnnnnnnnnnnnnnnnnnnnnnnnnnnnnnnnnnnnnnnnnnnnnnnnnnnnnnnnnnnnnnnnnnnnnnnnnnnnnnnnnnnnnnnnnnnnnnnnnnnnnnnnnnnnnnnnnnnnnnnnnnnnnnnnnnnnnnnnnnnnnnnnnnnnnnnnnnnnnnnnnnnnnnnnnnnnnnnnnnnnnnnnnnnnnnnnnnnnnnnnnnnnnnnnnnnnnnnnnnnnnnnnnnnnnnnnnnnnnnnnnnnnnnnnnnnnnnnnnnnnnnnnnnnnnnnnnnnnnnnnnnnnnnnnnnnnnnnnnnnnnnnnnnnnnnnnnnnnnnnnnnnnnnnnnnnnnnnnnnnnnnnnnnnnnnnnnnnnnnnnnnnnnnnnnnnnnnnnnnnnnnnnnnnnatgtgattctacagtccagtttttctgtttttcctggtatttacatatttggaaagagaaatcttcaacttatagataaaatattttgtattgagcatattaaacaaatttttaaaaaaggaatataactcagtaaatcttcgtgttaggaattttgataagctctgttctattaaactatttaaatacgttaaaattgtagggaagaagccagtacacactctactctgcttttaaggatgcacattttagtctgtatataatatatattatttcttatatcccaagtttgaaggtaggtgatactagacaggcatatttagttgaaaatggagtttcagagtaagagcttttccctagccctgcaagacaagcagcccagcactgctttttttttttttccaataaaatgtgcataattcttcaaggttgtaccttgaaaggtttagatgtgtggggattggcacaggtgaaattgtgaatcatgaggtgtgtaaacaattatagtatagcatttatcaaacggtttatgtagtggtttccagagaggaatctctcaattgaaaggggttggaaatttaaggatcacgcctttaaaaaaaaaaaaaaaaagttaaatactttgacgtaaatttgaacctttgcaataatcacaaataacaaattacaacctccatgcttaccaaatgtgtacatttagcgagtggcaggataaacagccaagtttaaatcggtcgaccgggcagatgagctgctttgtggatgggagcagggaggatatagctttattttagaagataggaactattcttctgataatgaagactttggtttgggagttacctaaagggtttatttaataggctgtctcttactaatcggatcagagataatgtggttttatagcttattatgtccttttttttttttttgtagttaatatttgccaatggactccaaagaatccttagctccccctggtagagacgaagtccccagcagtttgcttggccgggggaggggaagcgtgatggacttgtataaaaccctgaggggtggagctacagtcaaggtttctgcgtcttcaccctcagtggctgctgcttctcaggcagattccaagcagcagaggattctccttgatttttcaaaaggctcagcaagcaatgcacagcagcagcagcagcagcagcagccgcagccagatttatccaaagccgtttcactgtccatgggactgtatatgggagagaccgaaacaaaagtgatggggaatgacttgggctacccacagcagggccagcttggcctctcctctggggaaacagactttcggcttctggaagaaagcattgcaaacctcaataggtcgaccagccgtccagagaatcccaagagttcaacacctgcagctgggtgtgctaccccgacagagaaggagtttccccagactcactctgatccatcttcagaacagcaaaatagaaaaagccagcctggcaccaacggtggcagtgtgaaattgtataccacagaccaaagcacctttgacatcttgcaggatttggagttttctgccgggtccccaggtaaagagacaaacgagagtccttggaggtcagacctgttgatagatgaaaacttgctttctcctttggcgggagaagatgatccattccttctggaaggggacgtgaatgaggattgcaagcctcttattttaccggacactaaacctaaaattcaggatactggagatacaatcttatcaagccccagcagtgtggcactgccccaagtgaaaacagagaaagatgatttcattgagctttgcacccctggggtaattaagcaagagaaactgggcccggtttattgccaggcaagcttttctgggacaaatataattgggaataaaatgtctgccatttctgttcatggcgtgagtacctctggaggacagatgtaccactatgacatgaatacagcatccctttctcagcagcaggatcagaagcctgtttttaatgtcattccaccaattcctgttggttctgaaaactggaataggtgccaagggtctggagaggacaacctgacttccttgggggctatgaacttcgcaggccgctcagtgttttctaatggatattcaaggtaagtcagcgctttgctgtttcttaagaatgatacatttaagatagtttgataaacttcattcttttatcagtgcgtacttttttctatactatttgtatacttttgcaaataactcagtacaaatggtcttttgaatgtataggcatgttagaaactggaaaggactcgtcactgcaaaagccctttgggtgtttggttaaatagtaatcgtttctcgttggtcagtgttaaagatttcatttgacaactaaatcagaattgctcactcacaagtatctgttaaagtaacatttatcatctacaagtatccaaagtcaaactagtatgaaatcaagaaaataagatgtctagtcatagaatacatttattgcacatattaatttagctgttttagaatatattattgcaagaaaatgcttgaagtgttacctttcaatgagagggttaagaactggaagtagtaacactgagtattcaatctgaacggtctgtgttttgaaactgttagagcatttcagtgtgtagggacctagaccatagtgtcagagtagtctacagcagacagttggtgactgctcctttgcctctgtaaaggagctggtgctccatgcgttcgaaagctcctgcagatgctctagtaggtaattcatgattagaattttcaggattcagttagcaagtaccatatatgtctctcttcatttttctcagtcagttatgaaggatactgatatttctgcctgacctcacaaaggtccgttagaatcgagttactgggaaaacaaaaaacaaaacaaacaaacaaacaaacaaacaaaaatgtgtaagttaaaataaatgggctggtcggcttaggttcttcctgtcccctcatgttcatgttatataaatgttggcttatatatctattttaggtgtgataaaaaagaaaacgtggattgtagtgatataagacagattaatcactagggtttttgttttgtttttgtagaaagcagtcctttaaagccttgtatgtaatcccatcaactgtttcctattagtgatgctcactgttcctattaatcagtcacttgagaagactgtacttaaaattcataagaaatgatttcaatgcagcctatcactgatctatatccttataactctttaaaattccctttttctgaaggcttcccagacactaacaaacaaaaaggtatctctttactccacacatagaaagcttttattagaaaaaattaactttagactatgatctatttttctaaatagtttaattgtatcttatcaagaggaaggaaaaatcaccttttcttttatgtatcctaagagacgggaagttaatatttatattgcctattagtagtgactactaatttatttattactcaataattaattgccccttatttgggagaaaacgattgcaacactttaactttctgaattagggatttaaaatactcccagtaaggaaatttaaatactttcttattgcataaactgtgttttaaaaatgttaagaaacaggctgtgctttaaaatttccaatcttaaatttttgacagtagatttcatgtggttgactttcataaaggaatagttaaaattgacttgattatctatagggagctgttaaattgatttataaacatgtgattacacaaggacaaataatacatttagaaaatttcttgccctgaaaaccatcataaaacttcactttttattataagaaaaaaatagtggaacccaaacttaacttgcatgcactatgaattttcattaagacttataaaatctgggatatgaacaataagtcttagccttagatcattaaataatgataatgctttaacttttacacttaatgacatataaaatgttcatgttggtgttgggcctctgctcttacagagataggcatggccatgtcagtgtggcactgtcatgtccaggaaatgattaatttcatactgacagatgatttggattttaatcactagtgtctcttcaccaggcagaataccttaacgggactgtgggcggtgcttgcaagttttacacttagcactgagaacttctattacccagaacaaagctttacccaaataaattgagacaatgtttcctttctgagcattattgaattcttctattgtttccaggcagcagccctggcagaactgaaattggttgctctctgtatatgatgcacggtagttgccaaacattagctatgatcagtgaccctgagtcaccagccactaagtcaacatgctgcatgaggccacagcttgactgaatgcgctctgacttcaggcagagaaccaggaacgccactaggaacatcgcttggaagttttaaagaaggcatacattttaatttgaattcctaaatattttctccctagaatgtcaataaaaaccacttcatattatattcgagggagaaggcaatttctacagatatgtcagtataccatgacattaggttagcatattaaagttaggaatatcatgactaagaattttgttttgtcttgtttttaaggtttaagttcattggtggtaaaacaaggtaatagttattgattgtcaggtctaatcttagtaaaatgaacttccaagtctaatggtgcaaattaaaattcagtgagcttaacataagcataattgaagcagacacacttctgtgtaatttgatttccttccaccgtgtttcgcctcagcattagtagtgtacattgcagaagataagcagggagaactaaagggttgtcagtgggattagagcttttgggtatgctgttgacattttgtttgcaagttgactctttcctgaaatgttgggtgactagagaaaaaataatactgcaagatggccctctaaacccagtgtccatggaggtagggcttcggtgagtggtatttaatgaggacactaacacttgagtcactttggacatccctcattattggtcagatctgcatcaagttttataaaagtaatgagattgaaaaattatagcaaagatgattttcccctctctcattttgcttatcaatcacgggctagatgttttctgagacagggtgtaaaggaaagagtgaaactagccttttcctttgagaggtacttgtttaatgagtgaccctgttccttgcccactaaaaattccgacagtgggtgttcagtggtgttttgagtttactgtctcttgatatccatttaatgatttctggatgtgattagcttttgagcatacacttatttgcttatatattgttacctttatggtagaattgcttcctcttttaaaagatcagtatgattgattttaacagaaatgtaagctattgtgtactcaggtgtgtcacattagtattggaatgactaaaacagagatagggagtaagcctttagtcagcgcttaatgaaattcttataatgtttctttggctaatccttgtattttttttgattaacaatttaacttgtgttcataacgttattttgtctttcgtctatatgtgtctgtaaatgaatttgaccattttccatgtattactgaatgtttatgaattttgtgacctgttctgaaatatactttgtacaaatgaggatgcagcgcaggttgtaggagatggaccaacaggaagagaaagctcacattagaagcctctaagatttgctgaggagagagattgcattaagtggtattttttccatgggtgtcagtgtgaaaggctaagtgttaaattcttggtgagttatgtaagtctcagtgcactctagcctggttagattaggaagccttcatttagatttcggttaggtctgcagcataattcttcaaatacatttttctctttactagttgtacatatttaattcttacgaggttttgggctctatggtgtgacgactcaggtcatgttgagtagtgtttactgttttgaagccatcttggtaatattttggtcaaaagtaagttaatataataagtatttgtttctgtagttctgaggtgcgcagaatataacttggctaatcccattgtataaagaatttttaaggaatgtgttgttggagtaagctacaaccagaaaaaaaaaatcactccttgactttacagaagagattgattatttctgtctgtagcttcatttagccagctgctctcatttctcctaccttggttttatatttgtcaagttctcctaaggggaacttatattttaaaacaaatctctaaagtgtttccgtactctcttttgagttatgtgatcacttctgtatttgggtgtaacctttaaagattaaatttttttatacattacaaggttaaatgaagccagtggagtcaacccctctccagtaggggagggacaaagagagaagcaacagagacctgtaatagagggagaaagaaaatttcaaggacaattacagaaacccatttggatcaactgttgcttttctaatgttaaaagctatgtgcactatcaggaatgacagcaacggtgctttcttgtgagggctaagagtgacggaaaaacgaacgcttctagttatcttctttcttgtgatgttatcaccaaaataagggcaaaatgcacagtatactttgatgccaagattaatttcatatttttcccattttaagtggttattaaagagaatgtgatgacttgaacttaacataatcactgtgccttatgttgctacaaccaaccatttcacaggccattgtgtatttttacatataaacgtgccttaggctgttacagcctcttcctatttcatagtgtacttttactttgaaatatctctttataaactatcaactgactgtggagtataactctttccttgtgttataggtttttcttttagtatattgagtaaattaggccaatgtcaacataaatgattggattctgtaagtactagatagccacttaaactatttgtattgcagtagaatccttaaaaacagttattttaaatgaaagggtgtcatcctttaacttactctctgagccaatttaaatattaatagcctattttggttgagctatgtgcttaaacatacttatttagagtaacccagctattaattttaagtactttagaatacttttttcattttagcaagcttcagcaagatttatagtgtctgcgaggcaatgtgtttaataaggaacttcttactttagatgttttttccattcatatatagaggcacaatatatatacatattgtgtgtgtgtgtgtgtgtgtgcgtgtgtgtgtgtgtgtgagtgtgtgtaaggagaggagaaaggttgaattacatgacttacatagcttacattaattattatttatatattattttgccttgaatttttattttttgttagtaatttgagtttaataaatgtgtaatatttgaaacttgcaaacttaaagcttattatgtttacttttaaaataataaattagcctttattctagtttatttcataagtttccaaaataatatttagccatggctattatgaaagtatatttgatagccaaattttgaaagctattgtgaaatgatatccagtttagtacatgatttattattttatgttggggcaatgcagcgacttatgaccttatgattgtcacatgaacattaatgctttactggtttgctatggccacttttatgttgtcatatttttatgttttgttttataattgggatttcaaccttccttcattttaattcataaaatgtggttccttttcccctacatctcttccaaataatctgatctagataatcgtaacagtaattgtaggaaaaacaaaaacaacctgggctctaaggctaaactgaaccaatttatgattctgggtaacagtgtgctttgaaatcaaagatactttctctgtcaaaatttattgaaacaccattgcgtctgtgtgtctgtataaaaatttgcaattctcttattaaactgataggccatggtatattaaagaccatttcttgacattttcttgtatagtatcaagtacaaaacaatgaacttagagttgaactttgattagatagggcttaaaatcttatttttgatagcacataatatgtaaatgttatagttggacccaagaagtgggcccttgaaatctcaaagcttgttttatgtgttaggtaagaaatcatctattcccattcccacactttccaatgagaaattgagaccatggcagtacttaggaaagaacacatacttcattagctgtgtagccagctggaaccaccctattggcagctatttaaaccttagcatctagggctcttccagggtctaaaaacaatcagtaattgacataatactgaataataataataataataagcaggtagttcataaaagtcactgatcctttcttcctagtgttagtaggttctctagtgattgaacactaattacatggcagcactatgttacatatgctatgctacatacactatataacatacactatattatatacactatgctacatataatatactccatgcactatgctacatacactatgctacagttcatgttatacacatctcgtactttcatgtcatgtgatgtcttaattctttgacacgctttattctgcttatcacattaagtgtctgagtctgtcagctccatgtaggacaaaagcagctgttacctgagttttacaactgagaagtttaagacatttaaagaaaaaaaacaggaaaccgtaatgctgatctgaaaggaattaattactatttgatgttttgaaatccctcaacaatctttaacactaattgttcaacagtgagtgtgtgtgtgtgtgtgtgtgtgtgtgtgtgtgtgtgaatgagagagatgaccaggcctctgagatatatagatatagatgtatagatatatatattcacttagtgattgctctaagtttcatttagaatacccagcattcctactggatagaatatgtaggcgccaggcgccaggctgtcaatgattcagcaggccgagggcttctgcgcaagcctggtgacctaggtttggtggcagaagccacgtaaccgtggaaaatgagaatctattccataaagtcttcccctgactttcataggtatgctgtggcaaaccccataacatgtacatatacatacacaataaaaatgataatacttaaaacataaaagaatttgtagatgcaagtttactctgaaaatttaaaaaataaattactaagatgcaaggtggtagtttcaaagctctggcagttctgttcagccaaaagcaggacatctctcatttgctaataatagttcaagagtctgcatctctggtgtaggtattgtctactaaaaaaacgttactggaaacttttttatgcctactatgtgcagttttcccaaattgggtcatgactccatttcatttacactactatctttttaaaactcagataattatcttaatattaatttttttcaagatattttttctctttttgtaggggagtacctctatcagtaaccctattccatggattttattacacattagatatactatctaaatttagtagctatactgataatccacattgctgataaacatgagactatcccctttctatttttactgtctgatactcttaggtaatcatgcatgcaaggatagtttgttaattaagaagcttccaatttttaagaataataaatactaatactttttctaggtgcataagtttggaaggattatgtaacttgtttaaagacattgaccaactttttctttgatggtgaaaaagctgcactaagggctggagagaaggcttattagttaagggtagttactgctcctgcagagggcctgagttctgttcccagcacatacgttatgcagctcactactgcctgtaactccagtttcagtgggatctgacacctttggtatctttaggcatcttcacagatgtgtacctacccaggtatatgtatgtatgtatgtatgtatgtatgtacatatacataaacacaaatgtacatatattcatgtatatgtgtgttttcattgtgtggtcaagtatggaaaataattaaatggcagtttaaatagatacatacgttattataaacctgattttgcaaatagaaacatagaaaatgtttaattagagcattatatgaaacatgtcatctgaatcccagctgggtttatgaaggacaaaataggagagtagaatagagtttttaaaaatatttcccccaaatagaaaaacccagaataaatgtttgctttctgagcccccaccttgagaggctgtgttgttgccactcttattttgaagccatcttgagacaccttgtaaaccataagaagaagacagacttagtgaactgtagtactatactaatattcttaaccagaaaatgttatttctctgtttgattacttatgtgcaaactttcagaaatttaaccagcctcaggttataatatttgtttctgttgaggattatttatgagatcagctagggtgttcccttccctcctcttccttgtccccctctcccttttcctctataaaacaggctattgtgcagcacaggctgcccccaaaccttaaccttccacatgccaggcatacagcccttcatagcagaggccgtttgaatgtgcttcccttcgaccctcaagcagatggtgctctgtggttaagtcccagtgtgtgctttcttttaagttataaaggaatttaagtaaacagcttatatacttctttttttagtatcgtgcagaaaaagtaaagattacttacttctaagcctgatttttttctctctctctctctcatgtttattttatgttcaagaaagaaggcctatctttggcttcaacttgaaaggaatttggtgactgcagatatggagtaaatacagtgtgaattcctacagtaattttcaaagtattcgaggtccttattccagcttctccatgtcctagagaattacccatttgtcactacagccaacagttccagttcactgaagttatttatactagcagtctcaagtcataggatcaatgggaaattcaaatagttactacttttagtcctcaaaatgtaaaaaggaaacttagcttctactgacagccacttaggaactgaacagtcttcatcccgagtcccacgtgcatttattctcctgtctgttgttggcagcaggttacgatgggtagaagctggcctttgagaccatggcgcatgctgcagcaaacaggtagcgtgtcttttgtgggatcattgtgttaggactgaaattcttttgactgaatttctttattgagaatagtcgaagaactgtttttatatctatatttaaaaccatctagtttcttaaattcttattattcttccccaaactgtcagatttcagtggctgagaaagagggacaaagagccaccatcatgttagggcagtattaaagtctctgggcactagagcctcatataagctaaggaggaatgttgttaaaaaagaggggaaaaatgcatagtaattcttaggattaacttactgatgacaaatgaccacttgaacaatagcatcattagacagagagccatggtactctaataaggaagccaaaaggaaaaattagaaagccacggggcggggggcgggagaaagaaaatgaaaaatttaaatttctgtctggtgactggctgtgtttcttttctgtacgcttcagcttctgtatggacatggagacatccctaagaagcctagtgatgtcattatgtttgtaaaaggaagagctacaaagacattctaggaagcagttctggagaagggtggctgggagggcactggagcatcacagaggtcttccagctgcagctgtagtgtggaaggcctgctgagctgggtgctgggcacgagtgaggtagcgatcagagcctgctggagagcagagagggcaactttcatacctcttcctccttccttccaatttgctttttaagtgtttgcccgaagaaggcttacacccttgctggagatggagcatgtggtgaagggtttgtggagatgaatcaggaatgaaggtccattcagttactgggagtaagaagagagtcagaaggcttgctagaaagaggatgaaaactcaaaactgacccatttattaagagtgagcaaaggacagacttaaatcatcgttagataaaggagtatgactgcacttgctaccctaactctgtgcatgcaagaccatgctatgtttccttgcctaggactgatttttcttatacctatgtgggggtgtctacgtattttctgagaggaatatggttgtcagtgtaggtcccctggcacatggtctacgcctggagaacttttatctgaaatactttccccaaatatccacgtatttccctgtccttctttatttaggtcacacttccatgtcacttgcataagtgggacctctgtctctatctcaaattgtacatcttccacacctcattttgtccgctttggtgtatttaggaaccttatgtcctctccattacaggtttgctccactcctaaatcccaccatcgaaagagtaggacagagatgctgagtgtgtgaaggagcaaacttggctcagaaatcaggaagaaggctcagactttagtctaagaaaaccagtcttaagacagtagttgatgcaaatagacagaacatacatatggttttaattgttgtctgcttctaaatttactctaaagctttaaataggattgatccttgcagtttcttaacaagttagggcaataaaagcttgtagatgatgtttttgagggcgtttggttgttttgtttgtttgtttcctccactatataatcttctgctctagaactttacatttattattcttttaaaatttcataaatgtatgcaatacatcttaatcatatttgaccccattctgtctctctaccacttcctggctcctttccccaatgcatcccccagttctctgctttataaaagcagccatgtccaagaagagattcccatatgcatatggctaccaggatttattattctagcagataagccaaaaaaaagtactcatttatatcaacttacctagaaaggtaggcaagaaacaatggtttgttttgttgttttagatagtttataacactgaatattctagaagaggaggagtggcccattttctctcaattgccaaattgtctttcttcaacttatgggtgttttgggtttgatttattatacaatagtatcatcaacttaaaaggttattagaagggtctatcttctaagtatttcagataactgtctaatttggcaaagacagacaatgatgatgagaataataataataataatgccaagccacatagggtttaactattgaaagagaattagatgaggtcttttaagagtgaacttctctagagttgaaggaaaagatgggaatagaccaaggacagggctttagagggcatccagaatgaagctacaaaaaacactcagtgaatatctggagaattaagagataaaaatcttaaaatgggacgaggagaaagtatttcatgatattgtatcaacttgggctaaagacataacagagtttgatagttaaatgtgtggtggtgtccttaaaacatacaaatgtcctcaaaaattaagtcctaaatgcatcagcaaagcaaatggttagtttattgtctacaataccttttaatttgaaatataggttaaaacatctcatagaaaataccatttgtctgacacacgccatgaggccgtgaaaagtgagatgcattagaagtaagggcaaaagctaggatcccgaagacaatagatggtgatgtgcatgttggtgcgtaaaggttcttcattatcagtatgcccagaacactcatcactaaagagtgttccatccctattgtgtagaacatggggtagaaacatgggattccagctggaggaaacctagacctggcacaattagtatcatattgcacatcagacttccttggtttgaatcttttaagacctatgtgaccttgatcaaatttacaatctataaacctcagttccttcacttttgatatggacacaaggagacactgctgttgaatggcacttacacagcacccatgagacattagcactcattcttagtgatgttgcttcagactggagagcttcttacggcttaaatgctacatggaggtctgtttggccacagcaccaagcgagtctcagtcttaagatgggttcattatgattttcagagtaattattatacttaagtaacggtagccttcacttctggtagtgttatcagatgtatgttttgacttacatatgaaggggaactaaaaaaaatgtatgtgtgatagatgttaaaaggagcacttcctgtcaggctctgtttaaccccttccatcttcccactcagccacatgagctgtagagagtcactcacaagtacaagcttgtttctttcttctccatgttacaatttaaatagcacttttacaagtttacaaataaggtttggccattccctccctctccctttcctccctcattctactttagtgaagagattgagattagattttaggataaacattgttgcgaagtgcctacttggtgggctaaacactgctgtagagcgccctttggtgggaggcggggaggaaggaaggagacggattctggaacttttgtctcgctgaataaaacgtagtgcgccagaaactgtgcttggaacagaatgagagcaggcagctttgggatggtagcacacaaccacttgtgtgtcagttttaatggatccagtttctacaactaaaatttatgagaaaggttaggggtttgtgtcagataagcacaccagtgaccagacatgctaaaacatagggagcccctccaaaggattctactagtcctaaatgaaaataaaggaacagaagtggggaaagagatgtactcagcaggctgggtaaggcaaatagtgtttgctttggcagcaatggcaaaggtaaatgctaaggtttaagttgcaaggacttcctgccgtctgtagaccactcactgttgaacctttcagtgataactctaaaagggttcgttacactagatcatggagagaggggagacaggtgaatcatgtggtttctgcttccctaccagcttctcttctacttttagggtaactttttgaagtgtccttagatgatgaaaaaacacactcgactttgtctgtctgtcagtctgcttattttgattaacctctgttctctagttctatcagcttttctggaaatgacatgattgtatttttcttatacctgaataatgctccattatggagatacaccttatgctatatccattcatctgttgatggacacctaagccaatcccacagctctgctgtcctgaattggacaacactacactgaagtgggaaagcatctcttcttccatccacagtcgtgatgttcattgtataaatacccaggagtgtggtttgatcaagtgtcattttaccttggggagatatgcatactcttttactggtttatactcgcaccaatcttacagaaggatgccccctttcccacatctttttgagttaacagccattctgaatttcagtatcgttttaattttgattttcctgctggttaaatacattgagcattttttttaaatgttgaaaccattcgtactgtggagtggtgactgttgatgtggttatttctggctattactttgctcttttgatattaggcttttctgagatcttcatatagcctgaattttaatcctttgtcatacaaatggttggcaaagatttttctctcatgctgtgagctctctctacttagttgattgtttcctaggctgggcatagccttttgaagttttgtaatcgaattcttcaattcctttgtttcctgtgctactgagtcctattcaggaatagcctcagttgaacttttgaaatattgtccctatctgtgcttctagtagtttcaaattttggaggtttacattgaggtatttaatctattttgagttgattttttttatatagggtgtgcaataatgtgtagttgtagtagtcttcctgcctgtgcctatccagtgtccctagcaccacttgttagagaatcttttctcctgactctgttcctgagtctgtttttagcactttgataggaatccattggctggagcaagttggatttattcctgggtcctctgttgtattcctttcatctgtggggttgtttgtttgtttgtttgtttgttgttttgttttgttttgttttgtagcagtgctgtactgttcttgttactgtggcctatgtaatttattttgaaattaactatgtgatgtctgtatcattatatttattgattaatgatcaatattgctttagtagtcctgtgtctctctctcacacacacacacacctgaaattccaacactcagaagaagcccattaaaactttgaagccagcttgattgtaaaggtactatttttaccttcttagttgggtttattctgaatttcattcacttatattctctcttctccttccttcttcccccttccttccttcatttcttcctgtgtcagctattccttattttgtccgctagatcaaatttcttcctcagcaaatttattattggtatataggaaaaatactgggttttgtttcctgttgctttgatgaatttgtgtattggctgcaagagcctcttagagtctctagagtcttccaggtatgtaagcagggaagcttaactcccttcttatgtatacccatgtcctttttctagctcaatgggtatagctaaaattccaagtacttcactgaatgaaagtgatgagactggccacccccgtcttggtcctaattttaggggaaagtttttctatatttctccattcagcaagatgttggctatggatttgtcatgcatagtcattatttctgtcctatgactttcctgtgtcatatttagttttctactgtaaagggtgttgattttatcaaaggcctttctgcatttgttaatgactatatgcattttattcttgattatatttatgttctgtattgtctttatttgtgtgtgttaaacaattcttatgttcctggaataaaaccaagttgacatggtatttgatcattttaatgtgctgttgaattcactttgcagttattttattagaggtttttgtaggtggttcagaaagagtagtttataaagttttgttctgtctcaacaggttggttgcagagtagcacttgcttcatagtgtgaggtttgagaagggttagtggtctcatttctggactcagtcgatgagcactgacatttggttctttgtaggagtctggtgtatcttagcagaaactccaagtaggcgggagcttttcactcttaggtgattgtactctgttctcgttgcttattgttgttctacttatatctttatatcttcttggctctatgttattaggtcatatgtacctagaaaatcaaccatttctttaagatttcccaatctattcatgtatacttttccaaaacattttctaataatgctggtatttgttgttacatttttatttttgtctctacatttttaagtgtctttcagtgaggttgcctcaaggattgttaagggttgtcttttgggggaggtgggggcgcgtggagctctaaatcttttctctagattcattttattgttctaaaaggtgtgtgtcggtgtgtgcacacatgtgcgtctaggtctgcgctcgtgagtgctaggcatcagattcctctggagctggaggtaacggcggcttcgagctgcccagcacgggcgctgggcatcacactcaggtcttctgcaagaacgctgtacgtccttaatcacccactgtgccgccagccctgagactcaaccttgtttcaggtttgctttggattattctctcgggttctacctcttgtattgatgcactcatcttataatgtctttcctttttattgattttgagttgtttgtaccatattttgggagactttgtgatgtgttatcaaattattttcatatctgtatccttaatgtatgacatacgtagctataaactttcctctgtgccgttcttataatgtcccacatggcattctggaatgttacatttctagtatgcaaacattttcctcttgtctccagtgctcctctgatcaaacgtagactgtagtcccccatgcttgtcatttgcccttctcctttagtgtctgagacagggtgtctcagcaaagctgaaggaactcactgtttcacctgagctgactggccagtgagctcactcctcttcaccagggttgtgaggttacagttacccatgtgctacctgccatgctgagtacctcagacagttctggggggtcggactcgggtgttcatggttgtataccaggcctcttaccaactgagtcatctacctgattctttcctggtgttctttatgtgaaataataattctcttctctcatttcaaatcgaagggatctatttagtacttgttggagggcagatctataaataatatatcttgtagtacctgaattagaatatttgaatcccctttagttttcaagtgtagcattgctgggtacagaggtctttgacatttcattctttccatactttattttttttctgttacattactctttctttctttcaaatagtatttattgttttaccccagctgtcttctctgagactctgctgctcagaaatcatgtatgatgaattaacttctcttgccttcaggattctctgtctgtagatctgatcgttgaattatgctgtgcctaagtgcagatcttttaaaatctgacatatttggagttctttgggtgtttgagcgtctctcattccatgtggggttgttctgctgatgttgcatgttaagatatttacatgttccctctcttcatgacgttatatttatgtgtctgcagtcataagtgatgacatcccacagacctctcaaactgttgagtgctttccagaccctctggcagcatactgtcaaaggagctatccgcaggctcgctggttctctcctctcctgttctagctttaacatttctatcccattctatttcatctcttctaactctgtattcatattttcaatatagggagatatcaattttatatttcagttctttagacatggttttctttatgccagtgtgtatatttgaaatacttagcgcataagctttccaaagcagtatttctctgttgatttcttgatgtcctgttcattgtctagcctttgtttttcacatcttttatttttattgttattgaaatgagacattttaatatggattcatccctaaactgaaatccaaaatcttaatattttttttttgagtgctaacatgatagttttggattctggagtattcagatttcatgtttctgttttagaggttttgagccagcacagctctatacgtgtttcaaagcttagaaaaggaaactcagtaagggtccctctgcttgtagtgtagtaatggcagtcggcagttgacatgctttcctccctctcctgcactagttcttgataagcattacagacagtgtttagtgtctgttctcagttcctctataaagcttatattcgtgtacattgtaagtatcctgacatccctccctttcgcccttcccttccccctctcccctccctccccctctctctctccatatatgtgtgtgtgtgtgtgtatacatatacatacatacacatatacatacacatatacatataaatacacacatatgcatggatacatatatatatacatacatacacatacatattttaaactttgtgctcatctaatagttgaacagaaatttcattaaatgcataggagcaaagcaacagcttaccagtgtgtcgagaggtcctgtgttgcagaaagnnnnnnnnnnnnnnnnnnnnnnnnnnnnnnnnnnnnnnnnnnnnnnnnnnnnnnnnnnnnnnnnnnnnnnnnnnttttcccgagggcattatctagtttatttactattccttgcagctgcaactgtcacctcagggtgcacaaactaagacatgtcaataaatgtcctcagtagctctccctgtccaagtatagcaagctacatcaagccagttttatggtaagcaaaataaagagaatccttttgaggggatctaaacaaagtataggaggaattctgtgcctctgtgttatactgaagactttggggaaaggcgcattcattccctgccagtcacaagcattgtaagcaggtgccatgtttataggagcaggaaatttctttgggatttaatcaagattcttccttttctagaaaataacttggagaaagcttccagaaatacatcttttattccattttcttttgtgactcttttaagatgtaaaggtgtctagcctgtggtgttgtcagactgtgggtttaactgaagcacatctgagtttaaagtacaatattctgttcactgcccggcaaagtgtccgtccagatttgcctttcaacctggtcgtcgtactttacccctgttccgcgtgtaggccatgttgctttagactgctgggttttgctttgtttctggttcactagagttcaggatgaacgttttcaggtctcctacagcggtggctttcagcctgtggtggagaggagtggccacaggccatgtgtttctgttatctcacttgcaaatagctgtgaagagtccctgggaggctccagagaaccttggaacatgtataggtggattgctcagctttcactaagtattctagggagcgttcggacatctaggtgattagaaatgcttcttattgtcttattaaaagtgttattctatgtggcagcaaacattttgggttaagcttcattttagtgaactggtcaacaaaggaagctgaaagtttgagacttaagtctggccttgtggcttcaaacagaaagctcacaaatgtaaaacctacctgggctatagagaaaattcagggacagcctgggctactgcctctcaaaaaattaaagcattaagggcttaagcagtagtagaatgcttacttagcatggataaggcacttactttaatcctgagaaccaaagaagaaattggagactatcatgtttgttcaaaagagggtttactgtgtatatttgaggtttataacagtgttagcaatactcatagaaaataaaatggttactatcttctatcatatataacattgtgtgtcacaatggcaataaaatctgcattaaacaaaaatctaataaataaaatcttgatatagacttcatgtacacatttcttaacttgtttgttcttttgtgtcctttgaccaccccctccattgcccttactcccttgtatatctttgaaacctctttcttttcatcatgtgatcctgtaaagttttaatttttgcatctgcttattttatttagcatactgtcttcttggcccacctgtgatgtatccattaacatcctcttttgtgtggctaaatggaggtctgggagtgtatagtagattttctttatccatttatcattgatgggcattgtgatgctgcagggacatccttacaaagggttaattccatcacccagaaattattgctgggttttacagaagctgtgtgtgtaacattagaaacctccatactgtttttcatgtacctatgccaatctacaccctgacctgctaagaggtccttttctatacatggtcaccaatatttgcctatttctagtctgttttgtcctgttttcctttcctgtcttttctcttctcttctccattccaccccaattttgagattagatctcattccatagcccaggctgatttaaactctgcaatccttctgcttctcaagagaattatgtcctttgtgggagagggctttacttagtctttgctcattgttggaactgggttgtttgttttaactattgagttgtcaagatttctttctaagatgacacatttctcccttccctttcttgcctcccaacccctccccactgtccttcgaatccatgcctatttttcctttgttatcgcatgtatacgtgcatatacatattttttcctaaatatctgttcagcaccactttgtgtgcttttctccaggaaggctatctctatctaccatacccagatttactcagttgcagatactttttttgtatggttgaggcctcatgggcttttctctgtccactttggcatgtccattggtacagttttggctcagctcatgttcaggcagtcttcctggtgaagctttgtgggggtagtttctgacattactaggagacagccccatagcaaaccctgtgaccctctggctcatacacagttctgtagccccctcctccacagcgttccctgagccttaggtgtgggagtgttttgtagatgaatccactgggactaggctccataacactgcattttaattggtgggggttttctgcagtggtttctgtcagctacagagagaagtgtctttggggcaaagacaatatttatctgtgagtagaaggacatatacttagtagggactatgttgatttggattttataattggtatgtcttcaccatatatgtgatttgcaaatattttttactagtctgtgggctgcctcttgttttcccctgtattttataaacttaagtttagtggagttaaatttatgtgcttttgcttttataatatgaacatttgatgatatattcaaggaataactacaaagaccaatgtcaaagacttttacctccatattctttattagtttatggtttctgatcataggacttttgtcctattttaactttacttttatctatcatgtaaaggtacatctaaaattccttttccccccacatgcattcccaggtcttgtttatatctctttattgccactgtcaaaagtccatttccttctagtccattgccctattttgtcagtgagcatccgttttgtctcagtgctatattgttttaactgtgtctgtgcagtgtagtattcaaccaggaagcttctaacttagtttcttagtattgatttaggtgtgcattgtttctccgtatgaaatttgggattattgtcttctatatgtctttggctaccacaataggaattttgatcaactgccctaaatctttattgattgcaccccatccatgaacatactcagtgttcgcattgtctcttttatctgtcctcaatgatttatagtttccagtgtgtacattttaatttcattggttaaatgtattcctatttttttaactataaatatcattttgctttttttttaattgggctgatactttagtttaaaaagtggtatagatttttttatatgcttaaaaaaaagcaagtttcagaacttgctttatatagtgttatagcactcacctctatgatgtctgtcttcttctgatctgtctactaatggaacgatcaggagtttcactagatacgattaagggggtgggggcaggaatctctggtaaagagaatttgtatagcacaagtgtttttaaatgtctattaaaagagtcagtaagagctggagaggtggctctgtggttaaaagcactgcatgctcttcaagaaggttcaatttccaacactcgcatggcagctcacaaccatctgtaattctagttccatcggttctgacgtactcttctggcctttgtgggtaccaggctcacagacacaaacacacaagcaaaacatccatacacataaacaaaatttttaaaaagtttttaaatatcagcaaaaagtttgagaggattaataaaaagataggacaaaatgtaaatgtgtaaatatttcttcccgtgaggtgatgaggtggtgttgctagcaagaggtacagctccaccgctcagtatggcgcatgaacacaagcaccctcaacaggagatggctccgctgtgtgcagaggacagcactgctcattttgcttggtcagatgtttggtcaacacagcatctgctggtttctgttacaggtcttgaggttgtagtcagccattaaccaaggtttcagagtcagttttgattctgaaagtcttaactgtcaacagaagctggggacctggagaaggtgagagagagggcctaagaatgccttagagacttgatcactatactacttataagagagggttgcattatgatggaactgtgaaagtgtatattcctccagtgaagttaactaagatatcagcccagcattttctgctctgttgagtgttaggaatgctatttccgaggtggtattctgcaaaactataaaaggaaaagtgtgggtggtgagagaagaatgggggcacgacatccccgtttgtagtttaggagatggggttaagttgcctttcaataattcagttaaatctgaggattatagaacttttgtaaaattgtttagaattttgtacttattaaataaaatacttatctttcaaatttatccaattttagcttttcatgctgacattctcaattttatagacagtatattcttttattcaactaccaaagtgattttttttattgtgtaaaactgaaaagtagacactaaaagtgtatgtaaataaatggaattactgctataattattatatttactgagtcaaatttcagtttcctttgtgcaaattcaagtatagcatttgtgtcgacaagccactttgctttcctgtcgcaaatacactaataacacattatagatagaaaacttccatctcaggggatgaataatagacgcttctgtagcccttggctctgaggacgcacctctgctgttgtaggaggattttaattttattattttatgtgtttggatattttgcctgcatgtgtgcctatgcaccacttgcatgcttagtacccaaggagaccagaagcgaacattggatcctcgagaactagagttagaaacagttgtgagctcttatatgggtgccggggcccaaacccaagtcctctggaagggtatccagtgctcttcacactgagctacctctccagtcctgccgtggaagtatttttttcccatcttgtttataaattaaagcttttttcagggtaataaatgttgtacctacccaattactaactcttggaaactgatcaaagtctaatttaaattttataacatagtgacaatttagaaataacccatgagttgtgggttacaattaatctcagcaatttgggtgtgtatttatttttaagctcttaaaaggaatgggctaggaatctatttcagtggtggcatgcaggcttgcctagtatgtacagcattggagtccatcctggctggggtcaggagtggtaaaggaaagagaaaatgaagaagaggaatgggggaaaggaaagatgaaagtttaacctaaatgtgataattaactataagcttttttagaaaacaactacctagaaaatagtttactataatttagtaataaacagaccacattcgcatgtaatctctatttgaaagaaacaaatcaaaagtaaaggcagaaaaagaaacagcaatccaagtaccgcagagcctgagccataagaccactgaagagaattcacgaagaaacatgctcagggcagggcagccgagatacccactagctctgatgggctcaaaaactaaaacttagcagcctcgggttgctgatagagtaatttgctttgccagttgaacttggttattaaatataactgcttatgtacgacaacagaaatatcatggtttgtttatagtacagtaagaggtgtataagttcctaaaatctactggaaatttgactaggaaaaaataaataaggaagaagctggaaaagttaaatagtacagagtagtgctttctgcctgtcttcattaggaggctgagagggcttcaggttttagaaggatcttcctttttctacagaacacgaccatgacgtctgtcatttctgtagttcctcaccttttcactgcatacatgtggcttgaaatcattttcattcctaatatttgttggtttgctcataggattataggagacaagttatagtttaaagttgtcctatagtataatagataaagagtttttattacctgttacccctgaattaaactagacaatgagggatggaaaaggctctaaagggcttaacaccaatcaccatagctcttgggcatagactcaaggcactggttgtttttcttacctacttctattttgataatcagagcttttctgttttctacatactctgctctttggttttgtactattgtgtttatgctaagtactattaagaacaatttcaattaaattatttaaagttaaaatctattttaaggtagatgtgtggtctttaaaaagtatagttaaaatttacttaaaatgcagaaaaataaccattctactgttgagcacatcttaggattgtttattaaaaatcactttaaaatgctaggttataaaaggtggattcaaagattttggagttttcaaaataatacctacaaagtttaataaagctcttttttctgttagtctattttggaaagcattcagactgtgcctgtaagtactgcttctctgtgatggttggaggcagggagtaaacagcctactgtaaatgggccccatgccagctggctccaggcagcctcaagcttgtgacttacagtcagggttaggaaaatgctttttaacttgttcatttccgtttctgttaaatgtgggagggaaggcacatcatttattaaataccatgcaagatcttgtaaagcttacatgtcttaaaagttatcagtaatatcactgaatctgaaaccctttaacaggaaaatttggagtttttagaatctatttaaccttctccttgttgaatgtacttggggtcatatttgggacttctttgacctgttgtcaatatattcagtttactgcctagtagtattttggggtgaaattgtatggtatttaagaaatgaggacttttttcattttgtttgtgtgataaaaagctaatttaaaataattattttcttatttaaaagaggaaaatgctcaatttgttttcaaagacacatcacacctacatcttagtttagagctgataaaccactttaactacctaactagctgagtatcactcccatgatggaaaaatggaagcgaagattctggataggtttttgttcttgttgaaaagctagtcaaaaaataattcttttcttgaatattctgtcaattattttgcaacttgggaaacatttaagtatcatgtaaccaaattattgactcaattttctaagattgctgtagatatttatttacaggaataggaagtaagggtttgtgtgtgtgtgtgtgtgtgtgtgtgtttacttgaaaaatggagagtgaaatttttcaacattgaaatttccaaatatatgaaacttgaaatctaagaaagcactttgttttaacaataagattttaaacatgatgtaatatagtaatttccattatagctcttttacttttaaatactttattccatgcagtaaaactctaaaagaccaggttggattattagaagcaattaaagcaccatgagttagtgtacttttcagtgactctaaactaacacagtttctagatgtgcatgaagtgtaccgggttttagatggttggttttttctgcttggtttaaaactatggaaacaatttttagaggacatggtatcttctagtaagctgtttatttctgctttctgaactaatatttgcaagttttcttgggtggtataactcctatttccccttgggagggcagcagaaatgtatggaatataggttaaaatttggattattggttgtcatttcatatgctaatgtattatttattaaaattagaatcggtggtgatgtaaatgattctaagaaactagtagacaaagtaaggacataaatgaaggtattgagcatgagtgacttaaactaattaattctgacagagacactaactagacattattttggtagtctgtgcccaagtacttagcatataaagtacatgtttgtcacccctaagtgtgggaaagaccatggtgagtgcaaagtggattctacagctagtcaccaattcagtcttcctcactagctacaggacttcccagggcagagtttgggagactggctcccagaaagccctcataatgttctgagaccaagatctgaaaagaagatctatgacaacagtggtctgcactgtttattttgtggctttaaagaacattttgataaaaaacaaacatgagaagttaagatttctaaaatatgaatgaaagtaacttttccctaattgagaacatgataaattgtaattagtaaagaaaaagtctcttggcattgttttataaaccaataaaatgcatcagggatagctaattcttgttgtttcatgaagttctaggttcactagggtaaaatttcaaagtatcagtcttagcaagatagtttgtttctttatagttgttacaagtgatcctaggagtcctttgcaactgtctgccatagagagtaattgagaaccaagaaacagtagtggggacaggagcttcttagctaagtgtactctgtcatcagagcttgataacaagttatgtaacatacacatgattatgcaaaatactggaaagcagtagtaaactaacaacactaaagtcgtggaatatgttatatgactacataacatatctttcttggcctgtgacctttatcacctctcagatttgctagaggcctctaatctgtctgctgttaacctgccttgagtatgacagttgtgaaactgggaagtcaagggactggctagttcagtgtagtatgttagaatactctcttctaactaggaagcaccacacacttccaagatggctattgctttaaaagaaaaggtatgtgtgcctttttcctctttcttgtcattgtactttgctgagaattgagaaccagtggtaatagggtggaaatgttttctgtaacagattattattatgaaatccattattaaagtcttaaaacacctccccctttgttagccacatgtttcacagcacaacaaggaatatatttttatggcagatttttctcttagatgttgttgatatagtactagactaaataaagacccagatcgtaagaaaatggttctcatctgagtgcccataatttacatcttggctctttaaatgtggttaattttttaaagccattatttcgaggcagacttttgaattgcagaccatatgaaggacttgaagattgagataagtaatgaggcaggggttaaatatcaggtagaggggttggattttaccaacactgttagaccttaggagccatataaaagcatctaacagaactgagggcactgctgttagtgttacaaacagcagtgctctggtcatacctgtatgcatggatagcaagggttcagaataaagacctcactgaagttgagagggatggtatacatattataaaggcagcaaagaatgattatgcttctgagctaggctgtcttgctccatactgtaccttataaatactactctggcagttagatataggataaactatgtttggagggaggtgactataccacactttagaggtaagagtgactgccagactgcctaagatctgataagaaacaaggcgagaatgagctaaagtggccacaaaagaaatggggagcagtttcagaaagctttaggaggcagttggttagagcaccgttggtttctatctttactcattgactggcttttcaaaaattactactcacctgcttgtctctaaattcagtgacactctctggtgacctactatgcagaagttccatgctatataccagtgtcctgtttataaagatttctttctaaggtttttgtggttcaaatctctcgggctcctttctgttagttcctttgttcttccgtgtttgcagagctctttcccagaccctcttctcattccattcctcctcctgataaataccatcagttgctttatctagtgtctcaaatctagtctctaacctcctgacctatatgtataactacctactggtatcttatcttactgacaggcctctcaaactcaatatgtccaaaatgcatttcctacttatggtatattctagttccttttgctcctttatccagtacctgagaaggtgcattatgtcttgttagtcccctgcccgaggctgaaatctagacaatactcaagttgccttttctcctccctgcctatagtttttaagatgtgaataaatccttcatgaagtgtgtgtgtgtgtgtgtgtgtgtgtgtgtgtgtgtgtgtgtgtgtgtgtgcatgcatggggtggaggtgggggtatcaaacccaaggccttacaaaggaaaggaaaactttctacaactgagatacactccttcattcccactttctgtctcaattggtcctacgttaaggcaggctccaatgatttttaagtggattactgagacatcttgactggcatccttcccatcttcagtgtgctccctattctgtactatagctttcaagcatgcagatgagatcagatcactactgctcgtaaggaacaattcaactgcccttactgcccctagggtagttggacacttttatgtggcttgtaagatattgccttaattaggtttatcttgctgagataaagaccttgatcaaaaacaacatggggaggaaagggtttatttgaccttaaggttgtgctctataaagaagggaagtcatggcaggaactcaaggcagaaactaaagcagaagccatggaggtgtgctgctgatgggttgttccctctggcttgctcacattgcctttttaaataacccaagaccacctgctcagggtggcaccactcatagtgtgctaggtaggccctttcatatcaaatcctacaggcagtctgatggaggcatttccaattgaggttccttcttcctaggtatctctctttgttggggagggggagactatccaaaaatcaaaacatgacaagtgtcatgatttggtaagatttttattagatatttttttcattcctcctcctccttttcttcttactcctcctcactcttctttttgtatttggttttaccatagctctctggttcttagttacacaagcagcatcaggtaaaggtcgaatcagacataggatagttactgccacaaagtgtgtgccatcattgtcctagcatattagatacataagctaaacttcttttaattctttctttcctgctgcagtgctttttcataataccaatctttagacttagtacttggcctccaaccatctttcctttccattccttcttcattctccaaaacctaactaaactatcccatcttcaagcaagaccatttctgatgcccttctctgtcccatcacaacacttggcagtcacctgtcctagcctttatctcactgttttacagctaaagaaaaacagggagtgtaagagcctgtgacctcacagctccaattgcacagtgactgggaatttgcataaaatgtctccaaggatgggatgcacggggagggaatgcttgggggttctgttttctatcaaccatccagtgagcagtcagggaaaatacttattaatgcataaaatttttctgtataataaaaccattttaaattgtcagcagaagaaattcggttttttcttgtgtatttgtttgcagcgtgagaactggaactgagagccttctacacactaggcaagtactctaaccactcagctacagcctgagcccgtcagaggatttcatattttatttaagctatcgctattttaacaaaaaggacatgtttacaaaatctttgttgagtgaagagccagttaaataaataaatgaacacatgaaaatgttcttggaaagatggaagaaaacgtctagcaaagttttcttttagagttaaatgtactactttcttaaaagtatttttaaaaagaaataaaatttgatgtaaaactcccaaaggaagagcaggggagatggctcaaggtaggactgttggtacaaacatgaggacttgagtctagagccagctggttgtggtcctgcatgtgcatgtaaccgcagtgctgtggtgggcagaggtgggagatcactagggtttaatggctactaacctaacacaggttcagtgagagaccccgactcaaggaaataaggtggaacatgatagaacaggacatttgatatcttcctttagtctcagcacatgcatgggcctgcatgccccctccccatatataccatgcatacacacattaaaaataataatatcaaagtcaaacccctactaaaagcaacttgggaaggaaggtgtttattccaccttatacttgcagcccacactgagggaagtcagggcagggcagggcaggaccctggagctgatgcagagatcatggcttctgcttactcccttgtccctcttggcttactcagcctgcattcatatagaacccaggaccaccagagggggcaccaaccacagtgagcagggccctcccatagcagtcatcagggaagcagtgctgcccagtgccagtcttaactgaggtttcctttccccaaaggcagaacttgatttgggttgatataaaactggcctctcatttcactaatgctctcagagttttgtacaatcgccctagatattgtgtgtctgcactcgcacatttataagatagctacctgcagatgaaggactcattctacctacatgttttatttattacgctctctaacttccgcctatgtagtatttttgtggtgattcctcatggaactgcaactaagctatatccagagttggcaggctatagtctcagatccatctggcccttaaattaccatgaactaatgatttttttaaggtttataaaatacaacaaggaaggaatggcataaggctccagaacctcctgagaagtcttttgctgacagatgtggattgattgagctctataccatctttatgtaggtgtctaacattgctttcacgttagctgtgtagttgattttcattatccatggtaattagattctaaatgtgggagtaagtatacaagaaagacatttatagtatgagagtctgaatataggacggcagtacctctcttttctctttggaatgaacttttcagtaaagttaaatttttatcactgtgtgcttatctgcagatagtcaggatgacactgcattttgggcattacaaataaattttaacaaataagaaaacttaaaaatataaagtcaaggtttaattaaaataagttgtaatcactgtgttagtatctaaaagtaaaattgccacaccttaagaacttgtggtcctctctccttttgtgtgtgtgtgtgtgtgtgtgtgtgtgtgtgtgtgtgtgtgtgtgtgagacagtctcgtctcatgtacctcttacactagcttcaaactcactatgtagctgaggttgcacttgtattcctgatgctctggcaggcacttaccaacgacctggcttcaaccttatcctgctttttaataattgagtggtatagtttatactttcagtgggcacttatcttaaaattattagagctctaaagtatgctagcagagaggttagctgatgcatgagaaaaagtcaacaggtaatctggcaaccaggcactgtaatcccaggactcaagagacactttgagagttcaacgcttgcctgggctagtgagagactcttgaaaacaccattaaaggaaaacgtttttaactggaatggttaagaaaccttgaaagcccagacatgaagtgaataataaagaaccacatgtttaataacgctcgtgttacccatggtagggcatgaggcttcagacacgcagtcagcagtggggaagtgtttaaaaggcctcacctgggtgtgtgcttaaaacaaggctcttctgaaaggtagacagtggagctgtactgctaactgaaggactttattttctaaaacaaaaaaagtttgagagattgcatacaagcaacatgttagctctgtcaaatatacagttacctacctgaatttattaatgtcttttcacagtaatgatttgtctttgaggtttagtctaaatttctaaatggaaatgtatttagggagaatagctttttgaagctgttccctcagtaccaagtatggaatgccagcagctgttggctcttgtttgtttgtataataaaatgaatttccagaagagtcactgtgtatcctctaatagatattagaaatgacacttagcataatggtatttaaaagtaaagaaaactattagccctttgtcactgtgatactctttaaaataattatcagagttggaacttcaaacttagggcactggtttaaggtgtgagtttgcaggtgcaaatgttaagtgtttttaaaatagaagtaagggggagatgtgacatcacctctagtttcagttcttctaaatcttcagggtgagactgtagagagggagtcctctgctcttagcttcccttgctcaagatggtagccacatgcagctggcagctcatcatttgattgccttaggatcaagggatgctatagggcatcctgctttgctgaccaaaactcatgttaactgtggaggaaaaaagggaatgccatacagttgggcaattaatcaccaaatgcaagggtgaatgcactgagtagagaaatgtaatcagagatgctaggaataatgaagtgaaatagcaggtggattactgaaaggtgtctgtggacctgatgcagtcaatcccttcaaacttcagtgactgttcccagaactaggacagaagcaattgcagtcaacatgaaagtaccacagtcccccaaaaagccaaagaaatcttaaacggaaaagaagatagtactgaggtacaacaaagtacctcactccaaattatatacagggccaacgtagcaaactgtcactatactggtatgaaaacaaaaactgtggaccagtgaaccggagtatcaagaaataaactgatagtagcatagctgtctatagtcttctgatgcacatggggccaaaacatacactgaagaaaatagcctaacaagttaaaactttacatctgcatgaaaaaaggctgaggcttgattttacctctcaccctgtgcaaactcaaagtggatccaaaactggacagaaactttggacctgctataagaaaacacagagggagacatgggacgatagatgcagtggcaaggactcgttcagcctgcttacccaggaccacttgccaatgagggacactgcccacagtgagctagagagctagagccatccacataatcaaaaaataccccatcggcttgcccacaggccaatttggtggaagtatttttctcagttgaagtatcctcttccccaaatgattgaggcttgtgtcaaattgatataaaactagccggcacatccaagaagtaatagcaaaaactagccattgcatgaaattagaatgcagaataggaaagaaatcagtcttcagcatgaagagacagcctacagagtaggaggaggtcttcaccagctagtcaccagagattataatccagaatatagaaagaattaaccatcaggaaacaatatctgaaaagtgagttacagtgcaagtggccagtggatccatgaaaaggaaatgtccaacatctgaagacatacgaggaaaagacaacatacttcagccaggaggactaccatcaaaaagacaagcattcctttatttttgtggtgcctgctagggttggctgtgacaagatgaagctaagtatctctctcccagaactggctgtcagaaactcattgaaatggatgatgaacgcaacaagcttcatacttcctctgagaagcaagcacatggccacagaagtagatccttggtgaagaggaaagggctctgaggtctgaatgggtgggattgacaaaaaagattttcctgtgaatcaagtcatcctgaccagagcatagcatgcctgttgtaactaattacttaccccatccctatctctctcacaaacttcctcctccatctccctccccttctcccctgaaagggtagaggcccctctgtgtgtccccccaccctgtcaatatcaagtttctgcagggcaaggcgcattctcctactgaggccagacaaggcagcctagttagggtagcagattccacagacagggacagcccctgctccagttgttgggggacccacatggagaccaagctacacatctgctacatatgtgtggggaatctaggtccagcccgtgcatgctgagtatggagcactcttgttataggctaagaagaactggagaaaggaaacacaagtctacttacgaatgcactcagtggccccaaaagaactagcagaacctgaaagattttcagtccctctaaagaaaatgatcttccctagtttgcagtattagacctggaactcccaagagaagcccataagcaaagagtaagtccaagaccaaagcacccaagaactagtgtcctgtcactccacatgtcctgtaacacaagcatggacaaattgctatgtagaaacaatacaataataaaactgaggaagaggctatagaatatgttaaacttttagccaaaagaatgaagaaagccaaagaatacaggaacatatatccaagaggcatagactgtcctcacagcttctactccttagtctgagtctagccaaaaattagtctttattttaaacaattgaaccttgaaaaaagtaaaatccagcaacatgtctactgtgttccttgtagtcaagaacagagtccctccttagcatccatgtgaaacaaaaggcaagcctgtgcctgtgatctcagggctacagaggtagatacaggacagctctgggactggctggtcatacagcttagccaactggtgagtccgaaatccattgagagacctgtctcaaaaataaactgagaagtgattgaggaagacgcccaactcagtgtatgtgtatctgtttgtatacagtgttcccacagcaaatagtggcaaggatggcaggtagttatattttggtgattattctgaggtgcagtaatatttatttcttttaaaatgctttgctaatttttttagaattccatatagtgtgttttgatcaccccacccactcctccctctaagtcctctgagattcacccctctcagttagttaaccactagaacagccctcagtgcacactcacaggagtcagtcagtgtacaataaagatgcctacaagcccatgtttgttttggcactgctcaaaatagtcaagtcatgaaatcactcattagtggaaggaaaaagaatatgaagtatatatattctttgactatgcacagccactaaaaaataaaattgttaagcaaaataaaccatacttggaaaagcaaatgtcatgatgaaacccattattttgtgtcattaatacatatgagttacaatttatataaaaatattttaaagtctgcaacttgaaaaatgttacaaattatttccccttttataacatgagattttgaactttatactatttatcttggtaaaacaattaaaccataattattacaaaatatttttatatctttgaacatgtaaatatttaagtaatatcatctgttgagaacggaaactgcttgttataaagaacttcactctctagaaagttataaatcatagcctatattataaatcatagaaaccaatcacattcaaaggcaccctcttaatgctcctgtagaaacactagaaatccactttcaacagccaggtaacatgtccctggaaagcagtcttacttgattatctgaatttaaatgttttctgttcatgaagaaatatgtcattccaaatattactctgaacactgaatgactgcaggatttattttcacaatagttttcctgtgagtgttggaaattttacatctcatcgttttgattttggtagtaaactctgtttattatttattattatttttacttattcactttgcatcttgctcactgctccctcctggtcaccacctcccacaacccttcacccaacacctcctctcctctgtgtaccctcccccaggtatcccctcaaccctggtacctcaagtctaggcacattctctcccactggggccagacaacaaatcccacatatgggaaacagcttttgggatagctcctgttccagtttaggacccacatgaagaccaagctgcacatctactaaatatgtgaggggacctaggtccagctcatatatgttttttggttggtggttcagtctctaagagccccaagggtccaggttagttggctctgttggtcttcctgtgaagttcctattgacttcagggcctgcaatcctttctcttattctttcataagagtccctgagctccatccagtgtttggctgtggctgtctacatctttctgcattagctgctgggtggagcctctcaggacaacgtgcttctatctgcaagcataacagagcatcattaatagtgtcagggattgttgcttgcacatgagatgggttttaagttgggctaattattggttagccattccctcagtctctgctccatcccctgtgcctgcatttcttgcacacaggatacattttgggtcaaaagttttgtgattggattggtgtctctatcattccactggggttcctgtctagctacagagggtggcctcttgaggtttcctatccccaatactgtgagtcacagctaaggtgaccctcactgattcttgggtaccttccttaccccaggtctctgtctagttctggatgtgttctctacctcctcacccctaccagttgcagatttccattcattctgatggccatctctcctgtccctccccatacctgattctgaccccatcccctccccacccagccccctcactccatctatctcttatgactattttattcctccttctaagtgaaatccaagcatccttgtgtctgtagagtgccgtatggttatcctgtattttatggctgatatccacttataagtgaatacataccatgcatgaccttttgagactggcttacctcactcagaattatgttctcaagttccaaacatttgcctaagattccatcttacacccatcagaatggctaagattaaaaacccaagagacagtacatgctggcaaggatgtggaaaagaggaacattcctccattgatggtgagagtaaaaactcttacagccattctggaaatcaatttgacactttctcagaaaactgggaatagttatacctcaagacccagatataccactcctgggcatatacccaaaaggcattctaccgtcccataaagacacctgctcaactctgttcatagcaactttattcataatagccagaaactgggaaccacctagatatccttcaactgaagaatggataaagaaaatgtggtacatctatactattcagcagttaaaaacaaagacatggattttgtaggcaaatggatggaacttgaaaaataccatcctgttgacatattttaagacttcattttagcctggtgtgatggtatatgcctttaatcccagcacttaggaggcaaaggtagtcaaatctctgtgagttaaaggccagccttgtctcctgtaagtaaggagagtctgtcaccctnnnnnnnnnnnnnnnnnnnntaaggaaggtacccaagaatcagtgagggtcaccttagctgtgactcacagtattggggataggaaacctcaagaggccaccctctgtagctagacaggaaccccagtggaatgatagagacaccaatccaatcacaaaacttttgacccaaaatgtatcctgtgtgcaagaaatgtaggcctccccccctccctcacccccctctctctctcttctctctctctctctctctctctctctctctcacacacacacacacacacacacacaactgggattgaacagttggtttttttctctcttaatccaaagaatgtccatatttagaaaaattttgattgtctacatttatagattgtgctagtgtctgattattagtcccctttctttcatagtgtatataacttaccatttccttatatcttctataatgaactgcaggggcttcataaaaccagactcttggtcttcctacttatactacagtcctaagtcacagcatgtttcttggcttctgattcagagcttgatctgttttccttgtatctttgctcaggatttctgattccatcctaaacagtttgagggatcttttcgttgttactgttttggtaatgtaatgtcataaaacctttacttgctatttccaatttctcttcgaatgtgattatcagatatacgtccatggtaacttttatacccatatgacagcaacatggagaatgcagtagaaggcaacaaacccctgggccgtaggtctcttgtcaggagctaccaagttgtgcttggaccactgcaacttggttactaatcttttctttggccccaaagtggcgatattaatataacccattctcaaagataatatcagggtacgataatgaagtcactgatgcagagagcatctatacgctgctagcacaccaggttagagctggcatcaattaattttcaggtcaggtgaaataactaaaaggaaaatacttaaagattcttaaggcatagtatatttctgcctacctggtctctttgttgtccctgctgttttgagcgtgtctgtacttttgaacatggcatcagtgagagcactcatgactcaaccattgcaccatcctagacaaacatcagttggatgtgtgccaggatacgtgataaaatacagttcccctgcttcttcattttctttgctatgaaactctgctgaagttcagcccatagcactatattttatttgacttcatagtgaacattgaagacatttgccctatttattgtaaactaaataattctatattcttcaacaatttggttttgtctttcctaacaattctactttttgaatattcaagaatatttaatagcatgttagtattgaataatgccatcataatttcaactctttggttagaaatatacagtacagggtacatactctattagaacagtctgcagttggaagacttactcttttttaaaagagataagatttgtggtatttgtgagtcttgtatatagatgtctcttaaaaagactagtggtgaatagttatttttatattattattgacattcatgttaaaaagtactcagtgtaaagctttgcaagttaaagaacatttctaattattgagttaacagagtcagccaagtcttaggtaaagcaaagttgagaataagtcagtttacttcctttagcattgcagcatccccttgctcattgaagatgtaacttgcttaatacatcctgagtctttcccttcacccaggagtacaacttgaacttcctatgtcatgggcctccactgttgctgcttgtattttcatagaaaaagctcttgagtttcctggctgcacaggggggtatggatgggtgagtgacaaaaggagaacttccggttttgcaacagagactgaagaaaaagaaacactcatctgggagaatagaaaacatgtagggaaaaggaaacttccctcaaactatcacttctatgtttagacataaaaacagtattcatcaaataataatagtgtgttgctttttagagaaaccttcagagactgcaactaagaccttggaaattgcaaggcagtgacacaattgaaaatcttaatagaacaagtgaaacagaaaaataagatgacccagaaataaaacaaataggaaagaatataggaaaataagaccagtctgagaattcaaaaaagaaaatgaaaaaaaaagacttaaaacaatagaaggaaggaagtcataaaaacgagggtagaaaggataatgaggagattttctgcttatttattttgaatttttaaaattaagtgaagtccaatatggtggtgacatgcctttaatctcagttcttgggaggcaggcaggtgcaacataatggtacactgtctcagataaataaataccacaaacaagacaaaaggctactactaataaaggatattatgaaccaaaacatttttacataagaatatttaagaagcttggagttttgggattcctagctagagcaagaaacagcacattaccaatacactggagggttctagagtgactataagacatcatcacactctgctctttctctataaaaataaccactaccctgacaaatatgacaaatatacccacactatttacatacttaaacctttgtccctggatttcatataaatagttgtatgtgaatcttatggatgcaatgtcattttttgttttctttgtcttaacactgcatactatggtggttgatcctgcaaggatagaactttatcctcagaggtagaacatgtagatgcttagatatctattccacaattgtgagctttgcctagtttccagtttttgagtctacagtgaaaaatgctgctgccagcatccttaaatgttttgtgatacatggctacttgtccattgatggaggtgctgaataaccagacttaacaagataatgtcagactgtcttccaaactgaatggacttcttaacttgcttcctcctcattgtttcttttctaccaaggttctaggtatacaagagacattcagtgtggattaagtttgagacttcataattacaagtgaagttgaataactttttccctcttgtttattagctatttagagtccctgtgttataagtttatatatgtgttgtgttgtttgcttgggtttgtttgggataggagaaaaagtgtccatttttcaagtgagtcttctattcttttatttgaaatccacatttgacttaacctaaagatatttctatgtggttggagtgctttctttcccttagacacagcttacttatttttgtctgctcacaggtcccttttagggtaaatatattttactgaacgtttgaatttttcaggtaagacttggaccttttttcaaaaagagttgtaacccagcctaccatttctctaaatagaagcctgtaaatgttctagctaaactcttgatcaacctttctgattttgataattaggtttcctcctagatattcctgctatttaaaaacattccagaagtctgttttgtagactattgcttatatcttctcatctttgaaatcgtaaacctcaaaaaattaaaaataaatggcatagcttttccaagaacctaggaaaatgagaataaagttaacacagggtgtcaattttagttagagcaatatctagctggtcattttattttaaagaatcgtgcacttcaataataatatagctagcaaatactagtatcatgtgctcaatattggtactgagagctctaagcattagatattcatcattagatttaaaatattttaaaatttaagatgaaactttatagacatatccttaaaggattaaattctaaataatctaattctttacaagagaaggcaagcaccacaaaataaaaacaaggcaatttttatcaactaaacattcaacagactcttgtgagaagcaaatgtgtgcaagggcctatatatgctcatgcattgcctactttactgggatcacgtgataggcagcttaataatacatggctggtatatatatatatatatatgtatatatatatatatatatatatatacacacacacacacatacacatatatagcagaatgatattgaataagttcaaggtgtacataccactgaactacataaaagaccatgtataaaagaaacaagaaaaaacaccattatggtacatatagaaaataccattatggtacatatagaaaatccttagctgattcattggatatccttaccttcctagaagtttatcttaagcaaattaaaattaaagtatgaccagtagctggagaatgattaaactgtgtctgaatcccttaacatcatgtgacctgagagtgggatgcttgtcttcagcattgatgaggccctgagttttactcccagcaacacaggaaccacagatggttactctgtaaccctagcatgtgggaggtagaggctgaacgaccaaaagtttgatccttggctccctagggaattcaatgccagcttgggttagacaccctgaaaaaaataagattatctatagatagaagttttctcaatttgttaactaagcaaataaacagtgcccccccaaaaaaaagtgaggtacacagcaattgcctctggttttacatgaaacaagtacatgggaacttgtgggaagaaggaaatgatgtgtataaggaggtctgctggtgaacagagatagccttattttctaaatgtttaaactataattctaattcagcttaggtcatttcattatttctcactgtatatttctaagtggatctgaagcaatattcttggagtagattttggattgggtacaaagaaacaaggaaaaaggtttcaggccttctgtattcagtaatgaggacaatagtcatgtagaatttattccatatttttcttcctaactggatgaagaaatgcaattgctttagcatgtacagttctatagtatatgatactgttcattattagcaagaagaaaagcaaatagtctcctattcaagatgtaatcctgtagcccacaaagacagttacccagctgactccagcttcccactgtagtggctatggagcccctgcttcctcgcctgagagcttcctcaaggtactgctgttccccattccttttggcttcagagtttgggtccatttcagcaattacagtgactttttcttccactgggttccattcttgagccctctgaggaaagccaacatttcaagtaaggatgatcctcaccggggttcctgccctcttccctgttcatagaactggcaggttccttcccaatgctaattaaggagggacctttcctaaccaccccactgtaagcataaaatagtttcatttcatgactctcagaactctcagttgtaaaggttcagatgttgcaatataaataaagtccatgattctgcaaccaagattggcctcaagttcagttcaatcaccatctcagccttccaaatactgctgttacagccatatgccaccaactctgattgtgtctgtgattcttattgtaacagactgttgcaaaaatggtcttggtaaagcctagctcttgcaggaatgttcacctaacagttcccagtccacttggtaatgttttcatgttctcaacagttgccagttttcaatattaaagatatgctggagaatcacttaccaacaataagacatttagtgtcaggctactaaggatttaagctctaaattaatggcttgtccttcatacaccaacttatgatccgggctttagcaagtggttttgtatcctgtcttaaactacggatgacatttttgaaacagccattgttttttggtggttcttccataacctccacccccaagaaaacctctgaaatgttttcttttcaccttattatagcataatgtagtactttacacatgaacacattttatgtacaattgcagagaaacaactacgtagtttgacaagaaaaaaaaaaaggctgtaattcaaaagttcactgagttattttgataaactcaaaaatactttctctgtagaaaacagtaaaaatgataaaaatttcccagtaatttaagccaaagtgaagctgaattatacatagattgttttaacttaagaatcccaaagaaacctgaccttcattgttcaaagagccatgttttacttaagtggtataaagtgcacacagcatgtcgtttcattagcttgctacagcattaatgcccaagtagtgaattggtttttgttattaaagcatattatttctaatttcacattgtgacattaagtgatgatttaatttaaagtttcagttttaaacattgctttggatttttttaaaatagtaaaacatactttcagaaagtcccaggtttgggagcttctgttgacaaaaatgttctctctgcagtgtagtgtccagtaactttgtttcctgtgtacagaaccaaccactcacatgagaacacaatctgagaaggcattctcatggctaatatttacatccttgcacttttcagtgtaaggatttttaaaatattttaatacttcgatgaagtaaaactttgagctttatttgtgtcagacagtatagtattgcacttacattttaaaattagagtattttgcctgcctgtatgtatgtaagtatactgtgtgcatacttggtgccatgcaggtcagaagagggtgtcagatcacactagaactggagttacagttggttgtaagccaccatgtgtgtgaaaggaactgaacctgggtcctctgcaagagcattcagtggtcttaatccctgagtcaactctccagtccctgggtctcctcttaaatatttaaaatagcttagagaggggaagacaaagttaaaagcaagtgctgttactgttacttggctgtaaatgctcatcacagttaaagctgccagacagcacatttccattgcattaccaggcacagtgccttctcagaaaagcttctgtgcccctggaacttttacattcagaaaaacgtctctaaaacaaaaagcacacacctatttttaagtttttcatcttcctatgttgtttctaaaatggtagtaaattcctttttagaagaaacacaagttactgtttgaactatagtaatctacactttatttactctgaaacaaaaacaaaacttgttttctattttgaaatttacaaaagtaaaactacatggtagcttatattgcttatcttctgaattgagaatatatgtgggtaaatcagagttcatgtgtatagcacacaacatgtatgtgctgcaatattagcctctgtaaattttgatatttacataccttaccacaaggactttattttagagcctgaaacaatttccttgtctgtcatttcaccttggttgttgtgcagtagatttctaccctacagttattactgcattatacatattctacaacaccatagctagccaaaagtgcatacatattccatattactctgctatagttagccaaaggtttgtcattggtatgtgctaaaagcgaaacagcaatcaacttgaaatcttgaattcaaattcagatattccctcctactagtgattgatgtgtagaacattctgggactggtgatctttaaaaacatccctgtgtcttagttgtcacactataaatgtgatatcttctctcaggttgcttcatggatcacagaatctgtctatcaagtacatagcacaaaatgtttaaataaatgctatccgtttccttctaattgagttgactatataaattatactttgatgccctttaaactgaataatgagaattacttggttgaacatcaggtaacaagttaacatgctcatactgtttctctaatagtaggtgtgtcttctatttacagatctgacagtgggaatagatacttccccctccagctcaggctggataatatatactaccttcattttacttaaattaactatttagtatctgttctacttttaaaaatgacttctctatagctgtttattttatttacgaatggactctgaaattcaaactccagcatccacccagtacatgagtccaacatagagtatacttcaaggctcccctgagatcaagaatggtgttgagcgcataagacatgtctctgcttctgagcctttgatgtgtagtctccatgattatagtgttttaatgactcacatgagttttaaaataaaaatgtgaaagcaagtgtaccagattaattcaatataataaggatctaaagaaaatgtaaataccatgagatgcttttgtatcattaagttacaaatattaaatatttaaaaagtaatttgttcctctctctccttgtgttcatggctggcctctacttctctattctctctctccctctctctgcctctactacctcttgactccctatcccatgccctgaataaactctattctatactatttttaaaaaagtaatttcttctctattcacagataggggaggatgtattagaactgaattttcatatttactacagtatatctctctggtgcccatataatcttaaaaacttcatgaaccttaaaggctactaccctccagacccctactaggcaaatgtcaggcatagctgaattcagatccaggtagtgttttatgatacaactttgatttttaaaaaatagcttaatctctttattcttgatctataaattaaacttagaattatttatgtaagttcctagttttgaggcttggcatatagaattacagtctgtaacttgtaacatggttattactgtgatgggacattttgtttataacctatcaaaaacatcttttcagctgggcagtggtggcacacgcctttaatcccagcacttgggaggcagaggcagacggatttctgagttcaaggccagcctggtctacagagtgagttccaggacagccagggatacacagagaaaccctgtcttggaaacaaaaacaaaacaaaacaacatcttttcagccttttagtagcttttccatccttctagaggctccttctttacttctcgatctagtagtgggaataatgtgtctctcctctttatcaaatatgtctattgtttctataaatatccaagggaggagtcagaagactcattggcacaacagaaactagcagctcgtgctaacatgagaattaaactttagcctttgatgaggtaaagaaaatggtctcaaacaaaactgaagcctgttctgagggattttccttcatttgtgtgaaatatagatacactgctctgttgctttctgttcttagagatacctctggaaatttgaagctatgctaattgtgcagcccgagatatacattagtttgtggactatttgaaaatttaacacagttataaaataattctttgcctttaaaatgatagaactaagctcaaggagttccctacttttactttgtgttactgagacgtaaagtaaaaagcattgcttctcaatttcaagatcgtgattttgtcaccgtgtagtggcagtactgggtcaaaggttaatctaatataagaaagaccacactggtgtgtaggaagcaagaaggcatgattgaactttactaattaattgtctaacttaggcaaagccagtgtctacacctgtaatgttagtccttttaataaagaatgctgtgtagtacttagcttcaagcttacagagtttcagctctgtattggatataatcttataaacacctatcatattaggtgcttcaaattctctcccaggtcagataggatattttatttagtatatttatgcatttttatttttattagaaccacatataagaggcccatcatgtgaagaggggcgcaagccatggccctgggcctcttcaaaggagttactagtaggaagaatacacacatatctaaaggcaccaaggccactgtgtaaaatattacacagtgattgagtcccaaaatcttatggttcagaaatgccacagtagatgcatcatgataggggaacaggtcttagcaaagactcccaggaaaaacatagtgcatactaggcacttcgtaaatatttatacaacacaggttctctgaaatgacacaccaaatggtttatgtttgtagaaagacacatgattggaaaaacgaaaggggccagactgtgagccatattgtgctcatactgtacacattggaaaagcccctagacttttaattaggacaggactgactgtcgacagtgatgggattggttggaatggaaagagaaaaagctaaggatgggacaacttaggataaatcactgcagtggtgaaagatgaacatatttaaggtggtcacagagaggacaagaaagagaaaattggcatcgtgtataaggataaaaaatagaacttgggctatgtctccaaaacaaacaaacaaaatagtaataggtaagatatgagaaatgaccaacatggcaaaatctcttttacatgtaggctaccaagcacagtaaatgattcagatctctctttaagggtgtgatggtgtataccaatgtgatggtgtatacctctattcctatcatccaggaggattctggagtaggattcaaagttccactgtcgcagctaacaagtgttagttgcaggatgataactttattcttggtatgattttgcaggttcatgtggactgaaccaagtcaccatcctatttcgagttgaagtgcacttcaaagatgtgagagagtagtaactgaccattgcctccctcatagccttgccttctgtgaagatggcacgcttatgattctatatgacaccttctacagttcagatactagcaaatcagttatcctgtgtgttcttaatagtgaagaagcatcaaatgtagtaaaggcacatcttcattctagaaatagccatgtaataaaaactttgattcattgtccttaccagtcttccttcatcttataccattgcttctccttaaaacttgtgcttcttaacaaacactcaagctaacagaaccaagaacacagcatgagaaagagagtgcatggaatttacaagatttataatattttctcctctataaaagatgacacagttgttaagaggtaaatttcttagcataagattcaggctcaggattgactgttcatgagaaagaaatacattgtttcttcctgtgaagtagattagactttaggtgaccaatttattctcaaatataaatatataggaccccaaagccatttacaggtcagagtttactctttcttgctgaaacccacttagaaaaggcggcctgcttagttggagcatatgagcaaaatactttgatttttatggtcaagcaaatgatgcccagagaaccagcaggattctttatgtacacctaaaagtgaaacctttctccataaatgcaaagcagagagaataataaccagactgctttgtattgctaagatcaggtcaaatgtgtcctactgaaaccatagaacagaaatgcggtgaaagtcttccccttgagtacttctgtgttggtctgaaagctaatacatagcgtattattaaacaaatcagtaatcttttagctaaagcaaagataaacagaaagtcagaaaatatagtcacctggtgtgtgcagctgagtgtttacatttttcctaatgaacagataagaaaagtacaggttgattttaatgtgtaaaattcagcttctactgctagccctagaggggaaaattaaattactgactcaagctaattctatcgttgataaccaggcctgtaaagtctctggcttctactccattttgaacctctctttggacttgtctgaactcaaaactacagaggcaacatcaatagaacaatcatttcttttaaaaaattttattagtttgtgtgtgtgtgtgtgtgtgtgtgtgtgtgtgtgtgtgaatttcacatatgactgctacataatattatcctcctctccaactccaccatgtcagcccctgccccaattccttctctagttcacagcctctttttcttcagttattagtggtgtgtgtgtgtataagatatagcctgctgagcacattaccgctgctcagatgaatgtcttttagggatgactacttggtatttgataaccaattagagggcatgtgccatcactgacaaagactgattctctttcagcagtagcctgtagccatgtttaatctagagattaaaccctatgagatatccttcttccacattggcatgtcagctgctcttgtcattacttgggtcttatttaggcaaccataccattgagatttcatgagtataactgtcctatccatatagaagatcctatctcagagctgctcctgtcctctgtctcttataaacttcctgctctctctgaatcttagctgtagggattgtgatctagctttatcactccagaatgggcaccacacactttaaaaacgtttctagctcttgtctgattttattcattcatccatattagtttatgtgctagaaacttgggccaagtttcaaggatctcaccactgctgacacctaaactaggccattctagtaggcggctgtcttgtgcaccagagggtgtttaccacgtcttgggcctattatcccttgcaaaactagcttttcccccatttgtgaggaattaaaaacatcttcagacattaccagatgtccctaggaacaaaatttgcccctattgagaattacagtccgatagcatttgcacagaatgaggagccaatgagaataaacctcctccattagtggttgttaaaattaacccagtgatggcagctgcatttccagggtttccccatggtagttaatacttgtttctgaggtgggttctggcactgcactgaaaaattactgatttaaattcacctaaactgaaggcttaactcaatcacaacacttgggtttataaaaggttaacatctcctgtcctgaacaaaaaaaagcttcaagtttagtatacaataacatttctttttactcagttcattactatcccatgtagaaataggacagtagaggatttatagatactaaatgattaccacactcttatattatcaccacccatgttctccatgacagcagttctcacagtgtattcaaatgacccctgagaatctccaagaccatatcagaatatttttgtgatgacacttgcacttgtgaacttaacattttttttgtatttttttatttactatcacctcatttaaagggtgtcaagtccactgagcatccttgagaaagcaaaaagttgttcattaaatatcaacccacgtatctttaatatgtgacaagatagtaagagacaggagtacttgcactgttaccaattgatagtggttatcagaaatactggtgaaatacgcagttactataatataactttaatttctgccatagctttttatgaaagatatttgttattttccttggaactaatcattttgttggaccctacccctccttagtcaaatttaattaatttatttatttatttttaattttattaggtattttcttcatttacatttctagtgctatcccaaaagtcccccatgccctctcccccactctcctcccacccccactcacacttattggccctggcgttcccctgtacttaggcatataaagtttgcaagaccaatggacctctctttccactgatggccgactaggccaccttctgatacatatgcagctagagacacgagctctgggggtactggttagttcatattattgttccacctataggagtgcagatccctttagctccttgggtactttctctagctcctccattgggggccctgtgatccatccactagctgactgtgagcatccacttctgtgtttgctaggccccggcatagcctcacaagagacagctatatcagggttctttcagcaaaatcttgctagtgtatgcaatggtgtcagcgtttagaggctgattatgggatggatccctgggtatggcagtctctagatggtccatcctttcgtctcagctccaaactttgtctctgtaactccttccatgggtgttttgttcccagttctannnnnnnnnnnnnnnnnnnnatcagtgagtacatatcatgtgagttcttttgtgattgggttaccttactcaggatgatgccctccaggtccatccatttgcctagaaatttcataaattcattctttttaatagctgagtagtactccattgtgtaaagtaccacattttctgtatccattcctctgttgaggggcatctgggctctttccagcctctggctattacaaataaggctgctatgaacatagtggagcatgtgtccttcttaccggttggaacatcttcgggatatatacccaggagaggtattgtgggatcctccggtagtactatgtccaattctctgcagaactgccagactgatttccagagtggttgtacaagcttgcaatcccaccaacaatggaggagtgttcctctttccccacatcctcaccagcatctgctgggacacttcatactcatcaaaggtaaaatcttccaagaggaactctcaattctgaatatctatgctccaaatgcaagggcagccacattcattaaagaaactttagtaaagctcaaagcacacattgcagctcacacaataatagtgggagacttcaacacaccactttcatcaatggacagatcatggaaacaaaaactaaacagggacacaatgaaactaacaagttatgaaaaaaatggatctaacagatatctacaggacattttatcctaaaacaaaaggatataccttcttctcagcacctcatggtaccttctccaaaattgaccatataattggtcacaaaacaggcctcgacagatacaaaaatattgaaattgtcccatgcatcctatcagatcaccatggactaaggctgatcttcaataacaaaataaataatagaaagccaacattcacgtggaaactgaacaacactcttctcaatgataccttggtcaaggaaggaataaagaaagaaattaaggactttttggagtttaatgaaaatgaagccacaacatacccaaacttatgggacacaatgaaagcatttctaagaggaaaactcatagctctgagtgcctccaaaaagaaactagagagagcacacattagcagcttgacaacacacctaaaagctctagaacaaaaggaagcaaattcacccaagaggagtagatggcaggaaataatcaaactcaggggcgaaatcaaccaagtggaaacaagaagaactattcaaagaatcaaccatttgaggagctggtcctttgagaaaatcaacaagatagataaacccttagccagactcactagagggcacagggaaagcatcctaattaacaaaatcagaaatgaaaagggagacataacaacagatcctgaagaaatccaaaacactatcagatccttctacaaaaggctatactcaacaaaactggagaacctggatgaaatggacaagtttctagacagataccaggtaccaaagttaaatcaagatcaggttaatgatctaaacagtcctatatcccctaaagaaatagaagcagtcattaatagtctcccaaccaaaaagagcccagaaccagatgggtttagtgcagagttctatcagaccttcaaagaagacgtaccccctccttagaaatatcatagcaacaatatttgcagctttattcatctatttcttagaaaaatggtcagtatagcccaatcagttccattctgtgtgacaaaagctggtttttcccactgatgtctatggcacacagccttccgtgcagcctcccacatactgagttcttatccgctacatctagatggcttcctgaagcctgacttggactccagattcttgccttttttagttctaactctgttgccatctacatagatcacacctcagtgacctgaacataagtttccatatatcctaatttctatgtgatcatttggggtctactgtcctagatttaagacttaagatttgtttcccttaagaaaatagtgctgggcagtggtggctcacacctttaatcccagcactttgaaggcaaaggcaggcggatttctgagtttgagcccagcctggtctacagagtgagtctacagagaagccctgtcttgaaaaaaaaaaaaagaaaagaaaaaaagaaagaaaatagtgaacttgtatgtttcaattctttgctgcaagtactagacatctaaacatgttcacaggtgacacttctcagcttcctgataaaaactagagctcatcagagcagatgattcccaaaagctataggactgtcaagtgggactgcccagaccaaaacaaatcaggattctccctggtcagccacgtgctactgtttacatgacctcaactagggatggtcgcatcttatcacaaggttgttcagaggataaatgagattcccttatggaagtgttctgaaaccatgatgtacctaaatactgtttaaaagtcaaatatatacatatattttatatatgtgaatattatgtttaaaacaggcaaacgaaacaatatagaattgaccttaaaaatctttaaacaatgtgcttattttccataaactaaatatacaagcaacttgctgatccctaaaaatagatgtcagatgagaagagattggctgaccaggaatcggcgcgtcctcagaacagaagctctggaggctttgctcccctagaacattgctactctgtgtgctcaccccaggaccatcgcacttcaatgtggaactctgccccaaagcagcagctttgccttacaagcctgcattaaccagaggctgtgcccgaccgaagcagtcatgtctggacagtctcttccattagaggttcacactttgcactcagtcctcttgcccaaacccagcaaggaatcaataccttgtgatatggaaacaagcagacagtctattgacagtgctcaaagaacaatgtgaaacctattcccagaactagatggtgggagtgctgcactattgactaagctactggataaacagacagttggcagcatgcaggaagattcatttgaggattaaatttagggtgaaccttgggtttaatgacttacttaatagcattctaacacatttttgtttgtttctgtctttcttgagacatggtttcacagggtttcccagaactggcagatcccagaccaggctcaattttatagcaatctttctgcttcagcctcctaaatgttaggattagagggataagtaacaactcccagctacagttactattttttaatttttgttcctaaagaagcaattgaaaaacattgttatttctaactagagaaagaacaatttttagttgtgaatgtattaatctttttttttttttttgcatttgaggcttagcgcttcgctaggctgaaataaaagcatgcataaaggatgaagagacaagcaacatccagtctagcttattcctaagtaccatctcttagcaaagttcatagaaagagagtgctgatgtgtgtgaactttcctatataagtgataaacaacatgatttaccatgaggagttccacacccgacgagttgatactattcatagtttttaaagtctgtttgagaggctagaacaagacgaggaattggcaatataatcagaagcaaaaggctagattatttttagcaacacatatgcttttgttccagagtcagcatgtatggcaaaagttccttaggacaattcaatattgaaaatcattatcacttaatataagatgtaatagctaatttatcaatttttcataaaccttcgttgattcaggtaaaggataaatatccattgttcttccaaattctctgaaaaattaaagactttgaataagaactttaaactaataatatatcttgcttattcccgtgctggtaagaagtttgcagaatgaaagtgagccctggtcagagcagcagactcggtttttgttgttttctcaggatattctgattgagagagagcaggacggttgtactcagaatagaaaactagagggtttccaatatacatggtaatgtttctaaactaatctttcccaagtcacaagaaactatcgtttcagctaggatcaaactctaaggtgctatgtggttttttttccctatagtagagagcatggatagaatgataatgagattaatgtaagaacttaaaaggaaaagaagattgatgtttaagggttagaaggaatttaggggtgtggtagagatatcatcctttcttggtttttatggtaattatgggtctaatccatttttttaatcttgccaatcacatacttagaaaataatgcatttttaaaaaatagtaattatatgttaaatgaaccacaacatcattctgtttagaagccagagaactaattggctcttgcactgagtattttatttactgttgtatgtatgtttcacatgcatgggaatatgcaaatatgtagagaccagagcagcacatagggcatcttctatagcgctccgcctttctgccttgagacaggcatgaatggtaacctcactgtctgtttgtgagctcttcatatccacctgactctcttcctcaatgctgggattataggcatgcacaattacggccttctttttaagaaagtggtaaagatttgaacttatatcctcatgcctgctaggcaaatgatcttaaccactgtaccatcttgtccatttaatgcatttcatatttcatacagaaaaatagtatattccaatatattgaaatcaggtattggtgcttgttagcacttaaaagacagaattcagtgtgaacatgctgacatggaatgagaagggggaagaaatatattctgacattcctttcataatcatgccaagcataaccctgtttatgcttcctatagccctggaatgagaccagatgtgagttctcctccgtccagctcctccacagcaacgggaccacctcccaaactctgcctggtgtgctccgatgaagcttcgggatgccattatggggtgctgacgtgtggaagctgtaaagtcttctttaaaagagcagtggaaggtagtgtgtgttttgaagagtttaatttttgttcctatttctcacagtaaatgtttaactgttcattgtatacaaagtccactaatgatagacattagttcaggtgcaagcatggtggctcttaaatcctccattgggaagggacagaagtaaggagaagaactagaataagtaattaagttcagcctgagaaagaactaaagcaagcattgtaaggaacgctgctgcacggactggcagtactctgagtctgggcagtccgagaatggtggcttttcattccctgtaagcaagctggcttcaaagctaccagctataccagactgacaaaatcagtgaccctggggaggaacaataagggagggacagcattctttgctttacttttttcctgttaaataaataaagaggtcatgttaagtaccacaatggctgaggccaaattaacaaagtacagagattatcagataggtgaagtctagaaatatggtgtttgaaagaagatgactgcaaggtgatcatgtgttgacgggttcacattccagagcagccggttaatattagagatagtttatataccctacccaaaagtatcttaatggaattaaaccagaaaataaagctacattgatctttcaatatactacaattcacagcccattgttcttatttaaaatgaactcattcccttatttttatgtaaaaataagtattagctatgctatttataaaatgtttaccatttagttatttcagcaaagcgtggtggctagattacattagtaaggaagcctttagctgtgtacggtgttaatgagtaagcctcttggctcagcttcctccctaacttgagtttcagtgttctcaaaggcactttccagctctaacattctgtaaacccttgatactctaattcaaggaaaaaaatttatctagacttgtaaaatccataacatagtttgtagcatttcatttttaaaattattaaattttatttgatattacatacattacatatataacataacattttaacacatactagaaattatacttaaaccctgtattggcattataaatacccaaacataaatcagagttaagttttacacatttgttatttatataagacaaatctattttttaatccaagatcctatgagttctccatgtccttatgcccagctggtcctttttacttgtattcattttacctacaagtatctataactgtattggtagaccataagtggatagttaccaatgactcttcacttgccgtgtgtgaagtacatgcatccaaaatcaattagtggccctgtgaacacttagatcctgttaggatctgtgtctgccagactagcaaacaggttcagaaagttgaagtagccaagctgggattgcaacaaagtggtctccaagtaaggtcttattctcaacaaagatcctcaaagatgcatctgacaagcccttgatacctgctagattataattcaggtagatgctgaaataaaagtaatcacaagagatttaactattagctactatatactgagtagttatggtgtgttgagcacagtatcgtctgcataattacttccaagcttggcaaattttctaacagttcataagagaacaaactccaaaaagttaatgtttccaagatcagtttcttggcatgccactataccactgctactgagaactgctatagaagcgtaagctgatagtattagtttatacttaatctccaggtactcacagtacagtctgtagcctgcatcttttacatgtgttgtttcccatttcctataccatgttgttctatgcaacattttattggtcataggatccagctttggtatgattctagaaaggattacactacaccttattaggagacagatatcactggctatcctgtaagctggctgctacaccaatcataaatagcaaggcactgtcaagtgctaaaactagatttagccaaaagcaccaacaaccaacagcattaaagaggctttggatgagctgaaggctcttcccttgacattaagaagttagaaaggaaatttatcaggtggcagaaaacaaaggaattccagatgactgtcttaaaaagacatgtaattggtagtacatggccattctcattctttgtgaaataatgaacactagctcaaatcccctgttttgttacaaggaatgaatagactagtggatcattctattatactaacctgagcctatagctaagattctcagttatactacacactggataaagaaataaatatcagcataatacacagtcaatcttttagttagacataaataaacactgaattttttctactctagaagtaatttttccccagtttttccagcaacactgatataaggattctctgaaagacaatggatgtaggggtgtttttatggggtaaaattttagtgctttaactgtggatacaatctgttgtttctccttttgctgcatgatggaagtttttaaaaagaatttatttatccttatttatatgtataaatgtttacctgtataaacactgtgtgcctggtacctgcagagctaaagggcatctggttccctagaattggagttatagacagttgtgacctgctgccatgtgggtgctaggaactgaaccaaagtcctttgcaagagcagcaagtgttcttaactactgagccatctctccaatcccatataataggattttattgagttagttcttctattttgtgtttaagaaaacaggaggcttataaaatacagaaagtatttgaaagagctagcatagatattaggcatgggaaagtaaccctgaaataaagccattatataacttaactatatagctaagtgtatatatatatatatatatatatatatatatatatatatacacacacatacatacatatgactattagtcaacttcgtaactgtatcttcacaaaagattagactaatacagttaactatgtactccaaactcatatttaaacaacatcatgattttacatatcaggaaaaactaaatgttttttttttaatccaagtcttagattgccctaataaagaaaaaagtctcttcttagaaatcaggtctatatatgttccaactggtgaactgactgttacaattctttctcatttctttgaatatgatttattctaatataagtaacacagattgttaattactggtgtatctatatagacagttaaatcttgtgtaggaagcttctataccccaccccagtcaaatagatccttcagttgttttcatcaacatttaatactcagattaaagaagacagtgcatgtgggaaacagaaacacttttagccttttcctttttaacagtcttagaattttttgccaggagagaactgaagttcataatatgttcttcagtagtggataccagaaaatggagccactagctagcattaagtcagtatttgaggccaaaggtgactccatgcatctttgtattctaaaagtatattaaataatgatctttgttagtttgtttagtttgccacatttgtgatttacctaaccagtggctagaagttggtaacattttacttcatttaaaattgggaagaacttcttttacctacacatgataatgttgagtgatgaattaaagtcatctttttccttagggattccaaaagaaaatttaagcctgcttccttttagtcacttcaacaatagatcagaattcataataaaagtaataattgcaaaccccatttataactgttaaataactatagaaagcaggttttaaagtttgatcttagagtattcttatgatttgaatacatatatatatgaaatactgtagttgggttgttttcattgattttaaattcgttaagcagaacaagtcctctcaacattgtaattcatgcagataaacagacttaacatccttagtcagtgactttgtgtcttgatgatagtctgctcaaaacaaaaacagaaaggggataggctttttcttttaaaatatccttacagatctgtggaattttaacaatgcccttttaatctcttataggacagcacaattacctttgtgctggaagaaatgattgcatcattgataaaattcgaagaaaaaactgtccagcatgccgctatcgaaaatgtcttcaagctggaatgaacctggaaggtaatggaagcttaaggaactgtctgcctgtcacatgagaactgatcctttactttataaaagctagcaagtgaaccatgtaatgaactctatatatgcttaattagcaaaatgttatattaaaatggttttttccacgatcatatcattttgtgtgttaattcaactacttttgttatatacattgaatttgggacagccatggtgtatattaagtaaagagattacataatattgaaaattacataacttggagcaattttgttttcatccttcttactccttttttaaaactcaaaaccatttcctaagattggaaaagtattgtacatgagatctagttcatattcctctcttactttgcacttcaaaaaccaccacaccttttacttgaaaacatatgttttattacaactctgccaacaacattggatgggttgttttatggtttaagtataaaggaaaagtaaaaactacttgtaagttataatttgatattcctgcttatataaaaagttatataattaacacttatttaaaaacttccctctggaaacgtcagggttttgctgtagtggaaatagcaagctctgtgaaagtagcattcttcctaactcatgttgttagtattgactgttactgtggtacatcatagcaaacgctcagcaaatataaagagaatacaaatttagtacctgagtctgagcagcttactttctgtttatgctacagtgtcaatcacaaaatagtatggcactctacaaaggcaatactattacaggaccaagacggaaggccatctgagcctgtcctgaaagtcagactcatcctggaagaagtagcactgagctgcaaatacagaccttgaggaggaattagatagccatgacagagacgtgctcatagttgtactttataaagagcagtctttgggatagacaaatggatcggtggcaggggatccaacttcacttctcagcacccttatttgctgagaactcacagctgcctctaactgggaattgaactcagcatctctagaagagcggtcagtgctcttaactgctgagccatttctccagcctgagactcaaaagtttaaggtgaacagtaaactcttggttccctgttagaggaaacaagtcctgggagggaattcctatagagaatcctggaattgggagttccatgggtaaaatcacttgctaggcacgcatgaaagacccaagttaggatcccactacccacttaaaaagccaggtctagctatgctcttgcctattaaccacagaattttgaaggataaggtggagacaggagtgtttctagggcttactggcctacctccaagtccaacgagagagcctgcctcaaaagagtgatagacttggatacccaacttcttcccctggccttgagtcatgcacagatgtgtgcatatgcacgtgtacatacaccacactcacacatgtacacacagattcacatagacatgccaaaagttttaaatagtttacttctttcaataatagtgtcagaaattaaagacctcttataacttgaaagtataggctacaaagttgatttcgtatatttttttcttttttcaatattcacagctcgaaaaacgaagaaaaaaattaaaggaattcagcaagccactgcaggagtctcacaagacacttctgaaaacgctaacaaaacaatagttcctgccgcgctgccacagcttacccctaccctggtgtcactgctggaggtgatcgagcctgaggtgttatatgcaggatatgacagctctgttccagactcagcatggagaattatgaccacgctcaacatgttaggtgggcgccaagtgattgccgcagtgaaatgggcaaaggcgataccaggtaaggcatgaaggatgagccacggcataaatctttgtgttttattgaataaatgcactctgagttgggcttggtgaataacttcgtgacatgccatctgcttatcatacacaatccttggggtcagtctgcagcaccctcggaatagagctgctctgagactctaggcggtctgtcctcctgacggagctcacggcagagctggtttcttttactcacaaggacaaaagagagatccaaagtatactggatactgttccctgactttcaggttacacatagtgtctcattttacataagatcttatattatccgaactaaaattccattcacagcgacacctggaagacagcatttagaaattccatttattttcattcagattgtttttgaagttgataaacagcaggttttgttgactttgtcaaaatttactaacacaaagttattttaatttttcattaaatgaaatggcatctactgactataaactttattctagctttaaaggtatttttaaacaagtttcatgttggaacttcgggtgcagcagaggccaaggttaagcatccgcccttactttacagatagcaaagtggttggcacgtttatggctgcatacacctaagctgccatcaccccacctttttagcaaaagaagatggatgtcaggaaattttaaaaatctaaatctgttaagaaataggaatcctaagcaaagactctcggctttctcttttactatatattctactttgtgtgcacttaaatggacaaaattggccaaaaaatagctattcataagtgtttttaaatcattaaagagggttgagtgcccaggcgttgatctggtcaatggctgtctactaaagatcacatccaaacaaggccaacttgtcaactcgagtgttccttatacctttatttcccatctaggattcagaaacttacacctggatgaccaaatgacccttctacagtactcatggatgtttctcatggcatttgccctgggttggagatcatacagacaagcaagtggaaacctgctatgctttgctcctgatctgattattaatgagtaagttacatggccttaaccctccacaaagaactatagcaactaagcagtgctgacaacaggagaaatggttttccccagagactaatacatcagttggttatccagtaccattggtcatccctagaagcatgcatacaagtaacatcatgcatactgagcaggtttcacttatgtatttaggaatatatatatgaatatacatgcatgaatgtaacagcaattcatgcacaaagtggccatcaatttgaaggagagcaaaaagaggaatgtgaaaaggtttagagagaggaaagggaagggaaggggcaaatgactttgtaatctgagaaaaatgaaagaattttaaaataaataagcagactaaaagacctgtaaaaaataactaatcccctaatgtttccataaaagtatgctgtaaagattccagaattagatagcttattgagttctgagtatataaaggattcacaattttgttgtttcaaaacagcaaaaacctagtgtcacatgtaaagggttattattgaatagtctctccatgttctccaacattctagttctataataggttattgggaatagcagtaggtatgtttgcagccatgacttcataaatttaaaaaccaacccaaaattcagctaatattttagactagcactatttctttctaactcacatctgtatttgtgtctcccaggcagagaatgactctaccctgcatgtatgaccaatgtaaacacatgctgtttatctccactgaattacaaagattgcaggtatcctatgaagagtatctctgtatgaaaaccttactgcttctctcctcaggttggtggaccacctactcacttttaactttcattctaaatatggcaaatgcatgtgaaagttgtataactatcgtgcatatatgtgtatatatatgtatgtgtgtgtgtatatatatatatatatacatatatatatatatgccaatttcattgtgttttcctagtaagatgatttttagaaaggcaaactgtaaaaagggtatatatatatattaagtgttatcaatattagtaaaataaataggtattgtagatctaggtgtgggatctgcccagggatctctggtgatgaggctccatatagagtcttccttcctgctacccattcatctatatctatataagatgtggagaaagaatgccaacagtaatgagtctgtctctctactgtacgagtgtttctagataaacagtgacagctaccatgaatggggaatagctgagaaaataatcannnnnnnnnnnnnnnnnnnnaatgtttaaactttagactttagcaagactactttatattaaaagtaaaaaagttcaaaaaattaaaggaatcttgtctatattagttaagtaataaaaggaaagtcatacctgatattctcttaaaatatacaaagatctcttcaagtcagcaattgaaacaacccagtttttaaggactgggaatatgcaaagatgacttattaaataagatagaataaagacagtaagtctgtcacattccataaggacatgtctagaatgagccaatccagagtagtgagtacaccaaatactggttgaggacacagagtacaggaattctttttcactgctgaaagaatagcaaagtggaatgaccatttcagaagacagtttggtagtttcctataaaggcgaacatagtctcaccatctggtgtagcaattgcttgatcagtatacaaaggaaatgaaaacttatgcagcatggatatttatagccaagctgtttgtatctggctcaacttaggcgcaatgagatatatcatccagtagacaaatcaataaactgacatatgcaaatgatggtattactcaacactgaaaagaaatgggctgttgtgccaataaaaaaatattattgaatcttaaatatatactattaaaaaaagtaatttcttaaaaagaatctcatcaactctaagaaacagatggaggcagatgagatgacttgtgtaaaatggaagctcaacatgcccagcaagccaactttcctcagaaattttacaggtgcttgtggtgaagataagaggaaaactctcccatttttatgtcagttagaaagggggataaactgttggaggtacatgtagtatttccaaagcaaaagcaaggcctgccctataagagaacctcatcaagaccttatctgacatggagcaaaggcaaataaaggattctagacccttataatagccctcctgacttcacagggaagaaaaggggaaaatgggtttccaggaagcatttgggtgcagtaaaagtgaaatgtaatcttaagagaaaacatttcattggagccttgcttacagttcccagagcttagcttagttcattatcgtgatggcaggcaagcatgattctggaaaagtagctgagtgctacactctgatcggcaagcagagagagaaagagagtagcactgggcctgttgtggacttttgagacctcaaagcttatcctacagtgtcacacagtaacagggccacacctactcaaataagagcacacctcccaatccttctaatcctttcatagctcccctccctggtaactaagcctatgggaccattcttattcaaaccaccacagtgcagataaccaacattaaacacagtccagagcctagccagattaccatactatcttccaccaaatgtcttaattccatcagttctgatactccttgtctagctttcaataaaaaacaaagccagcattaaatctgccccaaaccactggcattatcacattggaatttaaaataactgcaatatttttgctaaggacactacaggaaaaataaagaccacatgagaattatgaatgaagagtcatagaagctaaggaggttcctctaagggagcactagagataacagatgctgaaatgataatgcacagtgctcctagcaggcagaccatcagttgtcatataaccaagaaagagtgagcatagggcaacaaaaacctcctagactcaaataaaaagagggaaaagaataaaaaaaaggtgtagagagatcataaaaaatattttaagtaataaaagttcaaaaatttctaaaattagttatatgtaccaaaatgtggatgcaggatgctcaaggataaccaagcaaagaaaaacaataacaacaaaaaaatctatattttggcatatcctcttcaaattataaaaaaaaaaagattttttaccctgagttatggttttaaaacagcaatgacaacaaccagacttcttatcagaaatcatgcaagtaagaatgtgaagtaaatagttagaaatgaaagcaaacaacccaccagtcctgagacaatagatccaacagaattacctctcagaagtgaggaagatggtgccatgcacagtagtagacacctagaattctagcactccagagactaaggactgaaattcaagccagccatggctacctatcaagactgtctcaagaaataaagtaatgggtaaaataaaaacattctcaaacaaatgtgtctttttaaagggattttgtggtcatctttacatctgtcctacatgagctattttaaaaattgttcagaagagaggaaaatatgtcagaattatgtgctgcataagaaagagattatagctgggcagtggtggcgcacgcctttaatcccggcacttgggaggcagaggcaggtggatttctgagttcgagaccagcctggtctacagagttccaggacagccagggctacacagagaaaccctgtctcggaaaaagaaagaaagaaaaggaaggaaagaaggaagggagggagggagggagggattttaatagaaaagggatgcctgagagtaaaatgtcaattttcttcttaatgttacataactgttatagtgataataatcaggtatcaggggatctggagaggtggctcagcagttcccagcacccacataaccactcagaactgtctaactcaggtcccagtgatccattgcctacttctaacttctggggtacatacttgtggtgtacaaacatacatcaggcaaaacactcatgcacacagatacacacacacacacacacacacacacacacacttttatttatcttacaaattaacaatcgcagactatgtgattgaaatacaggcatatgtacaatgaatgacagaggtattgtagttaagttaggagggaaatttcagatacactctggcattgactttgcctgttagagtagttctagtgtatttcggaagggagaacaggttagttgtaaatgtgtactgcagatgacagagcagtcactaagagttcaaactgtcaaagggaacacgcaatcatgagcatgtctgggacactgaaggctgatgggagtctccagagtctagtggttgaaagtgtgcaccacaggcagggtccccagcttccccaaacctgatgtgcttggtcagaacagaagcacctctcggggccaagctaagggggaagctccttcccctcctcggggcaaagttggaaaaactgctaagtgtgagcaaaggcaatccccagaaacaaaaaagcaaaatggattcttggtgcaaaactagtagcaagagcacaggtctgcttcagtgagctccttggggctgtttctaaaatgtgttcatgggaggcacatctgctaaggaatgaaaaactgaagacaacaagaaagaggaatggaaaccagcatttcctcctagggagattaagttcagtataatggagaaagaaggaaggagaagaaagcctggaaggagaatgacagacttaattccctggtgacactgcagacgctggggagatgtgcggcagcaatgatacaatctagggaaagcctgctgaacggaaggagaaggacagcgagagttgtgcccacagcgataagggagacaggttcagtaaaaaggacagctgtgaagctttcaaatcagaggaagatgattaataatgaagtggatctccttcagtgtgttcttgtcaatgaagtatttaaacaactcccttcaaagaaaaagactgaaatcaaaggctctatagaagtgcttctaaactctctagccgtttgctttgtaatagttaacacacagcacagacaccctttcctggaggtactgacctcacctggtacagtatgaaggttgtaaaatggaagattgtttaaagcgggttctcactggtacacatcacaaattagctatacacaggatgacacggtttgcatcctcgggtgtcgtcaccgctcccgttataagatgggagacatttggatctcccatggttatgaaccccaattctcagttagcctatactttcacttagctatagtcccaccatcctttgagaatgcatgaattttagagtgtattgaatgtacattgtaacgatgaaatacgcatgaaatgtgctacttagtacaagacaagttaaaaaaaggaaaatttaactgacttcatcttaccttttagttcctaaggaaggtctgaagagccaagagttatttgatgagattcgaatgacttatatcaaagagctaggaaaagccattgtcaaaagggaaggaaactccagtcagaattggcagcggttttatcaactgacaaaacttttggactccatgcatgatgtaagtaccaaacataaatccaaaacaacagcaaaaaagaaaaagtaggttggggtggtggcagatgcctttaatcacagcagacacagaggtagagcaagtagatgtctatgagtctgaggctgctctacatagggaatgccaggacagtcagagatacgtaagagatcctatctcaaaagcccaaagacagagacagagagagacagagacagaagaacattgtaggtcctaggttatggtttaattagtgtatgtgtatagttatataccaatcagtcattatagtgattattcaagataaataattttttacacatttctcttaagtcttactagtctggtcatttgcgtaaagatgactctgttagtacagagttcagtagctcctgattttaagtatccctgaagtacatgaatgagctatcagattacactagtttcacctccctgtgtatcagtactggtgcagtctcctttgagcctgctgcctcgtctcctgactgctgggatcacaggcatgccaggcttcattctgcacacagtttaagatgccttttgttcttatgtgcttattttatttaaattattttcttatctgaggaattccaacaaagattggtatatttgtgatcaaattgttaaaatggccagtagggcaggaatgcaggatctatataccaggtcttctgtgtgtatattacgactttcagtttagtgtgtctgggattctggagtgtgggaaccagtaggtccctgactcttgttcctgttcttgggttctcctttttctctttgtcttttccaacaatatgatggtttttattttattttgctatgttttattttattatcacctcttagaagcacaatctttttaataagaggagaagttgagaggaactgggagggtaagccacaatcaagatacattacatgagaaaagaatttattttcagtaaacaaaaaaatatgtcaagacttggtgtggggagccaagagatatgagccattcgcagttatgctttgaagcctcaccattaccgtatcttctcttgcaggtggttgaaaatctccttagctactgcttccaaacatttttggataagtccatgagtattgaattcccagagatgttagctgaaatcatcactaatcagataccaaaatactcaaatggaaatatcaaaaagcttctgtttcatcagaaatgactgccttactaagaaaggctgccttaaagaaagttgaatttatagcttttactgtacaaacttatcaacttgtcttgtagatgttttgtcgttctttttgtttgtcttgtttgttttctatacgcactacatgtggtctctagagggccaagacttggcaacagaagcagatgagccatcacttttcagtgacaggaaagcagacagtgatgtgcattggctggtgtatcacagaaactagaacagttagtggagacatgtccactatcagagaaggaccgcacctgaaccaccagtgcccaaagtccatgtgatcaactttctgctcaactttcagttggctggataacactttctagacttttctgttggtgtatttttcccatgtatagttaggatagcattttgatttatgcatggaaacctgaaaaaagtttacacgtgtatatcagaaaagggaagttgtgccttttatagctattactgtctggttttaacaatttcctttatattcagtgaactatgcttgctcgtttttcttaaataatttttgtattccagttattgtatagctgtttaagatgggcagctgcctcacagctctcctagacgctaacattaatttccgtgtgaaaatgggtcggtgctcctaccctgatggcactcagctatcagaagaccacagaaattgactcagatctccagtattcttgtcaaaagctcttactctgtatatatctgcttccatggggaattatataggttgtgcagattaaccgtcctaactggtatagagcacctagtccagtgacctgctgggtaaactgtggatgatggttacaaaagactaattgtaaaacagtgcccaccaacaggccccgtttgcacccaatgcaccatctcttcagtggtgcgatagcaacaaagtttgtaactcagctctttcaggaccttcgggagtagtttgtgtaacattttaaaatgtattattccagataaccagctgtgataaagccgagagattgttttaatcagaccaagtaacttctctcattaaacgttaccctcaactaagtctctaatatggcaagaatggctagacacccattttcacatcccacctgtcaccaattggtctagctttcctggtggtacaggaaaatcagctactgattttttgttatttagaactgaatgtcaggcatccatgtttgtccaactatacatccctacatgtgccatagaatctaacacaagtcttgtgaacttcttcacactgagagttatcattttaaacaaaacagaagctgtagtagccctttctgtgtgcaccttaccaactttctgtgactcaaagcttaacacacttactaagccacaagaaatctgatttctacttaaggtggccaaattatttgtgtaatagaaaactgaaaatctaatattaaaaatatgaaacttctaatatatttttatatttagttctagtttcagatatatatcatattggtattcactaatctgggaagggaagggctactgcagctgtacatgcaatttattaacatgattgtaaaatagctgtatagtgtaaaataagaatgatttttagatgagattgttttatcatgacatgttatatattttttgtaggggtcaaagaaatgttgatggatatcctataagatttatagtatataagagcatccatacaggcctcagtggtcttggaaattaaaacaggtttgctctaagctagggagagggagctgggactggccctgtgtgcagtgcaggtcctgagggtttgacccgatcagatcacaggggaactaattccctcccatctaaccatcctcatccgaccatggccctgtcagtgcaggctggctttattaaatccaggacagaaaggtggcgcttatgtacttagaggcaccgtccagtaacagggttgttcccacatgcagcctccgcacgggttaacagaaacagaggctttagaagtttggcaataatgtgcatagaggttccagcaatatgtaaatactaaagaatcgcataggaagccaataatacactaatcctctccatcctacaagagtccatttccaagtaagatgaggacatgtttatgttttctttgaatgctttttgaatgttgttattttcagtattttgcagaaattatttaataaaaaaaagtataatcatttgctttttgaattctctctaaaagggaatgttcagtttgtaatggtttaaattggtctcaaagtactttaaaataattgtaacccagctggatgtgaaatttatggtgcctaagaaataccacttgaagattatcaatgacagtgttaagtttcaaaatgagcttctcaaaaatagattattgtacatttatggaatgttatatggttaaacccaaaaagcacatcacacataaatctgctttcagttccaaccagcttggctttcaaaaatagagctccaaaaaaaaaaaaaggaaaaaaaagatatatatgctttgttattaacagaaggcagcagacattcataaaactactatcggaagttttccattagatgtataaagagctatcctttggtatgtgggaaagaagaaagctgtcataattctgattgagtataagtgagagagatacggtactgtttgagagcagctccttttctgcgtgtggcttcataccgttccaaactatgtagattttataatagcttcagtgagaattggtaacatgcctgtatgactcacaacagatcttgaaaactatctttaattactggtaggacaaaaagggacattctggttattttaggcactggcttggaacactgtatatgcagaagaaagaagacaggcaatctggggaaaggaaggggacctgggaagcactgccttctttaaggaaagacacaccaatagatgagatcatcccaaaggcacagggaccacagagtgtgagtccttagtgacgagtcaggtgagctctggtgagcttggagaagccagccccaccagcagagcaggcacggcagggatgggacaagcagggacgacaattccagctggacactggtcccagtattttgctccctcttatataccgtgaggcagtatcaccgtgggatgaaccatggtagcacgttttgatctgtcagcactcaaggatcatggtagccttcgggagctttaggttttggttggtcaccccaacgatcagctgtagttgaatgtgtttcttatgtgcctggtttcagtgttagaaggtgaaatagagtgtgcaaaggacactgcaaaccacttcggatggaagttttctcattttccagactattttcggtcagcctggtctatcaagatcggtaaccaggtcttcaggaaagggttggcttctatctaggacatgcctgaaaggattttattttctgataaatggctgtatgaaaataccctcctaaataccctgcttaactacatatagatttcagtgtgtcaatattctattttgtatattaaacaaatgctatataatggggacaaatctatattatactgtgtatggcattattaagaagctttttcattattttttatcacagtaatttttaaatgtgtaaaaattaaaaaccagtgactcctgtttaaaaataaaagttgtagttttttattcatgctgaataacctgtagtttaaaaacctgtctttctactacacagtgagatgtcagactgtaaagttttgtgtggaaatgtttaacttttatttttcatttcaatttgctgttctggtattaccaaaccacacatttgtaatgaattggcagtaaatgttagtcagccatttacagcaatgccaaatatggataaacatcataataaaagtatctgctttttcattatgtgactcccaacatgttttcatagaacttgtgcagttacaaccattcttgggttttgttttgtttttttttctcttcattccactcacagcaaagttgccacttgaaggaacgtaagatgctgaggtgggcatgtcagtgccggtttggccgctagtgtgtgcggagagatgacacttattcaaaagcgtaccctgatgccgacagctctaaaggtcttctcacctatctgcagaggtcacatggttatgactccccaggggaatctggggaacacacagaagcacaggagaaactgatgcctgtaactgcttcaaagatgccattcttggtaaacaaatgttatctcatagcacaattaatctcttagtttaaaatccaccgtgctcttagaaatacacataagtaaacacagcaaatgtctaacacagaagataaaggcgtggtggagtcaccatttatctttacactttactcggtagcttctaaaacattatgttttctatatctcccacagtatagcactatcgcttatgaaaaaagccattctaatttaaagagtaaaattgccttatctcatacactccatctactggctgcatgcctactatataaatataaggaaatgacaacacttagatacttaagaccatgagattgggatgtccggaaccacctttctcagtgtcttaaagtacaacagatgcaccagatacggctcagtggtctacagtttgcatttgcatatgcatctacagagcccagaagagaatagtgtcttcctcttattgctctctgccatattctcttgagacaaggtctctcagtagttcagctagaccaactagctagtgagcgcccaggatcttcccgtctgccctgcagtgctgggcttacaggcagctgtagccatgtccagtttgtggactctgggtattcaaattcagatgcccacgcttgccgagcaagagttcttactgagccacacagttcacccgtacctattcttgttgtactatttactctcaagtataaacctggttttgtaaagttcctttgcacacgctatactagttagtcttcactcaatgaataaagtgaagacattgatgctagtaactcaattagtaaaactgcactggaaacctgtgtgaggaagccatttggttaccaagtctcagatagcaagtctcaggcagcgtctcagacaacatattttctgcttttctctactgcttcactgagcacttactatgtctcagacaccatgtttttttttaacatattatttaatctttgcagccctttaaagcaatattcttattctcatacatatgaggacagaatagtttgaaaaaaaaatgggtagtcttccaagacttaacaaagcttgggaatggctaagtaaaacgtgacgacagtgggcatctggctcaggggttcgcgttcttaagcacttccggggagagagggatgtgaagcttctaaatgcagcagctgagccttgtgtccctgtcctccgacatgagctcaatcccatttgctactgcatccattttttaaattctttattttgagattgtagttgtgtcattctcccttccctctcctccctcaagcccttctttcttttcttcaaactcatggcctttttctcattagcattgttgtgtgtgtgtgtgtgtgtgtgtgttggagcagatgccatctttcttagatatataagcataacctactcaatcatacgaatgacctgtatgtatgtttggacccctagaggatgagggtgaaaaactaactccagagagattacagaaaactctttggtttttcaaatatacaaggaatctgcgtgtcacttaacagcgctcacagcaaatcaactaacctccaggcagaagaagataaagagcttacagttacactgaggaggaggaaagatgttagcaagtgaaagctctgattcaagccaaatctgaccccactgtaacaacaacaacttctagctaaaccttggatataaaaaacaaaatcaaaaacacttgaaaggctgaaaatgcagcactagctgaatagtttgtagactttgttcatcttgagagtggctcccaacagcttttatagaatcttctattaagactcttgtaaattaattcatttgttttttaaaagtctcttgcctgcaggctgcatcaagctccctgtttcttggttaaaatgagatagtgcagggctaaagggaacactttactctgttcgtttctagaactgaagaaactgagcagttcatctagaccctagcagatgcctagaggccccggccaccggaataagggggattcgcagtctgttcatcccatgtgccctcctcagtgagctctaggcaatgaggcagtcccggcagctttgaaatggcagtgtcagaaatggaaccatgcacaactaactacaaagggaatcaaagattcaagttttaaggcaatatgtctccttcccttcgtttattgggaaatggttctctttctcactttctttgattcctccttagctttctgtgtgttcataacaaatatacacactccataagtgacaggaacagtgacagaagatgaaagcacacagccactagtgctaccactatgtcctgctgtctggcatttatcaccctagatatgattcttatattacatcatgtttggggagaggtggctgggcacatgccaccgtgcacttgtggaggtctggaggacagtttgtgggagttgattctctgcttccaccatgtaggtcccagagatcaaactcaggttgtccagcttggcagcaagtcaatttacctgttgagccatcatactggccctcatttttgcttttaatttgtttctgttgctcagtctgtcccagacacctgcacctagatgtaagtacaaaagacctacagctcggggcttgaacagtgtccgggcatacacattcacagcagcgttgctaacaagagccagggtccataaggctttgcttagtaagtactctcaagataccatggggttctgatggaaatatgaatgtaggacatgtaaaatctccaaggctgataagattccaaggaataaagaaagttagtgtgaagggggaggacagtattcataaaagcagaggctcacatgaaatcatatcacaaggagctcctgattaatttagtggcctcccactcaaaggccaccaaggcattactaaaaatccatgaatacagtcctgccctcaaggaattcaatatgaaggcctaatgacttagcatgtccacatctgtttgtctattccaataagaacacttgaccattcaatgacctacatgtgaatgtgcatagtagcaaaacagccaaaatgtgaaagcaatgtaatgactttccattggtgaacaggaaaacatacaatataattattatctatggccactaaaagtaaaatacagatgcatcccataactatacgtcatgctatagaacatgctaaaagaaggcaggcacatacatgatttttcttagatgcccagaaaaggcaaatccatacagccagacagctcatcaatggttgcctatggctagagatagcatcaggacccaatgtactgagttagtgaaacttctaggtggtggagtgttctgaaacttattacagtgatgactgcatagcttggtgaagtcaatagaatcccagaactctacttcatcagaaattacacaaaactgtgggctaatatcccttatgaacacagatggcaaaaagtctaaacaaagccttggcaacgcactctagtattaaaggaagagtgcaccgtaaccaataggttaacccacaaatgcagtgctgtgttaacactaaagtctagcgggactggcgagatggctcaggagataaaggtgcttgacactaaccttggccatctgagctccaggcctgggacatacagaggaggagagagtcaattccagcaagctcttctctgacctccacacatgctaacaatggtgtacacacaatggtgtacacatatgcacacacataaaggaaataaatgtggaaaaaagtaattcacagtggtataaaattaaaagagaaaacaatgtggtgaaatacgtatcaaacatttcctgaaatgccacatatcccgatttcttttaaagacactcagtgattataaagccctcaaccttctgaaaggcgcctaccataaggtatctgtcagcatcatgctcaatggaaaaagaaaacctttcctcttaagagcagtaacaaaatgtttacatctacttttactacttccatccaaatatcatatgagggctgcagactctataataagaaaaagaaatacgacatttaatcacaaaggaaaaaacaaagttatttgtaggtataatcatgatatcttaaatggttctattaaatttcaaacggttgaagagatttgccatctagcctactattctattcttaggtagatatccaaaaaaatcgaaagcatctgcccaagtaagcatggtttttcaccctcagtttccccaggagtccaaggatcctgcttagagtgcagggttttacactggagtgacgggagtggcttgaaatcagacaggaatggctggtaggtaacactgggttacggcacattgtctggttttgagcagtttcattatgactttcagctcaatgaacattatttttttaagttactaggagtaatggcagttgagggctgcaagatacagtgggccaacaaacctataaatacaaaagcaaggcattccaacagaccatttgttctgcaaattaaaattaccatctgactgactcttagaacatcagatcaatataaaaagtaattttacatctatgctatgatattcaaggtggtacagtactggcaataactaagtaaaattattttttaactgacaagttaatcctttaaacagaatagagagttcagaattgaaccgacataaatgcagtcaagcgatgtttgacaaaggagcaaaagctaacacagcaaagagaaaccatccacaaatgatgctaggaagagtgggcgtcacctgcaaaaggtatctctagatgcagactttccattctgaacaaatataaattaaattaagtgggaaacagaagttacaagtttctaaaagacatagaacagtccacatgatatgctaccaaaggcattattcatgaaagaaagaataagctggacttgattaacatttcaaatttctcctatgcaagagacaatatgaaaagacaagccacatactgagggaaaatacctgggcgagacctttcctcatgagcacacaaaggctcctgagacccagaagtacgctagataaacagtgtaaaagctgaccaaggagcctgccctgagaagatagaaaggtgaagggcacatgaaaactgttcccgtcacagattatctgggaaattaaaagttgaagcaaaatgagataacactccatatttttagaatggctcaaatgcacaacaactatacctccaaatgctggggagggcgggacaacatgaactcttgtttgttgctaatcgaaattatgtgtggcgtgatggaagatgcagttcttagaaaaatccagcatactcttaccattttagcaatgaatggctctgtatttagactttaagacatatacacacaaaaacatctattagagcaactttgttcataatcaccaacatgtgggagcattgatatggcttgagtaaaaaccaaacatcaaactgtggaatatgattcaacactaaaaaccaggctaaaggccctgaaaaggcatagaggagccttaactatacattacaaaggaggggagctgatctgaaagatgtgcattctgtatgatccccagtgcagggcagtctgtaaagggcaaaactatacagaaagatgtttagtgcttttagaagcagaagttggaagtagagaggaatgcaaagaacagaggatagacagggcagcaaaagttttccacatctcacggtggacatgctctaactatccaaatatacagcaccaacatagatcctaacatagcctataaactaagagcaatggtggtgtcaacatgggggtcctctactgtaatacgtgaatttgtaaaaggatggatattgattctaggagtgctattcacgagggggctaagggagaatagagaagagctctgtgaacagttcctacagtaactttctcacagttttatatcaatc

SEQ ID NO: 1499 - DNA, 2575 bp, Mus musculus
ggaagttaatatttgccaatggactccaaagaatccttagctccccctggtagagacgaagtccccagcagtttgcttggccgggggaggggaagcgtgatggacttgtataaaaccctgaggggtggagctacagtcaaggtttctgcgtcttcaccctcagtggctgctgcttctcaggcagattccaagcagcagaggattctccttgatttttcaaaaggctcagcaagcaatgcacagcagcagcagcagcagcagcagccgcagccagatttatccaaagccgtttcactgtccatgggactgtatatgggagagaccgaaacaaaagtgatggggaatgacttgggctacccacagcagggccagcttggcctctcctctggggaaacagactttcggcttctggaagaaagcattgcaaacctcaataggtcgaccagccgtccagagaatcccaagagttcaacacctgcagctgggtgtgctaccccgacagagaaggagtttccccagactcactctgatccatcttcagaacagcaaaatagaaaaagccagcctggcaccaacggtggcagtgtgaaattgtataccacagaccaaagcacctttgacatcttgcaggatttggagttttctgccgggtccccaggtaaagagacaaacgagagtccttggaggtcagacctgttgatagatgaaaacttgctttctcctttggcgggagaagatgatccattccttctggaaggggacgtgaatgaggattgcaagcctcttattttaccggacactaaacctaaaattcaggatactggagatacaatcttatcaagccccagcagtgtggcactgccccaagtgaaaacagagaaagatgatttcattgagctttgcacccctggggtaattaagcaagagaaactgggcccggtttattgccaggcaagcttttctgggacaaatataattgggaataaaatgtctgccatttctgttcatggcgtgagtacctctggaggacagatgtaccactatgacatgaatacagcatccctttctcagcagcaggatcagaagcctgtttttaatgtcattccaccaattcctgttggttctgaaaactggaataggtgccaagggtctggagaggacaacctgacttccttgggggctatgaacttcgcaggccgctcagtgttttctaatggatattcaagccctggaatgagaccagatgtgagttctcctccgtccagctcctccacagcaacgggaccacctcccaaactctgcctggtgtgctccgatgaagcttcggtatgccattatggggtgctgacgtgtggaagctgtaaagtcttctttaaaagagcagtggaaggacagcacaattacctttgtgctggaagaaatgattgcatcattgataaaattcgaagaaaaaactgtccagcatgccgctatcgaaaatgtcttcaagctggaatgaacctggaagctcgaaaaacgaagaaaaaaattaaaggaattcagcaagccactgcaggagtctcacaagacacttctgaaaacgctaacaaaacaatagttcctgccgcgctgccacagcttacccctaccctggtgtcactgctggaggtgatcgagcctgaggtgttatatgcaggatatgacagctctgttccagactcagcatggagaattatgaccacgctcaacatgttaggtgggcgccaagtgattgccgcagtgaaatgggcaaaggcgataccaggattcagaaacttacacctggatgaccaaatgacccttctacagtactcatggatgtttctcatggcatttgccctgggttggagatcatacagacaagcaagtggaaacctgctatgctttgctcctgatctgattattaatgagcagagaatgactctaccctgcatgtatgaccaatgtaaacacatgctgtttatctccactgaattacaaagattgcaggtatcctatgaagagtatctctgtatgaaaaccttactgcttctctcctcagttcctaaggaaggtctgaagagccaagagttatttgatgagattcgaatgacttatatcaaagagctaggaaaagccattgtcaaaagggaaggaaactccagtcagaattggcagcggttttatcaactgacaaaacttttggactccatgcatgatgtggttgaaaatctccttagctactgcttccaaacatttttggataagtccatgagtattgaattcccagagatgttagctgaaatcatcactaatcagataccaaaatactcaaatggaaatatcaaaaagcttctgtttcatcagaaatgactgccttactaagaaaggctgccttaaagaaagttgaatttatagcttttactgtacaaacttatcaacttgtcttgtagatgttttgtcgttctttttgtttgtcttgtttgttttctatacgcactacatgtggtctctagagggccaagacttggcaacagaagcagatgagccatcacttttcagtgacaggaaagcagac

SEQ ID NO: 1500 - DNA, 2352 bp, Mus musculus
atggactccaaagaatccttagctccccctggtagagacgaagtccccagcagtttgcttggccgggggaggggaagcgtgatggacttgtataaaaccctgaggggtggagctacagtcaaggtttctgcgtcttcaccctcagtggctgctgcttctcaggcagattccaagcagcagaggattctccttgatttttcaaaaggctcagcaagcaatgcacagcagcagcagcagcagcagcagccgcagccagatttatccaaagccgtttcactgtccatgggactgtatatgggagagaccgaaacaaaagtgatggggaatgacttgggctacccacagcagggccagcttggcctctcctctggggaaacagactttcggcttctggaagaaagcattgcaaacctcaataggtcgaccagccgtccagagaatcccaagagttcaacacctgcagctgggtgtgctaccccgacagagaaggagtttccccagactcactctgatccatcttcagaacagcaaaatagaaaaagccagcctggcaccaacggtggcagtgtgaaattgtataccacagaccaaagcacctttgacatcttgcaggatttggagttttctgccgggtccccaggtaaagagacaaacgagagtccttggaggtcagacctgttgatagatgaaaacttgctttctcctttggcgggagaagatgatccattccttctggaaggggacgtgaatgaggattgcaagcctcttattttaccggacactaaacctaaaattcaggatactggagatacaatcttatcaagccccagcagtgtggcactgccccaagtgaaaacagagaaagatgatttcattgagctttgcacccctggggtaattaagcaagagaaactgggcccggtttattgccaggcaagcttttctgggacaaatataattgggaataaaatgtctgccatttctgttcatggcgtgagtacctctggaggacagatgtaccactatgacatgaatacagcatccctttctcagcagcaggatcagaagcctgtttttaatgtcattccaccaattcctgttggttctgaaaactggaataggtgccaagggtctggagaggacaacctgacttccttgggggctatgaacttcgcaggccgctcagtgttttctaatggatattcaagccctggaatgagaccagatgtgagttctcctccgtccagctcctccacagcaacgggaccacctcccaaactctgcctggtgtgctccgatgaagcttcggtatgccattatggggtgctgacgtgtggaagctgtaaagtcttctttaaaagagcagtggaaggacagcacaattacctttgtgctggaagaaatgattgcatcattgataaaattcgaagaaaaaactgtccagcatgccgctatcgaaaatgtcttcaagctggaatgaacctggaagctcgaaaaacgaagaaaaaaattaaaggaattcagcaagccactgcaggagtctcacaagacacttctgaaaacgctaacaaaacaatagttcctgccgcgctgccacagcttacccctaccctggtgtcactgctggaggtgatcgagcctgaggtgttatatgcaggatatgacagctctgttccagactcagcatggagaattatgaccacgctcaacatgttaggtgggcgccaagtgattgccgcagtgaaatgggcaaaggcgataccaggattcagaaacttacacctggatgaccaaatgacccttctacagtactcatggatgtttctcatggcatttgccctgggttggagatcatacagacaagcaagtggaaacctgctatgctttgctcctgatctgattattaatgagcagagaatgactctaccctgcatgtatgaccaatgtaaacacatgctgtttatctccactgaattacaaagattgcaggtatcctatgaagagtatctctgtatgaaaaccttactgcttctctcctcagttcctaaggaaggtctgaagagccaagagttatttgatgagattcgaatgacttatatcaaagagctaggaaaagccattgtcaaaagggaaggaaactccagtcagaattggcagcggttttatcaactgacaaaacttttggactccatgcatgatgtggttgaaaatctccttagctactgcttccaaacatttttggataagtccatgagtattgaattcccagagatgttagctgaaatcatcactaatcagataccaaaatactcaaatggaaatatcaaaaagcttctgtttcatcagaaatga

SEQ ID NO: 1501 - DNA, 96589 bp, Homo sapiens
  misc_feature (6890)..(7626): n = a, g, c, or t.
ctcccctgcctaaaattccagactgcccattgcactgattccctgggaaataagtgaaaagagacaatgataattttcatttttgttgtggtgaagtgatagtgcaaaaattccataagctcctctaagttttccaaataaagcttagtgtttaaaaacgtttgaacacatgatcccatgtaaggcctacattacttcctgtgtgataggtggggtagatatcattatccttcctttacagattgaaaaacaaggctgagaaaaatcaaatgcctaccccaggctcattcaagtaagtaaatggcagaatagggtctaaaaaccaggtcttgtattgaaaattcaacaagaggatagagaaaatttaattgacaaatactgatctcaaaacaatttttttttcaatggtgacaaatgtcctttgtagcactttggagtttgatatgaagtatcttcttatcttgttaagggatccctataccaagaatgttttcatctcaaccccactatttctaagttagcttaaaaacaaaacaaaaccctgtgtgctctaataagaagatataagaaccaaaatggaaatgcaggttctcaaatgagctgaaagattccacatagcagcggggcagattgaaacactctttaccaaaggaacatgggagagaaaaggagattaaatcaagaaaggaagaaagctaatgacatatgaggagccacaaatgccacaaatgaaaaaacaaagtacgtaatacttgttgcaattattcagtgtgcttgctctaatgcctccaaacattaaaaacattgagttcctgcttatggcaacatttatctcatttatctgctgatagctgcctcatccttgaatcaggtattgcttaaactaagttctgccagcataaagaataaagtcaaccaggacacccattgggcatttcacgcatatgagcacaaattgtgatattttaggttgcttatgatgaaatcattgaaagcatcatgaaagacagcaaaacagcaggaaagctagtaataatttagcatttcccagtccaggcgggaatgttaattctaattacaacgaggaataccaaagtggagttcattatgattaagaacttgctgtactagtgtgaattgtttataataggcatgtctggcataaaatacaaatattgaagcagacagagatggctcattcaaagctcagctgggttcccttgaacctcttaccttataaagttaaataggaatagaagtattttccaaagtcaagatattattttaaagagacaaataatagctatgatagctgcaggaataattttttaaagtaagttctaaccaccaataaaagctgtttgtgtgggcttaacatgttcaaaatacacaatacacatgtacacaatacacgtatacatggttcccatttatatttaacatcacacatttaaagtgagagagtacagaaaaaaagaataaatggaaactgaagccatgacaaagaatcacggactataggaaaataagtcacaaagaagtatgcttatgtaagaggaaatatatgtgataaacaacaggagacatgggaatgaatgtggtgtcttatgtcctttctttaacagaatcgtgtaacagacactactcaatatcgatctcaactgatccagttctccagtctccctggaaaacaatggattgatgcccagggtgcgctgaacactggaaccatggtcacttctgcacttcacacgattctgctcccaccagttgagctaccaacagttcctggtgcttttgcttcccaaacatgtttatgccatttgttgcttattactgtacttacttaatttgattaaatattaagtaaaatgatgaaatgagtgtaaaaaattgttctataaaatctaaatggaaagatgccctatagccttccttgacttacagttgcgtcaagtaaggtggatgtaagacaattttaaaagactggtgtgggggcaggagtgaggaatcataaaaatttagaaatctgcacgaaaattattctaaaagtacacattgaacatccctaacttgaaaatctgaattttgaagtgctccaaaatccaaaactttttgagcattgttatgataccacaaatgaaaaatcctacatggaagtacttaccacaaactttgcttcatgccccaaattattttaaatattgtataaaattatcttcaggctataaggtgtatatgaaacaaaaaatgaatttcctatttagacttgggtcccatggccgagatatctcattataatgcaaatattccaaaatcagaaaaaaaaaaatccaaaatctaaaacactttcagtattaagcatttcaggtcatggatactgaatgtgtatctttaatttcttgttctactttgtttaaaaaaaagggggaaaatagtaattctacagatgaataataattgctaatgatgagcaaatacttcctatgacccaggaattcgtctaagcacttcacatatatcaaactggtttaatctttataaatcagtactattattatccccattttacagatgatggaaaaaggcacagagagttagcctgcccaaggttacattccttttagtggtggagactgtatttggcctttatagtctggcttttaactgctacactatatcaatgcattacaggtatagtttatacacacactaaagaagacatggaactccagtcagtgggctcataaaagctttagaccttcatcaaaagattagaaaataaatgttcaatcacaggttttaggtttcaaaagtttcaaaagtttaaagtttgcaagttatctttcttaaaattatttccttcttttaactaatttttaaattaaactccagttcaatcacatccactagaaggcttcactttctacaaaggggtaggtaaaggtgatgatcttaaataccatactgggagttgggatctgtgtagcactagaatcaagagttattgtatatacttgagaaggagcacagcctgatttagttgatgttttggaggggtaatctggcagtacagcttggattattttagtgggaatggagatgacaaaacatgaagagaatgggagaactcacttgggtaatatatcagtttctgaaatcaatgtatcaagtggtttggttattagtcaggcttaaggttttattggccttaggacatagtctctaagaccatatattatcttcattcattcatttaaccaacacccactgagcaccaactatgcactagtgatacaggggtgaacaaacagacacagtccctgcctttgcagaacttatgttctggtgggtgatacagagaaataacaaatgagggcacaaataatgaactatcattgtaatgtgctaacaaagtatgcagaatactataagaacatacaatcaagaatctaatctagtttattttaaaaaaaagtggggggagcactcagatgtttaaacacaaaacaataaaaatgaggatcttgagggttatctgtacactttttattaacccatttggccacaacaataacccagtaaaagtgattttacatctagttaactagttgactcaatgttattataaccctgtaatgtatttgttgggtgcctgctatgtagtgggctgtgttccaggagtgggacataaagctatgacaagatagatcaggtccttgccttgactgagtctgaatacatcaccttcatttccacctctgcttctaagacaatcaaataccttcccactcagatagggattcatcctatttcttgtagtaattataagttcccagggttacagattagtaaatgccatacctaaagacttaggatactgtgcataaaacactttcaatagtgtctgtcagacagcagatgcgcaataaatgttgactttcgttagaattgtgttattattataatgctaaatctcacgtcctttctggcacactggagttcatctcttcaattaaattccgtaagcacatattgtaagtagtctatcagaattgatatactacttcatgttaatgattgagatcagtgaggaaaaccactttaatattgtctaattcctctcttaatgcataggagccatgtgaacttagacaagcatcaacctctgtaagcctgttgtcctcatattgaaaaatcgaataacaatacctatctcatttaattgttgtcagcaaaagtgggcagcagaagagtggggatcaataaatgttagccacaaatcataactatttgtattactctgaaaaagaggggttaacttatagttcatgcatgcttccaaatgaatgtgaaagactaaagaatgagaatttttttgctatcaaattaaaaaattaacaggcacatttagattgctgaagagagaaattaggataagtttttttttttttttgctcaattaaaaacgttttcaatggcatatttaaaactacgtattcttccccattaagatctgcagagaaaaaaaaatgaagggagaataattgggaactcttgtgaaatcataaattatttaagcagagtacctaccactaaggatttgagcatgtatgagcgatgaggtggattcttagagcagagattcagcagtgagacaggctaatggcatggggagatgtgttctattagacaactgtattgtccccttaattatatacatatatatgtatataatatatatgtgtatacatatgtatacatacatgtatatataaatagaattcttaatcattttaagcagtgtacaaggataattattagcatgggctatttaactcacttttaaaacgtgtaaaacattattgtagggttgggtcttgatttgtttcccatgaaactgttggtagtttaggggccaaattaacgaaagacatctcattctagtgcttgaggctcagaaattggaaaaacgggcaactaggtcaagcagtgttctcatagcctcacagatgagcatccaaagcaagggcctccttctagttgacttgtgccaagggacaggagaagcggagtctgccttctgggtccagaagggggttttgttaacatggagttgctcagcgcccttcataaaaattcttctggctgagggttctacgttggcatacggttggttccctcttcttttccgaggtggcgagtatctcttcctttgccaagatggcggctccagaatcctctggaggcggcccccgtagatcgtctccggacaagaggcttgctgaaagcctacttctttcctttcacatcagacaatgcacagggaaccgtttacccttgagaaccaaggaaggacggcttaggctacccgcgatcgcgaacctttgccaagatggtggccgcggggacgggctggcgacactgtaccctaccaagatggcggcgggcggcttccgggacgcgcttccccaatcgtcttcaagatgtcagagcagggggagccgccgtcagtctgagcgcggcgggaggtgagagagtggctgtggccgagcgcccgagcaggattaggtggagctgcggcagcccccgcccgtgtcaggagctggcaagcgatgtcacctgtgggggcgcaaaagttacctccccaaaccctaaacccacacagcacaacctttcccagagtcacaaaaatcataatctgtgccgcacaaggtaggaggctcggtcccggcatcgtccaagccttcccgacgcggcgagctggggaagggagctggggcgggggcttcccgcacgggcacccctcgccccacggccctctcctttctcaggacggaccacgagttcccttccccttggactgagggggaagctcctaacaggaacatctgtagggagttgaacgctggcattttaaagctgcctgtattttgttttatttgtaggggcaggggtcctatgaacgtgatagggtgagcaacgcacagagtcgagggcagcaaatgtcaagattcgggggtggggcctgcaccgggaacttggacgcgggccctggccggggtggaagaagaggtcaggagtttcggaaggggggctatatttcgccagcaacttactatttcgcctgcaacttgcttttaagcctgccgccccctgctttccttaatcataataataaaaaaaaagtgcaaagaaatccagctcgctggaggttttgcatttggcgtgcaacttccttcgagtgtgagcacattgggcgggaggggtgggggttgaacttggcaggcggcgcctccttctgccgccgccgccgcctcgcagactcggggaagagggtgggggacggtcggggcgcgggggagggtgggttctgctttgcaacttctctcccagtgcgagagcgcggcggcggcagctgaagacccggccgcccagatgatgcggtggtgggggacctgccggcacgcgactccccccgggcccaaagtacgtatgcgccgacccccgctatcccgtcccttccctgaagcctccccagagggcgtgtcaggccgcccggccccgagcgcggccgagacgctgcggcaccgtttccgtgcaaccccgtagcccctttcgaagtgacacacttcacgcaactcggcccggcggcggcggcgcgggccactcacgcagctcagccgcgggaggcgccccggctcttgtggcccgcccgctgtcacccgcaggggcactggcggcgcttgccgccaaggggcagagcgagctcccgagtgggtctggagccgcggagctgggcgggggcgggaaggaggtagcgagaaaagaaactggagaaactcggtggcctattaacgccgccccagagagaccaggtcggcccccgnnnnnnnnnnnnnnnnnnnnnnnnnnnnnnnnnnnnnnnnnnnnnnnnnnnnnnnnnnnnnnnnnnnnnnnnnnnnnnnnnnnnnnnnnnnnnnnnnnnnnnnnnnnnnnnnnnnnnnnnnnnnnnnnnnnnnnnnnnnnnnnnnnnnnnnnnnnnnnnnnnnnnnnnnnnnnnnnnnnnnnnnnnnnnnnnnnnnnnnnnnnnnnnnnnnnnnnnnnnnnnnnnnnnnnnnnnnnnnnnnnnnnnnnnnnnnnnnnnnnnnnnnnnnnnnnnnnnnnnnnnnnnnnnnnnnnnnnnnnnnnnnnnnnnnnnnnnnnnnnnnnnnnnnnnnnnnnnnnnnnnnnnnnnnnnnnnnnnnnnnnnnnnnnnnnnnnnnnnnnnnnnnnnnnnnnnnnnnnnnnnnnnnnnnnnnnnnnnnnnnnnnnnnnnnnnnnnnnnnnnnnnnnnnnnnnnnnnnnnnnnnnnnnnnnnnnnnnnnnnnnnnnnnnnnnnnnnnnnnnnnnnnnnnnnnnnnnnnnnnnnnnnnnnnnnnnnnnnnnnnnnnnnnnnnnnnnnnnnnnnnnnnnnnnnnnnnnnnnnnnnnnnnnnnnnnnnnnnnnnnnnnnnnnnnnnnnnnnnnnnnnnnnnnnnnnnnnnnnnnnnnnnnnnnnnnnnnnnnnnnnnnnnnnnnnnnnnnnnnnnnnnnnnnnnnnnnnnnnnnnnnnnnnnnnnnnnnnnnnnnnnnnnnnnnnnnnnnnaggtaagaagcgaggcgggagggggccggggcgcgctcgctcccccgaggtgccgctgggaccggagacaactcgggggccgccgcgggagcctacaaacttttattagcctcggggagtgggggtggggggctggcaagggccgggcgacggtgacgaaagggcagcgcgcgggtgacagcgctggcctcttcctctccctccgccggcgtcccctggccgggccgagggggaggaacctgacctcggacggcgagcggagccccgccgaactgccgggggcttcgagcctctcattcctcgcgggaatcctggcctcttttctccccctagtgtcccctttccctccaagggggtcgcccgacacccgttttcgtggtgaacgctaagccgcgtatgaattttactcgcccgaatatctgcacgccaccccggcgcgcccgagcgcgagcccgggctccggggaggccccggcggcgcctggcttgaggagggcgtgcggggcgcgtgagggtgcacacgcggggggctgacagcccgcaacttggagactgcggccggggccggcgttatctgttagaagtgggcgtgtcggagagagaactcaacaggtctggacgtacttctcttttaacctcgcacttttttctcttctccacccccgccccgcaagggcttgctctttagcgtttgttgttaattcgcgcctgaggtttctaagtggccccttttagaaaaagaccccctgtaaccgtaatggttttgtgctgcgatttttacaagtgctagtttgacgtttggggttgcagacttgataattgcaaccttgtaataccacttaagaccctctggcatggttcattagggccaattaatgtggctgggttatttgcaacttaaactgggggataatgtcgcttgagggagcgttttcgttttaggaaatattgttttggtttcgggtttgaaggcagctgtcaaaaaagcggcatggaaattcattgggctccattcgatacctcgtgtttagagatcgttatcgcctcagataaacggggcagagaggtggggagataagcagtttaccctcaagatttgtagtggcaagtccacacccctctctctaccttcatattcacttttcagtgagggccagtgacatttatgctgcctaacgtcatcgcataggaaaagttaccttttattggacgggatttgactatagtgtcccaaatgcgcttctccgtcttagcccatctcttaaaacaccctgattaacgatatactaacagtcttactctcttgagaataggctgagaattgggataggtgaaggtttggataggtgaaggcagagaaaattattttgaacattttactggatacagttgtacctgaatttatatgaatgtgattttacggttctgtgtttttccatttttcagtacttcgatatttgtttggaaaggaaagaacttagagatgtaatagcatttcatattgaggatctcaagcaatgtaaacaaatgtagcttaatctagatgtttttgtgagttatgataagggtcagctatatttaagttatgtaagctaacaacgtagtgagaaactactacaccttctcttctgctctttaaaatctaaattttagttggcctatataaagtgtatctcatttcatatatccaaaatttggaggtaggcacatccagtcagaagtatgggttaaaaagccttttcccagcctgtcggaagataagcagatcagcattgtttatttttcaaagaaaacgtgcatggttcaccagttggttgtactcaaaggtttggatgtgtgactagctggtaggagggaaatttggaagtaattagggattgagaattctagcatagtatttatcaaatgttatatgtattggttctcagaaaagcaaacagccgtgattgaaaagaggtaggaattttaatgatcacacttcctttttttgaaattaaatactttgacatcaacttgaaccttcagaataatcagatgtaatgaattataatgtctgtgattaacaaagctacacgttcagtgagcggcaggatgaatagccaagcttagttcgatacacttttgccctcagctgtgcaaatggattgcattgtacttttaaatgtggcatgctgaatgggagcaggggacatggctttttattctggaagatagaaactactcttctggtaacaaagaatttgattcggagttaactaaaaggttcatttaacaagctgcctcttactaatcggatcaggaagataatgtgactttagagcttatgatgttttccccccgtttttgttttttgttttgtagttgatattcactgatggactccaaagaatcattaactcctggtagagaagaaaaccccagcagtgtgcttgctcaggagaggggagatgtgatggacttctataaaaccctaagaggaggagctactgtgaaggtttctgcgtcttcaccctcactggctgtcgcttctcaatcagactccaagcagcgaagacttttggttgattttccaaaaggctcagtaagcaatgcgcagcagccagatctgtccaaagcagtttcactctcaatgggactgtatatgggagagacagaaacaaaagtgatgggaaatgacctgggattcccacagcagggccaaatcagcctttcctcgggggaaacagacttaaagcttttggaagaaagcattgcaaacctcaataggtcgaccagtgttccagagaaccccaagagttcagcatccactgctgtgtctgctgcccccacagagaaggagtttccaaaaactcactctgatgtatcttcagaacagcaacatttgaagggccagactggcaccaacggtggcaatgtgaaattgtataccacagaccaaagcacctttgacattttgcaggatttggagttttcttctgggtccccaggtaaagagacgaatgagagtccttggagatcagacctgttgatagatgaaaactgtttgctttctcctctggcgggagaagacgattcattccttttggaaggaaactcgaatgaggactgcaagcctctcattttaccggacactaaacccaaaattaaggataatggagatctggttttgtcaagccccagtaatgtaacactgccccaagtgaaaacagaaaaagaagatttcatcgaactctgcacccctggggtaattaagcaagagaaactgggcacagtttactgtcaggcaagctttcctggagcaaatataattggtaataaaatgtctgccatttctgttcatggtgtgagtacctctggaggacagatgtaccactatgacatgaatacagcatccctttctcaacagcaggatcagaagcctatttttaatgtcattccaccaattcccgttggttccgaaaattggaataggtgccaaggatctggagatgacaacttgacttctctggggactctgaacttccctggtcgaacagttttttctaatggctattcaaggtaagatcagtgtttttctgtttcttaagaatggtacatttaaggtagattaatagatgtaaatcttcattgatttatatgtgttctctaaagattcatgtgcttttttatatgaataagtttaagtggccttttgaaagtaggaaaggtagacaacctaagtgacatctgtacgtaaccatttcaggttttttccttaaatagtggttttcagtatcccattggccaacggtgaggattttatttaacatttttaaaataatgttgctcattaacagatatcttaacgaaaaattatataaattcaggagagtataatgtctcataatatcatattgtgttgtgcatggtcattcagctgttttagaatatgttcttatattacaataaatgatacccttacttacatagtcaaaagttgtgctgccttatttgtaaattcgttaagtgttagcttgagattaaagagttaaaagcagaagtactaacaaagagccctattcttcaaactgaatcttctgttaaagaatttgagttttgaagttgctaaagcaatgcagtgaacagtgtaccagaccatagtattagacacaggtcttgctcacagggttcttgccataaagtagacaagttatgtctgctgatcaatctctttaagagaggaattggtgtcaacatggtgcaaaacaaaattttacgttcaaatgttcctgcaagttctcaagtagataactgatggccaaaattgttaagcttcaattttcagctttcgtttgatttttctcttttttttactcagtcgtttataagcatactgatatttttgtctgacccaaaaaggtcagaaaatggaattatcagaaaaaagttctaaatgtagatatacgtgttggtaggggtgaatttctctaccccgtaacctcatccccaattcagataaatgctaggttttatatccattttagttgtgaaggaaaatataaaaatgtggattgtagtgacacaagattgattaatcagcgggtttttttaaaagaagacatggtagacagtgatttatttgtatgtaactattgaagttttttcttaaatgttagtgatattcatcgttcccattaactagttattcagatttttgaaaatcctttttctgtgaaagctatcctaacctggaggatgtctcttttctttcctctgtacttaagaagcttttcttgttagggaaataatttagaattagatttaggctatgttctgttcttctaaaaggcttagttgtcaaaaaaaaaaaaaaaaaacaccaaaaaaccttggttcttacatgtcttaatgtgaactacctcctaatctattgtttaaataattatcctttatttagaagaacactacttcaacctgagttgaaggtttaaaatcttttcagtaaggagatttgagatctttattattgcataagctgttgtgttttaaatgctaaaagacatgctgtgttttaaaattttcaattgcaaatttttggcaatagaattcgcatacttggttttcttaaaagagttaagtacggttgatttgactaagctatctgtaggaaactcttaaattgatttataaaacatgtaattatacaaagaaaaataaaacatcttaggaaactcttggggattattaatggattttgccctgataatcatcatggcatggttttcattttccttactataaagaaaaggcaagggacaaaacttattttccatttgctatgaacttttaaaccctataaaatctgggatatagagtataagtagatgaacatagttactcttaaatcactaaaggtgattttaatgctttaacttttatagtacttcatgacataaagtatctttacgtatttttaatttgggtcccataaccttatggaggtagtaggcaaggcaatgatgatgcggctctttagaagttctttaatatcaaatgaaattattatttttatgccaatctgtgattgggaaatataatcagtagtctgtgtcctaacaagaaggtataatactttatacagggtattttgttaatatttgaagattttataccttatggcattaacttagcactgggaactatgattacccaaaacaaagcttcatccaaataaattgaaacagtgtttcttttaaaccatcattgaattagtctattgtttccaaacaacagccctgatatagctaaaattagttgctttctcttctctatatgttacatgactgtagccaaacatttgctatgaccagtgaccctgagtgatcagcaaataatcaacacattgagaccacaacttgaatactgaccttctgactttacgaagaaaaatattaaatgccactaataacttgaattccttttaaattaaaaaaagttataaattgcaatttgactttttaaaatgccacctaaaattgtttttatcagaatacttaaaaaaaaatcctcactttattctctgggggtgggaagaggcaattccttccttccaccacaacattgaattatcacataaaattgtaaaattatgaatattatgattgagcttagtaaagcattttctaagttcatttatagtaaaacaagagaaaccttattctcaaaatctattctttaagtaaaacaaactagtcattctaacttaatatgcttttaaaaatactgaagttcagtacatttagcataaacttattgacgaaggcacatttctgcattatttgattttcagccttgtttcatttaagcattaatgacagaggtagagaacagaaatggttttaggtggtattagagcttttattgggattatgttgaaattttagtgttaaaaaattgttcgtatcctgaagggagggattattggagagaatgaatgatgtaggatgaacttgtaaattcagttttcggcagagtctaaaattaagtgatgattggcacttaatgaagctactaaaatttatgtagattttaatgtctcattagtaatcgcatctgtatctggttttataaaagtaatgaaattgaagacctgtacaaatacagaatgaatgaagcaaattctgctaacatcatgttgaatgttttctcagaaaaagaggaaatacgaagagaagagatttgttttgactgtgatttaccctcacccccatggatactttctttacttcctaccttttttctttttcttttccttctaaagattctggcaatgggtgtttcagtgttttttaagcttaatatttctggtactcatttatgtaaagtgatttctgaatgttaaaggagatttctttttaaatatattttcacttatttttagctttatgatgagaatcttattttttaaatctgtaacttgttatggctacatgattagtaaaaaaagtttttaaaacacactgtgtattcaggtgtgtcattttagtgtgaaatgactaatgcagaaatatgtgactagcatgtggtcagattttattgaaattacttacgatgtttctatggctagtccccttgtatttttataattggtaacataattcatatgttattttggtcttgtctatttgtgttacatgtattttagtctgaccacttttgctacttatttaatgtttatacattttatgaaagacttattctgaaatataccttgcataaatgtaggttaaatgcaaattgtattaatagtgaaatggatatgtgggtagagatcactttaggggccttttgagatttagtgaaggaaagattggatcaaaagggtttactttaatgtgactgcctaatgtgaaagtcggaacatctgcattaattggttagttacataaatcttagtctactctggcctgcaggtgactgaaacagcccaggaaatcttaatttacattaagcttagacaaggtctgaggcttaggcttagttcttaaagcacattcttttttactttaatgattattcctaattttaatgagcagtgggttctcattgtgtactagtacttaggtgggcaaattaaataagcaaaataggtttgtgctgaatagcatttacccttctgaggacatcctggtaatattttcatcaagagtaattgtgtaatgcaatatttacaggtatttgccagattaatgggcacttgttttcatatttctgagtcatggaaaatatacattgatgattcctgttgcataaagagttttcaagaaaattttgttgaattaagctataactacaaaaaaaaatccattacatattgacctttagaaaggatttttaaaagcccatgctgtccttatttctgcagcttcagagagccgactgctcttattttcttctggcatattctattaatacttgggttttgtatttttcaagtaaataaaatattcctattgagaatttcaattttaaaaaagaaaaggtctactaagtgttcctttccctgttgaattatgtgtgatcatttctatgctaaactagattagggtgtgacttgtgatggtgatttttgttcattttacatattaagaaagaaatagaattttattgcagttcaaaattatttgtagacagtggttttaacccccagacacctaattgtgacaggttgctttccttagtgctcaatactgttgtaaatgtctctaaatacagaatttccagtggagttcatgaattaattgggggtggagggtgaagagggaggagcaacagagatgtgggatgctatagataagtttaggaatatccagatcagttctgaaaactaacagtttggatcaactgtcatgaattagaggtttaagaaaagaaaaatttaggactataggtacaagggaatgcatcaatcagaattacaatttaatttcttttatttcaggtagaaatctaaaactgaccatggctatataatactaatttttgagttatgttgtttcttactatgctttattatcaaaaaaggataaaatgcacattttacttgaagattattttagctaagattaagttcatatttttctcatttttatttaagctgctgtttaataaatgaaaatctaatgacttgaatgtagtcgacctaatgtcttaatgttgatataatcatttcatatatcatagtgcccttttacagccattgtcaactgactggagagcaacccttttctttggtaatatatttctatgggttatgtatttttctgctggaatattgagaaaattaatttttcataatatgcagaataaattatggggttctgcaagtgctagacagtcacttaaaccatttatattgcaatacattccttaaattcagtattttgaatgaaagtgtgttatccccgaattttatcacttgtccaatttaaatattaattacatcccaatagagctgcatgcttaaacatgctttttcagagtaacccaagtattaatttcgagtgcttttaaatattttttctttttagcaagtttcaacaacattaatcctgtctataatgcagcaagttcagtgaaagtacctgttgttttataatttttttttcattctcactgtagggcaccaaaaatatatataaggggaaaaaagttttaatgatatgattagttgtaaatgtttacgcattatcttaccttgaatttttatttttgtaactaataatttgagagttcaataagtatgcagtgtttaagacatagtttgttgcaaaaagtgttaacttactatttctttttacaataaaattagcctttattctagttgatttcataactgtccataatatttagctgtggctattatgaaagtatatttgatagccaaattttgaaagctattatgaaatgatacaattcactacatgatttattatttcatgctggttggggcagtgctgtgacttatgaccttatgattgtcacatgctgaacactaaagctctaccagtttgttatggacactgttttactttatgttatcgttttaatgttttcttttataattattgaggataagagcttccttaattttaagactatttaaattgcagattttgcttttttatttttttaaccatcccttccaaagaatttgatttagatattcagtagtagaaacagaagaaaaatactcaactaaaagtccaaagacctagtttctaatgctaagggagacagtccatggcctccaactaggtactttggagtcaaaaatactttctttacaactgtgtttgaattgttttcaaaacacctgtgtgtgtgtttctaaaattccacaatccttttaacccgtcaatttgatgagggaagtaattagggtagggaatggtataacaaagttggttctttgacattttctttatagattatcgaatgtaagacaaatagatgtgaatgcagatttggtgtttttataagataaggatttaaaataatgtagttggtgatatataaaaataaactattgctgctgttagcacccgagaggtggggctcttgggttctcagagcttgttttctatgttcgttacagttattttagattagaacttaaaagaacttgagagtttccctaattctaccccctaattttttcgaatgagaaattgagatccatagaaagtgttgaggtaaagatcacaaaacacttaatgagcggtgttgccagtttgaatatctcaattcttagttatctaagttccctggtaggcttctttaattatctgggtctcttctagacatctggaacaaatagttgattgacataatacagactagccacatattttataagagttacttttgactcatttagatttttaaaatatacagtgtctgtattcttctctattcattttgttaatttttttttacctaataatgattaagcaccaattatgtgacagcactatgctaagcactttgcatgcattcatctcatttaaatctcaactctgtgaaagtttttattctagttactgtattaagtctcaattctgtcaatatccatgaagcacagaaggcagctgttatttaccttaattttacagatgtgaaaactaaaggcatttaaagagaaaaagaaaaaaaaaaccaggaaaccttaacacttatctgaagggaaatatttaatattgggtatgttagttcctcatgtatctttaataatttttgtcaacagcgaatctttaaataaaatataaaggatcaggcctctgctctcctgcatatatttgtaaagtcacttactgctttttgtcacagtttcaatttctgtaaaatagtgagagggtttttacctgacaggatttgtgcatgtacgtttactttgaaaattaaaaagcattaggccaggcgcggtggctcacgcctgtaatcccagcactttgggaggccgaggcgggcagatcatgaggtcaggagattgagaccatcctggctaacacggtgaaaccctgtctctactaaaaatacagaaaattagccgggcatggtggctggtgcctgtagtcccagctactcgggagcctgaggcaggagaatggtgtgaacctgggaggcggagcttgcagtgagccgaggttgcaccactgcactccagcctgggcgacagagcgagtctccgtctcaaaaaaaagaaaaaaaaaagaaaagaaaattaaaaagcattataaaaatgcaaggtggaatttttaaagctctgccaagtccacttagcttaaaccagcatgactctcattggctaagtacgttatgacatctgtgactgtggtgtaggtattgcctataatcaagaatcttttagggtctgctatgtgcaatccctgaagggtcatggatcgcagtttcataaagactgctgtattttaaagccttcaaatgccaacgtagtatcttcacaatgattttttttttcagttttattattttttgaaagcgccttcgacaaagttttcagtggattttgttgagggatattaagtatgccatctacataatagccatagtgataactccaaccacattgttatatttttattaataaatgctagagtattctctttctggtatttcctattctgatatttttatataatcaagtatgcaaagattctttgtcattggaaaccttaatttgcctgaaaatgggaatgaaattttcaggtttaaaatttttttacatttattacatttattgaagctgtctgaaaaagctcttgagtatattgaataccaaaatttatcctaactgcataaagttgggaggattgtgaaacttgactgcactgacttgttttctttattgatcaaatggttgaaaaaaacttcagttaaacaaatttgatctattaaaccaaagttataaaagcagaggaaagcatagaattattaaacggcagtttaaattggtaaacataccgatgtagaacctaagtttgtaggcagctttcttagatggaaacttaaaaaaattttaatcagaacattatgtgaaatttgtcatctggaattcagctgggtttattaaggacaaagtgtatggctataaaatagattgagttttttttttaaaacagaaaacccaaaataaatgttctaagtttccaccttaggaggctatgtatattgctcctctttgaaactgccttcagaaccaccttgtaagccataaaagaaaatcggactcattgcactatagtaacacctaactgttcttgctcaaagaaaatgtatttatcccttagctttatttgtgtgactccaaatcatatgagtattgccagatatttagaaatttaatcctctctcgaatgataacatttattttctttgagggtttttaaaagagcccacatagatatttctacagaaaatgtttaattctgttttgaatatgcctggaataagtgaatagcttcccagggtgactattctgaaatgggtgatgcttagtggttaagttctgatttgtgttttcttgaagttattaaggaactttatgataacagtttatatattccctcttcttggcatagtaatgaagtaatagagactattcacctctaagcctgattttttaaataagtgtttattttatgtttaagtaaggtaggtctgcttttggcttggacttgaatttggcaatagcagatataaagtaaacataatgtgaattcctacaacagtctcccaaacagtttaatttctcattcatacacatttcccttagtgtatcagggaattaagtatctgattatcagtatagcaagaacaactcaagtatactgaagttatttatactcataaaatagtttgagttatagctacaatataaaattaatatatttttgacttttattcctcacaacctgaaaaaaacctctgcgattactgatagtacttttaaaaactaaatgaattttgttactactatttgctaaatttagtcatgtttactgttcaaaaaatgctaggttaaaatggatcctaatctttgaaatgatgaagacatgtgtagtggtgtcaaaaataggatattcattttgtaactattctgttagtgccgaagttcttagaatttctttgtgacaacagcctgcttaagaactttagattttttagaattgtactaaaagcaaactgttttcttggatatttgttctttctccccaaaagatgatttataagttttcagagctaagaaatgggaaggaagagccatcctagcatggcaggtaatgttttactgctaacaggttttctctgcactgctttatttgccttgaacctcttactttgttctgtcagctgggaggctggtagattttctattaggtagcaaatgcttctcatcactaaacacatatcatgggctggtgttagtgcagtctgtggatgggcactacatttttaatcaagaaatgtttttaaaggaaagacaaattggtgaagtaatttctaattcagtattttagggatgagtgaccttttaattgataatgatatttaacagagctgtacagtgctttgggggtcccacagacatgtttaaacaagaaaacagtaaataaggaagccagaaggaaaagttataaaactattaagaaagaaaatgaaaattctaaacttcaattctggtgcctggctaaatttgatttttgtatgcctcagtgtttctctatggacactgggaaatcaataagcaacctagctacgttattatgttcgtaagtggaagaactaaagaactacaaagacatgttctaggccaagaattctggtggtaggtagagtgggaggttaactagatgatctccaaggtccttctaattgcacttggcagcagcaagcatttatcaagctagacactgggcatatggagatgaagaagatgaatatccccagcagcatggagagcactctgatgatagtcatccctgcctccccctccctcagtttgctttttgaaatgtgagcttgaaagatctcaaactccttcctgggaagacataactgaaacttcatggaggaaagtgcatgaatgaatgggaaacaagatttgattcaactatttggaataagaaaaggggcaacaaggagtctgaaacaaatgaaagaaaagatggaaagaattagttgactagatgaggactgagtacataggaatgagccaacaggagacttcagcaactaatggatgaaagtattatgtgcatgcatgttgtcatcaaatatcacatgatacaagacaaggagaaaacatgactttcaccataacctcagtttgtgtaccctagttgcaagatatttttttcttctagtcacttaagaatatccttattgtctaggagaaataatcctctttctgggctccccagtgtataagcccaaatctgaggaaaatttacctgaaatgttctttccccagatacccacatggtttactctctcatttaaatgtcagctctgtaaaagagatctctgactgctctatctgaaatagtagaatctttcacagtctttccttcttcttgacatcatctatttgtgtcttatctgctcacctgctacaatgtaagctccatgagagcagtgatactgtctgccttgcttactcctgtatgccagcgtctagaatagtgtctagcacatagtaagacctctacaaatacatgttgaatacctaaataaacaaaatttaacatataaaccaaaaagatatataggaatggattatatttctaatctttctcgagtgaggaaaatgtcagcagatagtgaatatcactgagagagagatgatagcccaggttatcttccccagatagaaataagccttaagactgacaggtgtatatgaatacagagagtatacataaagaagatgtattttcaattgtcagtctctaaatttgctttaagacttcgaaatggattgcttttcataatttcttagaataactctggtctgtttaccattgaaaaattagagtagccaatgtttgtaaatgaagggttagagggttttttcctttggtggtttgttaaaagcttgctcaaggcagtaacatagtaaattgtcaatataggaacttttgtagcagaagctttatgcttttcacttttataagaattgagattatttaagcagatgagtctaatgtatatgtttgtactgacttacctagaaggtcaggcaagaaatcggtttcctcatttttcagataagtgtgtgtgtaatcactgagtaccttaagagaggaggggtgttttatttttgcctgaattttcaaaatatctttcttcagcttatttatattttagatttgacttattctgtctatagtatataacagtcaggaggttggtaggataagttcatctcttctactaagagttataggagagttcaacctaatatggcaatgacagtcgcagaaaagagaaaatgcaagttaagtaggtgttagccatagcaagaaaatcagatgaggtcatttaagaatgaactgctctaatgttcaggaaaaaagaggggagggacaaggacagggctctagaaggcaaccaaagagagcagccacaaaataaatgaatagctgaagaattaggagacaacaatcttaaaatgtggcagggagagggtagttgtcacattaactagcatagaagagacagaatagaataacataaatatatgagtgattattgttcttgaaaccagtctttaaaacatgggaacattcccaaaaatcaaagccagataaattagggaaatcttaaatggcacaatataactagtgatttcgtttataatttttttaaaaaggagacttaaatttgaaatttagatgtaattaaagcagataataagaaacatacttctgagaccacaaagaccctgagattcagttaagagtaaggtagaaaggctggaagccagaagggaattaagtttctgttccctgagaagccaacacaacaggaaaaaactggccacaccctagttcaaactcttattactcttatcaatagtctcctaattgtttctctagttttctcctctcccttcttaattcattctgcagtctactgccagattaatcttcctagaacaccactttcagtattattcccctgatcaaaaaatgtctgtggttttgttgctcatagcatagtggttctccttctttgtaccacagcccatatgcacgatgatagatggtgggtagccacatgaactctccataacctttggaggatttgggttatacacagtctgttatccaagaaagcatatctgagtgtaagtgagcattatagggatagtcttataattgactccttttaaaatttgttcttctttttgcaaatgccccttcagaatttacagaaatagtgtgttcattccatcagtaaaattataccccaaaatgttaataagcttatttccatcacgtctcctttcctatttctttctttcctctttcttcctgcacatctccccttatcctccacatttctctgtaattacataagcataaacagacacatatgagattttctgggttgcttgcctttaaataaaagaatgggattatcttatacccctttgtctgcagcttgcttttctcacctaacaagtacaccctgaacatccttccaggttaacagatgcggatcccattcttttaaatagacaatattctattcatgtggtttcgtgatttttgccactacaagcaagtttctaataaacacccttttctatgtaccctttacaaatagcaactttttttctaaatataaatgctatggtttggctctgtatccccacccaaatctcatcttgaattgtaatcctcacatatcaggggaggggcctggtgaaaggtgattgaatcctggaggcagacttctcctctgctgttctcatgatagtgagttctcatgagatctggttgcttgaaaatgtatggcacttccctcttcactcactgtctctcctgctctgccatgtgaaaacatggtttctttgccttccactgtgagtgtaagtttcctgaggcctcccagtaatgcttcctgttaagcctgtggaactatgagtcagttgaacctcttttctttgtaagttacccagtctcagttagttctttatagcactgtgaaaatggactagtacagaaacttggtaccaggacagtggggcattgctataaagatacatgaaaatgcggaagcaactttgtaactggataatgggcagaggttgcaacagtttggaggactcagaagaagacaggaagatgagggaatgtttggaacttcctagagacatgttgaatggttttgaccaaaatgctgatagttatatggacaataaagtccaggctgaggtggtctcaggtggagatgaggcacttattgggaactggagcaaagttcacttttgctttgctttagcaaatagactgacagcattttgcccctgccctagagatctgtggatctttgaacttgagagagatgatttagagttcgtggcagaagaaatttctaagtagcaaagcattcaatatgtggcctggctgctcctaacaacatacagtcatatgtgttcacaaagagatggtctgaagttggaacttaggtttaaaagagaagcagagcataaaagtttggaaaatttgcagcctgaccttgtggtagaaaagaaaaacctattttctggggagcaattcaagtgagctgcagaaatatgcatagatgaagagtagcctaatgttaatagccagtagaatagggaaaatgtttccagggcatgtcagagaccttcatggcagcccttcctatcacaggcctggaggtctaggaggaaaaaatggtttcgtgggccaggcccagggttgcgctgctctctgcagcctcaggacatggtgccctgcatcccagctgctctagctccagctgtggctaaaaggggccaggagataatcttgggctgttgcttcagagggggtaagcctcaaaccttggcagccttcatgtggtgttgggcctatgggtgtgcagaaggcaagagttgaggcttgaaagcctctgccttgatttcaggatgtatggaaatgcctggatgtccatgcattctgcaggggcagagccctcatggagatcctctgctagggcagtgcagaggagatacatggggttagagcccccacacagagaccccactggggcactgcctagtggagccgtgagaagagggataccatcctccagactccagagtggtagatccactgacagctttcaccatgtgcctggaaaagctgtaggcactcaatgctagcctgtgaaagcagctgcagggtctgtacccagcagagccaccagggcagagctgtccaaggccttgggagctcaccccttgtgtcagcgtggcttggacatgagacgtggagtcaaaggagatcattttggatttttaagatttaatgactgtcctgcaggtttttggacatgcatggggcctgtagcctctttgtcttaaccaatttctctagtttggaatgggggaatttacccaatgcctgtatcccaattttttcttggaagtaactagtttttgattttacagtctcataagcagagtggacttgccttgacccaagaagactttgtacttggacttttgagttaatgctggaaggagttaagacttccggggactattgagaatgcaagattgtgttttgaaatgtaagaacatgagatttaggaggggccgggggcagaataatatggcttggctgtgtgtccccacccaaatctcaatcacttgtaatccccacatgtcaggggaggggcctagtgggaggtgactgaatcacaagggtggacttccctcttgttgttctcatgatcgtgagttctcatgagacctggttgtttgaaagtgtgtggcacttcccccttctctctctgtctcctcctctgccatgtgaacatgtgcttgcttctccttcaacttccaccaggattctaagtttcctgaggcctctcagtcatgcttcctttgaagcctgtggaactgtaagtcaattaagtctctgttcttcataaattatccagacacaggtagttctttattgcagtgtgaaaacggaataatacaatagatttccccaaagttgggttcctgagtcaggggtatgtgtatttaaaattttaacagatatttccaaattacttttttcgaggattatggcaagtcacagttccccctggcagtgtttatacttttctttataataaaaatacataaatcattattactaacaaattccttgccatgagtcctaaattgataacaacataccagtgtgccatataacatagctgaggactgttgcagtctagaattcaggctccttctctctgcttttaacaatatgtgtaatgttcaagaccaatttagtgccacttattttgtatgctttcctttatgtagtccaggccatagccccccacctcatctgatggtatcctctggcagccacagaccacacagttctttctacctaaattagtcattagcacatagtaggtacccagtaaatgtttgttgaattaatactgtttatatatttctaatttatctccaagtaaatccagtctccttaaggacaaggaacgttttcactataacacctagcacttaaggtactcaatttaggtagggctgtttgaacaaagaaccacagaggaagcaaatagcatggccttgcctttaatacatatattttactttctcttagggaaaactggaactgtaagaatctagtaacaataataagaacagcacttttattgagcagttactatatgtgaggcacagttcaaactgcagaggatacaacagtggacaaagctttagttgtttctgcctttctgaagcttatggtttatgggtgttacattcaagacatttgtaggacacattctaaaatgccatccaatttcaggctctttccagcagaaactgtggaatatttttccgttcattcagcatttacttagtgcctgctctgccaggaattgaagagaaagcccaaagacaggcagaccttacctgagaggtagtgaactgaccaggatgactgtgggcagtagacttgtttcccaaactagcctcaccatttctgtatttgcatatacgaggaaaggattagatatagggattcatgtcagcatacaccccagggacatttgtttttagtgaaaggtgccagtcttcatccctgtacccagtacacaaaccacgaagaagtatgctcccgtcattgtcaaagaatcatagaattccaaatggagctagttttgatatccagatctcacttcatatgaggaaactaggtccagtattgtgagtaagaattaggactcttcagattccctgggtatgaatctgactaacaactgtgtgaacttgaccaaattcataaccctgtaaactctgtttcctcacttttaaaatgggcacaacaaagtgatgcatgtaaactgcatagcacagtgtctggcacttaaaaagcactcctgaagttatttttagtgatgtgttttaagattagacaactccttaatgccaaaggtttttacttgagaactctgtctgttgtgccatactacacgctgttcataagataagcctttttcattaattgatctcaaactggcttcattatgatcttaactttatttcagttttatttttaaaatttatttttaatttttatgggtatatagtaggcatatatatttatggggtacaggtcatgttttaatgcaagcatgcaattgtgggggtgatatataattgactggggtgagatatctcattgtagttttgatttgcatttctctgatgattaaggatgttgaacatttcttcatacacctgttggccatttgtatgtcttttgagaaatgtctattcagatcttttgtccattttttaagttggattgtttgattttttcctgttgtctgaactctttatatattctagttattaatcccttctcagatgggtagcttgcaaatattttcttccattttgtgggttgcttctttgttgtttcctttgctgtgcagaagttttttagcttgatgtgatcccatttgtccatttttgcattggttgcctgtgcatttgaggtattactaaagaaatctttgcccataccagtgtcctggagagcttcccaaatgttttcttttagtatcctagtttcaggtcttagatttagggctttagtccatttttatttgatttttatatgtggtgagagataggggtctagtttcattctgcctatggatatccagttttcccagcaccatttattgaagagactgtcctttccctagtgtatgttcttggcacctttgctgaaaatgagttcactgtaggtgtatgaatttgtttctgggttctctaggtctgtgtatctgtttttatgctagaactatgttgtttgggttattatagttttgtagcataatttgaagtcagataatgtaattcctccagttttattttttttgttcaggatggctttggctattccggggcttttgtggttccatataaatcctatgattttttttttctatttctgtgaagaatgtcattgatatttattaataaagattgcattgaatctgtagattgctttgggtagtatggacattttaacaatattgattcttccaatccatgagcatggactatctttctttttttgtgtgtcctcttcaatatttttcctcagtgttttattgttttcattgtagagctctttcacttctttcgttgagtttattcctaggtgttttattttatctgtagctattgtaaatgagattactttctgatttcttttttagattgtcctctgttggcatctagaaatgccacagatttttgtatgttgattttgtatcctgtaactgtactgaatttatctgttctaatatttttttggtggagtctttaggcttttccaataagatcatacagtctgcaaacaagaataatttgacttcttccattccattttggattccctttatatctttctcttgtctgattactctaggtaggtcttccagtacttccagttgaataacagtgggcactcttgtcttgttgtagatcttagaagaaaggctttcagtttttccccattcagtatgatactagctgtcagtttgttgcagatggcataactttcaaactaattgattatagttaggaagtggatactttaacttgtggtaccattatcagatttatatttcggccataagcttgaagaggagctgaaaaatgcatatgtgatgcatatgcttcctatttggctctcttctcccacccccctgccctataatccacacaagttcctctctcagtcactcatcaactacttgaacctctgaggaacttggggttaaggtaaattagaataaaactgtctgaagaagagcaagcctttcatgtcttgagaaattcttggggttttagaaataacttcattgctttttttctccagttactttggcttcttcttaaagagaatactaacactttgaacgtcataatactaaggttctgcctcttcaaataaagactttaaaaaaaaatggtttttgtatgattcagtgtgaattaaatcccacagtgtaaaggactttactttcttaatgtagattttcaaatacacaattactgatgtttataagtagatttattacaccaaagcacctagcaaattcttgaatggatcaggtcttatttttcagtcttactttgcaaatttaagtcaaataattaaggatttgttaaatatttgtcttaatatcaagcttttgcatatcggggccctcttttataagctttataagcaatcttttgttttctctgcttgctcaaagtagctatgtttgttgtatctgttagtatttgctctataacaaacatactgggtgccttcccacttagatttggcaattatcactcctgtaaatgagatattacataagataggaaaaagaacagtatctttccaagaagaatagtatccttccatattaacagtttagagctgactgcttttaaaatttagtggctttaaaataacaaccatttattattcttcatgagtctacaaatgaggtgggcagttctgctgatctggccaagctgaacttatctcagctgggcacattcagcgtatctgctgtcagttggctggttggctgtagcaatgaatggtgaaagtaggctgcccttaactttttcacacagtagcattagagttacaaaagaaccagcagaaccatgcaaaactctttaagacctaggcttggaacaactatatttctaccacattctattggtcaaagcaaatcacggggctagtctagattcaagtgggtggaggagctgcaattacactgcaaaggagtgtgactgtagggagaggtgtttttttatttttatttttttgcgatttgtcacagtagttgtaggaatcaggtgtatttaaaattctgatccttctgtgatatccgaattgttcatgaaccttgcctctggtggaaaggcagaatcattgtgacagaaggataaaatcttggaatttagagactaacaaaggttcagattccagctccatcacttatttctgcaatcctgcagaagttaatcttcctgataggcattcagtaatgattgattcacctgaacctcagattctttatgtattttaaagaaagggctaggtaaatgcaaagcacttatgtaactgcttttattattgcaaacctggctcccacactccattcaaggtgtaagactcagtgtcttccttgaattaaaaaggaagagaaagtgtgttagggaaaggaagagaaatatttgactaattgtggccccaataaagtgaccactcactgggggtattttcctgtaagaaaagaatggttgaggctcagagttaagagatacaaatccaaaagtctccttggggtaggattccctgtgattcatgggttgagaggtgtaacattagacacagtcccagtctagattttttttttaaagaattgtggtccatcctatacacactgggtgccttaatactatatgtggcaattatcactcctataaatcaggttttacataagataggaaaaagaacagtatcattccacattaacaattgaaagatgactgcttttaaaaaattaaaagggccatatagaaataaaatcacataaatttcttgtgttaaacatagttgtcatattggatgaggactaaacacctaaattcatccaactagtagtaatagaaaagatgaaacacacacacagtaaaactagattaatttaatttatacaaagggccagatatctcagaattcagacagtcagagatgttgactagagttaatgcctcttttaggagaggtaccaggtaagtgttctcaaagaactggaaactgagaccaccacctctggcattatctatttgtgaacacaagcaagtctgaatttttccgcaccatagctacctttcatgtaagcttcttttcttagaagaaaagaaggtaacatttgggtgtaattttttattaagggtgaaatttagtgtagagagtaaaggcatttggcatagaagcccttagttttttttgtttttaagttgaactgccagcctttatggattgcagtcttcgctgttttgattgacatttcccaattcattttgtattatttatttttttaagagacagggtctcactctgttacccaggctggagtgcaatggggcaaacttggatcactgcagccttgaactcctgggctcaagcaatcctcccacctcagcctcccaagtagcttggactataggtgtgcaccaccatccttggctaattttttaaatcttttgtagagacagggtagtgctctgttgcccaggctggtctcacattcctggcctcagttgatgctctggtctcagccttccaaaatgctgggattacaagtgtgagccactgcacctggcccccaatttcatcctttacaaagactactttcaaccataaatcaacggaaacttcagctccctcagacatatttgggatccaaggatattttcccaaatgattaatgctaatttcatatcaatacatttttgcaaaacctacaaaaatggactagtaaagaaagactcttaatttgggaaagacagttacttggagagaagagaaacttaagaggcaggtcgagttcagtgttcagaaatgagaggatcataaagagatagccataaaaatgtttctccctatattgcctgctgatagggtgtatcagtgaaggtcttactaaggaccttgtaccttttcagcgctgcactgcgtgctcatagggaggaaagataaatcatgtgttttttctgacctcaaaggagcctgtatctggctagagagacatgatgcagacacatgaaataattaagaaacaattaactgtagcaggtgctgaagaatataccaggaggtcagagaatggtagagctagtgtgggcgaaggtatagcccagagcatcatcagatgattcttccttatgcaaattcacatctcctctgggtcaagtatcatcctggcatgcagcagctccataggtaatgccctaaggctagcctgaggcaagttgcaaaagccatcatattgagtcatggcctttttttgtgtggggggaggggaatggcatccccttcctgtctgccaaatcaaggaatacagtgccctcctaaacctgctttgttttagtggattgttaaaaagaagtgaatgaatttatgcttcattagggaaaggttacagtggaatactgaggagtaaggggtatttctatttaacaaatgacataacttgaaggaatgaaatcataaggatggaatttcaggcattaataaaaagctgatgagagatactttgagacaaaagagccttcccagtgtaaccgagatcacagcacctacttcacatacacaggaaaccagtcctatctgtctctcccatagagcagtagctgccttgtttttcctccctcctccatcattcattctaaatctccagtcctccaccgcaccttatccaaaccctgatacccttaagtcacagatggtgaatcagtcaaaagtagtattaaaaactagtggtacacagctacacctggaatgcagtaagaaaaatacggatttctgtacatcatcttccctccctgctcttacccccatttaagagttacagggtcagaacccaagagtctgagtttttgaaagtccctaaaaattttggatgatcacctacatttagaaccactgcactaagaaggacaacaaatatgccaataaattctgttgccaaggaggtgattatgcaagctggaaccctgataacatgaggagaatcccacaatagccaaatagtccatgtactagttacattataataaagccaaaagcagcaggcctacctgactttctcctgaggtctatcatgagcttagagagaaggaacgtggacatatagaggtagctctagatggagaagggcactaggtgtcatggaaagaatcatgtgcaagaagtaaagaggtgctctgaatgtcctagccctgcttaggtgtctgtgtcctcacatgagaatttatccacagttctttcccgctgtaacaatctttggttccaactgcatttgtgagacagcaaaaagctatggtccagtctccttccattgtatcatctcatcaatgtatttctcccactacccttgtgtgaaatacaaacttttttggcttattgtgattatgcaaggtgtatgccaactttttttttttctccacatctttcagctttctgatgggtaaaaattttccttattttgctttagaaaaattctcattggcatagatctaatttcagggagcctcccttgaaagctaaataacattgagaattcatgaaaatataatgtagagcattatgcctgttagcatattagtttaaatagaagtggttcatgaaaatttttgaaatgccagaccctgtcctgtgttttgtattctcccaaatactcatccagatactgttcagaatgtaacatgattattttgaaataaagattttcccctagtttttaaaaaagttactttatacattaacccttatgttcctctttgatcaatttttccagtagtgtaaacagtcttcagggaagtagatttcttacagaaattgtcaagtggctctctgctgttagcatggttactaatcttttggttacttttcatattttttatactttctggaagtggacaacttacttgtaaataaaagtgcataatttgtattaaaaatttttagtaacaatctaatttgtaaaatagatgtgagcagcatgaatgtgtgtgatatgcgtacatacgaattatgtctcttaaaaatgtatcacagacatctttccgtgtccaaacaaatctacctcattctttctaatagccatatgggtataccataatatatttaactaggcccctattaaaagaattttgactcttttgtagctactatagtgttgcagtgtgtatctgtgtatgtatctttgtgtgtgtatctttgtacgagtgtacatatattttccccttggctatttcagatttttttttaggtttaaatcttaggaaaggttttgaaattgtcttaagtattttcagaagcattaaatcatggtttttttacatttttcttttagaagttttatgtcatctctatgagtagctttcagtaatttgttctgcataaaattcccgaaaacttccatttaaaaataggtggcatgactagactttctcagccgaaagagtgaggtcccaggaaggattttggagaagctgtgttcaaatatagctgctgacctgatgtctgcctagagtctggcaaggtgatgtgttgaatctagtgtctgcctgcatgccagcatccctttactgatgagatttgtggttttcatcacttcatggtaattatcccaagttataagatggagtctctagaaaatcagtagagtatgaaggcccaagtaaaatacatgtgagtgcatgtatgtgtgcatacaaattacttctcttaaaaacgtatcctgggcatttaaagaatgaggacctccgaaggattttgtggaagctgtgttcaagtacagctgctgagcgtatgtcagcctggagcctggcaaggtgaagtgttgaatctagtgtctttttgactcactgttttttttgactcactgtgctttgaagcccttgtcatttgggctcataaaatagatttctgtatactgtctctcctccctgccctcgcccccatttaaaagtatagtggcagaacccaagaatcagagttactaaaaactctctagaaaatttggatgatcacccacctgatcatgtcttttttactcactatgttttttttttttttgagacagagtctcgctctgtcgcccaggctggagtgcagtggcatgatcttggctcactgcaagctccgcctccctggttcacgccattctcctgcctcagcctcccatgtagctgggactacagggcctgccaccgcgcccggctaattttttgtatttttagtagagtcggggtttcactgtgttagccaggatggtcccgatctcctgacctcgtgatccacccgcctcggcctcccaaagtgctgggattacaggcgtgagccaccacacccggccctttactcactatgtttttaagcccttgttttcatttgctccactgtaaaacattccccaagccaatctggagctgaggcaaatttttaacaatttaaaatctggggaatataaatattggataatgatcatcctgaaaaaacaatgaaggtagtagcataatactttatatatcaataaaatggcaaaataagacagttgttgaaggacagaaagagtaactgaagttaggagcttatcttaacacattttttgtgtcataccataggcatcatattttttaaattttttttatttcatacacataggaaaatatatgtgtgtaagaaataataaacacctctttgtacctaccacccaacttaaggaacagctcattgctattccctttggtgctcgctggatgccctttcccagtcacatccccctcccttcccatctgcaggactatactagtaaattttgtattttttgcattattttgctttgttttatgattttactacctatctacatatccctaaataatacattatttagtttcatatgttttaactttatgttgtggaatcacattaaatgtagtcttttttttttatattatactttaagttctagggtacatgtgcacaacgtgcaggtttgttacgtaggtatacatgcgccatgttggtttgctgcacccatcaactcgtcatttacactgggtatttctcctaatgctatccctcccctagccccccaccccccgataaatgtagtctttataacttgtttttttaactcaacattgtttgtaagattcatccatgtaagctgaagcttttttatagagatctttgttaagccttttaatgaatacagtacatacatttctctgttcccctgttagtggacacttggattgtttccagagttttgctgttttgaacaacgctgctgtgaaaatgtctcctgaaacacatttataagagtttttttttccccaagggaattatacctagaaattgaataactagatcacaaggcatacacatctacaacttctgctaggtaatgccaaattgtttccaaggagcgttagaagtgttctcatcaacttttactagtgctagtcttttacatttgtggcagtatggtgggtgtgaaatatttatgtttagtttttcttggtgccatttaataatttttataaaaaatatttagaagtcaaggcagttttttgtttttgtttttattttttgcttgttttgttttaatgcagacattgagattacgacttggaataaacattggttgcaaagttcctaaaaggaaaactttttttggtattctggagcttttctggtactgaataaaataagtatgttaaattatgcatgtgtagtttagaagtcagagcaataattgtgattgttgaacagaatggcagtaaaaagtttctaaacgattgtactgtacaagggacacttgttgtgggtcagttttagcctccccaacttttatgttaaaagttgcaacaaggtttaagggcttatgtttgataggccagatggtgaccagctgtgataaaacacagggaacccttgcaaaggatttcaaaatttatgcagtagtccgccttatctgcagttttgctttccaaggtttcagttacccgcagtcaactgtgttctgaaaatattaagtgaaaaattacagaaataaagaatcgaagagttttaaattttatgcttcccacccatcccacctgggatgtgaatcattcctttgttcagcatctccatgctgtaggtgctgcctgccccttagtcacttggtagccatccaggttatcagattgactcttctagtattacaacacttggcttcaagtaatccttattttacttcatagtggccccaaagtgcaggagtggtgatcctggcaattcagatatgtcaaagagaagctgtaaattgcttcccttaagtgaaagatgaaaattctagacttatatataaagaaaagaaatcatatgctgagactgctaagatctatgataagaatgaatcttttatacatgaaattgtgaagaatgaaaaagaaatgcgtgctggttttgctgtcatatctcagactgcaaaagtttgcagccaatgtgtatgataagtgcttagttaaaaggaaaaaggcatttaaggtaagtatatatagtgtttggtactacctgtgatttcaggcatccattgggggtctcctgagtataaggggagactactcttttagtgttaaatgaacactaaggaacagagatggggaagaggttggagaagattagttcagcagtttgagtataggtaaacagttgtttgagaaagaagaaaaatgtgattagtattttaccttagcaatagtggcatagataatgataaattatagtcacacagaactcttagtatttacagaacgttcacatttgtgatcccatttaacaataactctgaaagaaaggtatcatctaccactgctttattgataaagatataaaaggtaagagagatgaaacatattggccaatgatacccatctggtaagagacagggatggggtgggaccccaaggctcttctcgccaagcccacggtttttttgctttatacttttttgcctcctgatcaccatggctgcagtttctactgtggacaatgtctgtcagcaagcattgatcccctgccttcagcactcttacgtcttagcaaggactggaaagaaaaagccaggagtttacagtctgctggagcaacagaaaagaatgatatgaaatatgaagagaccaaaatgatttataataaggtgctagactatgtagtaaaaatctgctttagctgtaagtcaaaagcaagagcagtcttttcagaatggaatagaaatgttggaattaaaggaattttcaaagttgtgaatttttttcaagataaacatgttttattttggtaattatggtattactaatttgataaccttcagggagccacctaatattatagaagatgtacatataatgacaaaagcaaacattttatttttaaggaccacaatctaatctaaaacaaaatttcccccttttctggtctttggttaattaaggacttatttaaatatcaaagaaagacacatagaaaacatttagtatatttctatacttttattaatgtcctccataccttacacagatacttgacttggctatggtctagataatccatgaaaatttaaaggacagattttaacaactttatgctaaattgatagatctctaggatcagattgccatcactctcagatgcgaagcttccaaccacttataggttcctgatatcttgcttttatacagacctaatttctcttcctttaaactttcttttcctcagttgctatttgattgaaatattgagtcattaaaaatttccaagtgggaatttttgtgtttctgcatctatcatgaagctgctcaaataagtaggtgtttgaataggagtagaaacagtaataggctgaagccagaccaatacagcttcagctaaatgccgaccttgctaaagtctgggaggaccggtgtggtattctacaatgtacaagtctgtagccggtgcccttaatatgttggcttcatgtctcatgactctcttctgtaaatatgcagtttaaaaaatacaagttattctgctgtagaagatacatttgcaaaattgatgtatcccctctaagtaaagttggctaaacaataaggacatatttataattaatgaatttgagaagaatgctgacgatatgcattattctttgaagttaacatttttcaggtcctaaataaacaaaaagtaggttacttctgtctggagtgtatgcaaggggtaccatcttgtccttggttcctggctgctattccaaggtgctataaagtcagctaaagagagcaatcataatacattgatagcatccctcaatgtgtttctgagctacttgagaatcttatttttgaataggtagcaggaaaccatctttgcagggcagcatgggcaaagggattggagggactattattataaagatccactgaactgcttcagtatcataatatcttaaactaaaggactggaaagagccagattccaatttaatctgctcttctatgaattcttagctgggttcatttaaaaagaaaaaacttgaagattgcaagattttgaagacatcttaaaataggtgaactccaaggtgcactttaaacttgagactgataactgaatactccttcaccttttgatctgatattgtcaaaatgaatgaggacttagtgctctagtaagtttggaacagaatgatattaatttattttctcatgattgattcttttttgctttttaatagattaaacttcaccgtagaacagtttctcaacctctggactattgacatttttgattggataattctttgctgtcagggctgttctgtgtgttgcaggatagttagcaacatccctgacaatcacaaatgttactttctgtctctatggatttgcctattctggacatttcgtataaatagaatcatatatatgtggcttcttgtacctggcttatttcacttaacatgttttcaaggttcatccatattgtagcatgtaacagcacttcattttctttttatggctgagtaatattctgttatgtggatatactaccatattttgtctatccactccttagctgatggtcttttaggttgtgtccattctttggctattataaataatgctgttaagaacattcatatacaagtttctgtgtagacatatatctttatttctcttgtgtggatacctaggagtagaattactggatcatatgataactctatgtgttaccttttgaggaactgccaaacatttttctacagtggctgtatcattttacactcccatcagcaatgtataagaattccaatttctctgtccttgcctatatttattaactgtcttttcttattagccaactgctgtggttcgaatgtttgtcccctccaaaactcatgttggaacataatccccaatgtggcagtattgagatgtgaggcctttaagaagtgcttgggtcatcagaggtctgccctcatgaataggctaatccattcatgagttaatgtactaatgggttatcactggattgggactagtggctttataagaagaggaagagaactaatctagtaagctcagccttctcactatgtgattgctgccctgtgtcaccttgggactctgcagagagtcctccagcagcaagaagttcttcatcagctgtggccccttgaccttggacttcccagcctccagaaatgtaagaaatccatttcttttttttaataaattacacagtctcacgtattcagttataccaacagaacacagactaagacaccatcctattgggtatgggtatctcattgtgttttttatttgtgtctcccaaatgactaacgatgttgaacatcttttcatctgctttttggacatttgtgtattttctttgaagaaatgtctttaacattctttgcccattttaaaattaggttgtctttttattgttgagttgtcggtgtgtgtgtgtgtgtgtgtgtgtgtgtgtgtgtatctagaatatatgtgtatgtatatatgcagatatattctaaacactagacccttatgaaatatataatttgaggacaatttctcccatttaaaaggccatcttttcacttcttgatagtgtcatttgactcacaagtttttaatttttatgaagtccaatttattttttaattctttgtttttggcactgtatctttaaaaagttgcctgatctaaggtcaaactgattttcacctatgttttcatctaagaattatagttttagctcttacatttaggcctttgatccattttgaattaatttgtgtatatggtgtgaagtagggctctaacttattcttttgtgtaatgatacctagttgtcccagcaccatttgttgaaaagattattctttccccattgaatggtcttgataccttgttgaaatcaactgaccataaatatataggcttattcctggactcacaattctatgagtctgtatgtctaatcttatgccagtaccacactgttttgattattacatctttgtacaaagttttgaaattgggaaatgtgagtcttccaactttgttcttttttaagattactttgcctatattccgtgttcgttgcaaactcatatgaattttaaatcaactctccatttctggaagaaaaaaagaggcaattgaagttcagatagggattgcattgaacctgtagatcagtttggggaatattgccatcataacaattagtaggtcttccaacccatgaatacaagacttctttccatttctgtagatatttagtttctttcattaatattttgtagttttcaatataaaagtcttgtacttcgattaaatttattcttgaatattttgggttttgatgcttttatgaatttgttttcttaatttcactttaagattgttcattgctactgattagtaatgcaactgatttttgtgtgttgatttttgtatcctgcaacctagctgaaatcattgattagcataatagagtatttaatagatttaggatttctatatataagatcatgtcatctgcaattagagataattttacttcttccctttcaatctggacattttttacttctttttcttgcctagttgccctagctagaacctccagtgcagtgttgaatagcagtggtgagaatgagcatctttgtgttggtcttcatcttgtggggaaacctttcagtttaagtgtgttgttgtggggttttcatagttgtcctttatcagattgagaatgttcctttctgttcctagtttgttgagtgttttctttttgattgttttaatcaggaaagggcattagattttgtcaaatgctttttctgcagctattgagatttttgtgtgtttttctggtcttttatggtttatcacattaattgattttcatatgtcaaacaaaccctgtgttcttgggtttcatctcacttggttatggtttataatcctttttatatacttgtagattcagtttgccagtattttgttgaggatgcttgcatttatatttataagggatattggtctgttgtagctgaccagtaagtatagtaagctgtatagtttactaagtgttccctctgttttgggggagactttgagaagaaggattgttggtaattgttctttaaacatttggtaaaattcactagtgaagccatctggggtcttctttggaagttttttgattactaacttaatgtctttacttgtttgttataagtccattcagatttttttctccttgagtcatttttgacagttggttgaggaatttgttcatttcatgtagttatctaattggttagtgtataattattcatagtattcctttataatcttatttttttgctgtaaggtcagtcataatgttcactctttcatttcggattctggtaatttaagagtcttctctccttttttttcttggtcagtctagctaaagtaaagttttgtccgttttcaggggaacagctttttttttttttttgaggcagaatttccatcttgtcacccagtctagagtgcagtggtgcaatctcggctcattgcagcctccgcttcccgggttcaagagattctcctgcctcagcttgccaagtagctgggattacaagcgcccaccaccacgcctggctaattttttatatttttagtagagacggggtttcaccatgttgggcaggctggtctcgaactcctgacctcaggtgatctgcctgccttggcctcccaaagtgctgggattacaggtgtgagctaccgtgcccaacccagctttggttatttttgttgacctactctattgtttttctcttctctatttcacttatttctacactggtctttattattttcttccttatgcttgctttggacttagttcttctttttctagtctcttaaggtggataattaagttcctgatttgaattcttacttctttgtaaggtggtcatgtactgctatgaatttccttctcagaaatgtatatgctttcactgcatcccttaagatttggtatgttgtatttttgttttcatttgtctcaaggtatagtcttctgatttccattgtgatttcttccccctctaacccgtttattatttaggaacttgttgatttccacatacctgtgaactttccagatttccttctttgttaattctcagtgtcattccattctggtccgagaacatactttgtatgatttctatcttttaaaatttatttggcttgtcttatgacctaatacattgtctatcctggaggatgtttcatgtacacttgagaagaatgtgtattctgcttttgttgggtagagtgtttgacaggtgtgttggtacatagttctgttcaaatctgtttccttgcagatttctatctagttgttctgtctattggaagtaggatattgaaatctccaactaatattgctgaattgtttattgttttcttcagttctgtcactttttgctttatatattttgaaattctattgttaggtacaagtaagtttatgattattatatcttcttgatagattgattcttttatcattatacagtgccctataagaacaatttttatcttaagtctatttgtctatattagtatagccacttcagctttcttttgtttactgtttgcatggaatattttcttcttttactttctatttgtgttcttgagtctaaggtgaatctctgtagatagcaattggatctgccaatctttgctttttatttggggagtttaaaccattgacatttaatgtaattattgatgaggaagattacttctgatattttgccatttgtttcctttattttgtgtctcttgttcttaaattcttccattactaccttctttcttttgtattacatattttctagtgtaacgattttaatttctttgtcatttcttttgttgtatgtttttagttattttcttagtggttgccacggagattttattgtcattttaacagcctaggttgggcacagtggctcatgcctgtaatcccagcactttgggagactgaggcaggaggatagcttgagtccaggagttcaagaccagcctgggcaacttactgagatactgtctctacaaaaaaatacaaaaattagccaggcatggtggtgtgtgcctgtagtcccagatgcttgagaggctgagttgggaggatagcttgagcccaggaggttgaggctgcagtgaactttgatcacaccactgcactccagcctgggtaccagggcaaaactagcccaaagaaatgaaggaaaaaaaaaatctaatttagattaatatcaactcaacttcaacagtgtataaaaactttgcctctgtatacctcttctgcttccactctgtgctgttattgtcatagattttcatctttctacactgtgtgtttatcaatgtagatttaaaaatattgcttagtagttgtctttagaatccgatacggagaaaaggagatataaacaaaagatgcatttttactgtcttgtatgtttacttatgtaattccctttcctgatgttgtatttctaaaggcaaagtagggttattgtgagtgtccttttgtttcaacctgaaagactccttttagcatgtgttggagatatgctaatgatggactctcacagtttttgttatctgggaatgtgttaatttatccttcatttttgaaggatagtgttggcaggatacagaattcttggttgacatgtaattctttcagcattatgaatatgtcatcgtactgtcttctgacctccatggtttctgataaggaatcaactgttaatcttattgaggatcacttgtttgtaatgacttgcttgtcgtgctgctttcaagattcattctttgcctttagcttttggtagtttgattgtgatgcatttaggtgtgtactttattagtctgttctacttggagtttgttgagctttgtagatgtatttcatcagatgtgtcaagttcttttgccactattttttttttaaataatctttttgcccctttccgctccttctgtcactctgattatttgtgtgttgctttgtttggtggtgtcccagaagtctctgagactctgtccagttttttcctccccattcttttttctttcacttcctcagactggatgatctcaatttgacctatcttcgagttcatggattttctcttctccaagtgacatctgtgagatgaatttttttctagagaatttttcatttcagttattctacttcaaaatttctctttggttcagttttatcattgctatctttatattattctcagtttaatgagatactgttttatactttcctttagttctttagacatagtttatgtcactgaatatatttaaaatagctgattttaagtcttttttttttatttttttggagatggagtctcgctctgtcacccaggctggagtgcagtggcacgatctcagctcactgcaagctccacctcctgggttcacgcaatgattttaagtctttgtctatgaagtctagtatctgggcttcctcaggcatagtttctgttttctttctttcttttcctgtgtacttcgtttctttgtataccttgtaattgttgttgttaactggacattttgaatattatagtgtaacaactctggcagtcagactgtctcccctccccagtatttgttgttggtgagtattgtagatgtttgtttagtgacttttcatggctaattctgtaaattttatattctttgaagattgtgggcaccctgaagtctctgtttgttagtttagtggtcacctaataattaacagagatttcattaaatgcctagaagcaaaatatcttccagtctttgcccatggcctctgtgtatgcattagggcaggccttgaactcttacccagggagtttacaaccctgccttagcctttactaccagcttctgcagagcattaaggtcaacaggtggtgagagtttggagcctactccatctttcctgagcatatacacagccctactcatgcatgtggccctctagatttccaggagtatgttggaccctttcaaagcccttacagactccccagcttttcctctcaatctttagactagtgtgttgttttcttcaacagttatctgtcaggcagcagcaaattaagagattagcataaatgttttcaactcctccacccgtcatgtgccccagggaagcactaagccagttctaagttaggcaaaataaagacaatccttttgaggtggtcttccatggagtcaccagacaggtaaaccaaataattaattacaagtctttggctggatacagtggctcacacctgtaatcccggcactttgggaggctgaggcaggtggatcacaaggtcaggagattgagaccatcctggctaacacggtgaaaccctgtctctactaaaaaatacgaaaaaataggtggctgtggtggcgggcgcctgtagtcccagctactcgggaggctgaggcaggagaatggaatgaacccaggaggtggagcttgccgtgagccgagatcacactactgcactccagcctgggtgacagagcaagactccgtctcaacaaaaaaaaaaaaaaacaagtcttcatgaaagaggtccattctgctgtctttcataccaggaatgtggaatgtggactgttattttcatggctactgctaagctaggaatcaagggatagatggggactgggtaaaacaccacagagtttgctgttcttaccaagaataagctggggaagagggttgtttttgtttttcagtaaaaattccctgggctgcttcaagccgttgattaattttcaggttccgaaaaagttcagtttgacagtttttgccctttttatttgcttttatggatatgtagaacttgagttcttttttccaccagttttgctgacattgttttaaaagcactttttgtaaaacccaaatgttgtctctctcaaggctagccaataattaaaaatactgttactcccctttgattttggaaatgaattcgtattgaccaaaattcaatactagaggtctttcaagctgttttaccatttatctaaactttagaatctaatgattcctgtacattgtctagcatactggtggtcctcaattgtcataagttcaactttggaacaaatgaactttttgtgtgcaagtttccaattgtttggaaattacattgatgccccctccatcaaactgttattcgtgggacatctaggaatttcttacagcagctgacaaatatttcaagtcagtgcctggtagtactgtccaccaggcaacagcttcagtagtagagcgatctttatctataaggcagtgtttgagcaattgtttattagtgttttcctaactactcagaagaactatcaggggttatagaggtagctcagagagttgggtgcaagtagagaaatccacccggcttgcattacacatcttatttctagagaagctttcctttgaagaaggagttctaaggtttaaaaaattaccttgaatgccacttatattgcattttaattttattttagagaaatcaatggaaagtagaaaaattaaggcactgatactagtgttaagaatgttggttaaagcttctggcaattaattttttatttccttttttaattttattaaaatttaacaattttcagtttatgctgtaatccagaccaaggtttcaatctaatgaagttaatgccagtgttgctgctacctattttgtctttagtcattcagccatgcttcctacttatactgaataagctagcttaatctaacaatcaaaaaagaaagctgttgcctaagttaagaaaaacagtttgaactgttttcaaactaaatacccagtagactctctagttgttgacaggagaatgcttaattcagaattgtcctgcagtagatcattttatctcattcctgttcttctataggatagcttatttgtttgaaattgtatttaatatgttgtgatttttgtgtgcttgtttctatttttcactggatagactcaagataaaacctggtaccctgcagtgtagctatcagtttatagcagaggaaatttacattagaacttggctgtgtatttacatgtatctaacttggaggtcactctgcttactgttgatatatcagtcatattagatgagtccctaatgagataccagaaaccccggaaacatcattaggtggaacagtgtccttaatgctttattaagtgttataggtaagacaaagcctagtactatttgtggcatcaaggttaggtgtttaaagacctgtattcttctattgtcatgttgaaattgttcccttgatgtagcaatagaaaattttagattaggcttaagttaatcagcaaacaaagataaaagtctgatactatcctaaatattttgtgtttctaaataatttaacagtgatccaattagctactcctgtagaaatgtaattgataaacttttcactctcttttaaattgccatcttgaattttacctgttttttaaagctgtctcaagtcctctctaaaaaaaggcagtcatttataaatttagaaaagcttgatagcacagaaagtcacagaaaaatgtaaacatagtttaaaactgaattgtatacaagccactagaagtacttttattaagtttacaaatattagtagagtggaactcatgcatttaatatgtttgaaacttttgatcaaatactgtgctatgaaaaacattttagataattattctttaatcatgtgtgtgtaaaatgtggctttttttgacaaccaagtagcttttctgtgtgccaaactgtgactttaaaattttaaagtactcaacagagtaaacaaaccacaaataccacttaaactgtacacatttgcacatgcatttcctataaatagtacatgggtttcaagtcttcacttttgaaattcagaaatgggttttttctccttccagtagaaataaaaacttgatttattttatttatttatttattttatttttgagacggagtctcgttctgtggcccaggctatggtgcaggagggtgatctcagctcactgcaacctctgcctcctgggttcaagtgattctcctgcctcagcctgccgagtagctgggattacaggtgcctgccaccatgcccagctaatttttgtatttttagtagagatggggtttctccatgttgggcaggctggtctcgaactcctggcctcaggtgatctgtctgtctcagccttccaaagtgctggggattacaggtgtgagccaccgcatccagctaaaaacttgatttttaaaaatccaaatcgaagacagaattgtgtattttagtacatttattagcagccttgacgctataccatatggctgtttatcatttaaacagcttgtaaaagcaaacacttcaggattcatgagtggcagaaggactgagtactttgggaaataagagagaacttttgttgaggatggttgaggaagagtccaagacaataataggcagaataagcaaaaatctagagactcattgtaggcactcaagtatgtatttgttagaatgaatggctgaacttggtatattgaggaacactgagaaagccatactgactggaagatagttcctacaagaaactggtgagacatatgttacagtctagattttggtgagccttgttaaagtttgggctttatttttatacggggagaaagtttcacaggggtttggaaatgaggcttggagctgttaatggggacacagtgaggttttagggtagtggctttcaaactgtttaaatccaaactttgatgataaccctgacataactattgtttataacttccatttcagttgtattggttttatcaaaacatcttcattgatcttactgattgcttcctatgcagattaatattataaatttgaatgtacaaaggaagctttagcagtaaaatagcaacttttatctgtcttacgtattggaggttctgcataagatttaattttttttttttttgaaatggagttttgctcttgttcacggggctggagtgcaatggtgtgatctcggctcaccacaacctctgcctcccgggtttaagtgattctcctggctcagcctcccaagtagctgggattacaggcatgtgccaccatgcccggctaattttgaattttagtagagacggggtttctccatgttggtcaggctggtctcgaactcctgacctcaggtgatccgcctgcctcagcctcccaaagtgctgggattacaggcgtgagccaccgcgcccggccaagatttaattttttaaaagaaaatattttgctaagggtttggaaactcttgttttagcaagaatggattaagactgattaaaactaaaggcaaagaggaggctcttatgtttggaattctttgctaatatttacacaatataattctctccacaaatatttaatggtaccagatattagatggttataatggcaaaagtgttcaaaggatgctatcatattcatgattcatgatcaaaatgaacattataaggctatccctcttcagaattaaatacgttactcctgtggaaaacttgcttttaatgtagaagttgtcccagagcctttcttcctttctcatgtcctcttatgtccactgctgagctaacatgggtctcactgaatgattaagaaaaaacatcttaggtggggagttctgtatatagtaaatgtttaatttattggggtggtgaacgggaagtgctgctggcaagagaggatgggaagagaaatctacccaaatccttacccgctttacagaacataaacttcctattcagtagtacacaataacttaacgatcaaggcatcttaacttttctgttttcagatgaaagaactatcgtttggcttgatcaagtatttagtatttattcgttcactcaagtgcttacgtttttttgttatctcagggttttacgttagttattaaccaaaagaactagttttagttctggaagtctaaaatatataagagaaggtgaggagtaataagagaagatgaagggagactttcggaatggcctatgaacttctagtaactataccaccttaaaatagacaaattacaatgcagttatgaagatatgtatttttcagtgaagacaactaaaatgtttgcacagaattttcttttttattgagtgttagaaattctattttggagatactaccttgcacaacataaaaagaaaaagtgagtgtggaatctaggaatctacgtggctctaggaaattttttaagtgtggaaactgaaggagagcaagagaaagggagcatggcattcccctgtttgtagttcatgaggtgggtttaaattgccttttgccaatgcagctgcacactgaggattacagaattctttttaaatgtttgtagaattatttttcacttattaggtaaaacgtgtattttttgattttctccaatttcagctttctcatgttgctatgctcaattttgtataccatatatagttttgttaaattgacaaagtggtgttttttgttcttctttttcccattggttaaaatttaaagagaaagtggaagctagaaatttatctaaaaaatgtaactttccctgtaattattaaagtatcaatctaaatttgaattttctttgtgcataatcttttttcaagctatttaccatgttgacaaacttgctttcctgtggcaaatacactagcaatacgttataaatatgtaactttcaacctatttacagttgatgcttttttagccctttggatttaaaatacaagcactgaagaggtgaggaagtaccactgctgcctcagcattatttcgaaattctgtttataaactatacaatttccaaggtcatgaatccagcacctttccaggtactaactattgggacaaagatagaatttgattttatttatttacctattgactgaagtctaacttaaatcttgcacctagtaagatcttagaaataacgtgtgtactctgacctgtaaactaatcctagtattctgtgtgtatattctttctcatttgggctcttaaaaggaaaagtaacgtacatctgatgatcattagcactgagctttttcagcaaaaagtatatgtttataaagaagtataggataatttagtaatttaataatgtgacaacatttgcgtgtgttttttttttttgagaaatacaaattgtgagaaacagaaaagtaaaagaagcagcagcagaaatatcactataggatcaaaagattgcaggaaccaaaactccaaaattattgggcataatgtactaaaaacagggcagtggaggaaagggacagtccagactagctctgagggtccaaagaaagtattaaatattgttactggagtgatttgctctgctatttgggcttgggaattaagtgaaattgttgatatactagacagatacttcccacccatttttctcttgataatcagggttcattttttctattttctatttctctggatgctccatttcttaatattaatattaatattaagctctcagtctttatgctaaaaattggttatttaaaacaatttaaatcaacttcagtctaattggcttaagttcaaatccattttaagatcgatattgtgtcctttaaaaattttatttaaaagatatttaaactgatgagaggatactacccattccactgataaactattactgtaagtttgtctattgagggctagttatttggtttaaaaatgctgagattatggaaagtggattggaatattttggagcaatattaaaaacagtatctgtaacaatttaataaacttataaattcctctttctctgttgatctatcttgaaaagacactctatgtctctaggcattccttctctgtggtgtgattggtagacagggagtaaacaacttactgtaaatgggcaccatgccagttggcttcaggcagcatcaagcttgtgactcacagtcagggttaggaaaatgccttttaacttgtttgtctctgcctcttttaaacattaaaggcacaactgtactaattattaagtatttcataaggtcttttagggcttataagatcttttaggaatggcctggaagttattagtactgtttcattgaatctgaatacctttaacatgataatgagaagtttttaaagggtggttttatagttaaacggaatttctcaaattggcttgctccttatgttgatttatttaggatcacatttgggagtttctctgccctactttcaatgtatttaatttactgaccatcactatttggggggaaaatgttatatgatatttagaaaccaagagttttggagtttttcccccattagatgtatttatttatttatttattattttttaaagacagggtcttgctctgtcacccaggctggagcacagtggcatgatcctagctcactgtattcttgaactcctgggctcagactgtcctcccacctcagcccaagtggctaagtatcaagtaagaatcacctggcaaattccaaggctgtataccagatttcctaaattagaattttggggttgggtatctgaattttagtaaagccctccaaatgtttctggtattgcttctaagaacaattgataacataatagctgtggccattataggggtattctgtcatatttagatataggcataccttgttttattgtacttcccaaatattgcgtgtttattttgttttgtttcacttacaaattgaaggtttgtggcaaccctatattaagcgagtctgtcagtgccatttttccaacagcttgtgctcattttgtgtctctgtgtcacattttggtaattctctcaatatatcaaactttttcatcatttttgtatctgttacgaccagtgatcagtgatctttgattttttctttttttttttttttttgagacggacttttgctctgtcacccaggctggagtgcagtggttcaatcttggctcacagcaacctctgcctcccaggttcaagcaatcctcctgcctcagcctccccagtagccgggcctacaggcgtgtgccaccacgcctggctaatttttgtatttttagtagagatggggattccccatgttggccaggctggtctcgaactcctgacctcaggtgatccgctcaccttggcctcccaaagtgctgggattaccgtgccagcctgatgttactattttaattgttttcaggcaccataaacctcacctgtataaggcaccgtacttaattggtaaatattgcgcatgatctgactgctcttccaactggccattccctgtctgtctccctcttcctgggactctcaaatccctgagagacaataatattaaaattaagctaattaataaccctacagtggcctctaagtgttgaagtgaaagagttgcatgtctctcactttaaataaaaagctagaagtggctaaacttagtgaggaaggcacatcaaaagccaagacaggccaaaagcaaggactcttgtactaaacagctaaattgtgaatgcaaaggaaaagctcttgaaggaaataactagtgctactccagcaaacatgtgaatgatcagaaagtgaaacagccttcttgctgatacgaagaaagttttagtggtctggacagaagatcaaaccattcacaacattcctttaagccaaagcttaactctcttcaattctatgaaggctgtgagaggtgagaaagctgcagaagaaaaattggaagctagcagaggtcggttgatgaggtttagggaaagaagccagcgctgtaacataaaagtgtaaggtgaagcagcaagtgctgatacagaaactgcagcaagttatgtagaagatctagctaagattactaaataatagattttccatgtagatgaaaaagccttttgttggaagaagatgccatctaggactttcatagctagaaaggagtcaatgtctggcttcagaggacaggctgacattcttgttaggggctaatgtagttggtgactttaagttgaagccaggtctcatttaccactccaaaaatccgaagacccttaagacttatgcttaatctactctgcttgtactctagaaatgaaacaacaaagcctggatgacagcacatctgtttatagtatgcttcactgaatattttaaggccactgtaaagacctgttcaactgctcagaaaaaaatgattactttcaaaatattgctgttcattgacagtgcacctgggctcacccaagagctctaatggaattgtacaacaagatggatgttgttctcatgcctgccaacacatcatccatttgtagcccatgaatcagggagtgatttcaagtttcaaatcagtacattttgtaaggctatagctgctatagacagtgattgctctggtggacctgggcaaagtaaatcaaaaaccttctgaaaaggattggccattctagatgctattaagaatttgtgattcgcaggaggaggtcaaaggatcaacattagtagcagtttgaaagaagttgattccaacagttatagatgaatttgaggggttcaacacttcagtttaggaagtcactgcagatgtggtagaaacagcaagagaactagaattagaagtggagcccgaaaatgtgacggaattgctgcaatctcatgagaaaacgtgaatggatgaggagttgcttcttatggacaaatgagcaaataaatttttttcttgagatggaatctactcctggtgaagattctgtgaaccttgttgaaataacaacaaaggatttagagtattacataaacttaattggtaaagcagcagcatggtttgagtggattcattccagttttgaaagagtttctactgtgggtaaaatgctatcaaacagcatctcgtgctacaaagaaatcttttatgaaaagaaaagtgaaacttcattgttgtctactttaagaaattgccacagccaccccaccttcagcaaccacctctctgatcagtcagcaggcatcaacactgaagcaagaccctccacaaggaaaaagattacaactcactgaaagttcaaatgattgttagcatttttaagcaatattttaagattaaggtaaatacatttttaaagacacaatgctattgcacacttaatagactacagtatagtataaatataacttttatatgtagtgggaaaccaaaaaattcgtctgacttgctttgttgcaatattcactttattgtggtctagaaccgaacctgaaatatctcagaggtatgcctgtattaatattattttgcaagtaaaaaacccagcatataaaaaaaacgtagaatatgttgagagttcagtaatatggatgaaaatgtttttctctaactgaagaacatgataaattataattagggaaggatataaaccaagaaaatatgtctgagatagccaattcttgcagttcataatatgaaaactcattataccaatctcagtaagaatacttttaatagctgttatttctttgggatatagaatttataaagtacacagtaatcttcttatgatcaatcctaggatcactttacaaccacttaccccatattacaatgtagtaccaagacaagcagaccaaattatagaaggacaaagtttttgctaagcatattttgtcatcagcataccgcattgtgtgtgcatgcatgtgtgtgtttgtgcatgtgtgtgattgtataaaatattagaaagccaccccagaaaagttaaatgactaggaatgttgtgaagggattaagctacccctaaaattatataacaaaactctcttcatctattattaggtcatctttagaacatcttctcttaaatttgttataggtctctctcatctgtttggattaaaattggtctgaaagcctaaaatggctttttacctatataattatttcccaactagcttgtagtataggtgcaaagctatcacacttgctaggttagtgaagtatgtaaaaactaccatctttcaattaggaaccatcggatagcttctacaggattgctggggagaacctttataaagaaagttatatctttataaattttttgtcattttacttagctgagaatataaaataagttagctaataatagagtagaaatgttttctgtaacagattaatattgatcaaatgtgttattaaatgctaaaacaccattttttttctctgtaagccatgtgtttcatgccacaacacaaaagggacaattgtctgtgttttatgacagttctgttctgtcagatgctgtttgttcattttggtgaataaatgaagagagccctggacacatctttttttcctcaacaaaagaggaaaattattcttgtctgtatgtctataatcctgactctttgaatggctttaatttttttaaagtcagcatttttttataaagataggtgtttggaatgtgggcgatatggctggacagttagattgggaccaaataatggaaggctttgaacatcatgctaagaggtttgggttttactctgaaggcagtagagaaccattatgtttttaagccaggattgacttgttctaagctgtaccttagaaatattactctggcagttgtacataggatgagctgtatgttgctttgttttgtttggggagacagttctcgaagagagactacatacgaaggcagttatatgagtcattactaaaggtctggcaagaagtagtaaaagcattaactggagtggtagcagtagggaaggaaataaaaggatagatgtgggagtcatttggaaagtatgaggcaattcattgaccttacagaatcactggttttctgcttccactccattcacattgacctttccaaggttatcagtgacctgcttgtccttaaattcagtgggcactttccagtaacctactgttggcaccagccctgtgctagacaacaggatcctgtttgtaaaggcatctgccagtggtttctgtgacacaattctgtttctagttttcctccttctacttctctagcctcttggcaagttcttctttcagagtttctcagagctttgtgctaggccctcttctcattttctccttctctaagtgatcccatccttttctgttgcttcagttaccatttgtccttatgcaaaggacagccatatgctactgtatctccagctcagatgtatctctttgcctcctgacccatatttccaactatctaactgggtatcttttcttggatgagttataggtctctcaaacacaacatgtccagaataattcattgacttattctaaggcctgcttcctctttctcctgtagtccctatctcaggaaatatatggtgctatcaaccccaaagcagaaatctggacataatccctaactacccttttcccctctctgtgcacataatttcagtcattaggcctcatagattggactaaataaatacctcgcaaacccttctacttatattcttaactgctcctaccttaagccaggctaccataattttgtagctggatgactgcatcatcatcttgactggctcccttgtcatcttcaatctatattctatactgcagctagagctttcaaacataaacatgtgatcagattagtcccctctttagaacaccctagggttctcactgtcctgagtacagtctaagggtttaccatggcttacagggtcttttatgatttggtgagctttttattgtataacctttctaaactgcctttacttccctctttcttggctctgtgtctttgcataatgctgttccctatacttcacctcacgtctaaccttcatctccttttcacttctcctcttcctccaaaatccagctgaatatcacattgtcatgcaggcccattcttgatctcccacgtttgggttagatatccctcttcagtaccatcaccgcaccaggtgtgtcccctatcctagcatttgcctcattgtattacaactactgtgtactcgtctctacagctcctgctagtctaaaagttttgggagagcaaaggttcatgtttgtgtttttcactgtggtataccccagtgcctagtatatgataagctctcaaaatatttgttagatgtatgaagaaatgagaaagagaacaggaagagggtaagtttcaagactaggaaacaaggctatgaaagctgcaggaaagcagcaggttaaaacctagaagaagagtttgttttaggaaatactgtgttttaaaccactataactgaagcaaaaacccaaggcctgggtgtggatagagtccactatctgataacagtggatactgatgcatggcagagttggagaggaagagagccagattccaaaacagaaggggtaaagtcttctaagaagatagattatagtaagaaggattaggggatagaaatatgagcctgttccactcatagatctcaaacatgaaatgatgagtcatcatgaagagagtaggcaattgtccagtgaagaaggggatgctaacccttcttaaccttgaatctctcaggtagaagcagttagagaaggaacagccatcatcagatagtgttgtaaggaaaatgatatccttggggaaacctgcattttggtaaagcaaagcaactaagaaagaatatactaccactgtttaacaatcgccacaaaaagacagtaggatcatctttgacccccctcatcctttctcaggaacttggaggactaagaagagagaaatctgtagaagaggcttctctctctgatcctccctccacttcagttttaccacatgtaatgcaacaataattaagaatttgtgtaaaatttcaccaggttggcatgcatggagagaaaaattattcagatgttttcctttgtcaataatacaaggagcatttgtagggaaaaatatttacaaatacagtaagacctattctctttctatatttatgggaaaattttaagttgtgcccttgtttcatgtgtgtttctatttaaagataccatacttaatatatattgttgattcattaacattgaactcatggctaacagcactataaatcatgtctgatcaaaacttatgatacatgtactttcttcgtaaggtacatcatagtcttctcgtacatgggaactctaggtagtacttcaggactatgcatagaggccattttaaacagcaaaattcccaacaaaaagcacaaaactcaaaaaatgtgccactaaatttaccatgaaaaggacacttgtttacagtttgagagctaaaacaagaaggtggcgtgtcacttcgtttgacttcagctgggaacatgcatatcagtcgactcaaattttttgctattctgtgcttatccacgaatcgataggaaagcaagtgtggatttgggggttacaaataaaatgtagcaaatgtgtaaacttgcagatgtggaatctacaagtagttagaatcaactatgttagtctgatcattaaatcagttttttaaagtactattgtaacaccttataacctgccccattcactgagtgttgtagtttatagtttcattgggcattttcagtagttttatctgaagtcacatttcaaattttgtaattgaagctccaaagtatgctaccggaaacacgagctgatgctgtgagacaaaatcaacaggtaatccaccatcacaactgtgggctagaatgctcaagaaaccttggaggcccagagagctgagatgaatactgaagaatcataggcaggtttactctgtcaagctgcctgtattttgagggtgtagtcctcaaaccaaaaagacaccaaatgaacaaactcagatggcctcactggggaacagagattgaaagctgacactggaatgtgtacttaaaaaaatgagagcccgttttggaaaggcagactgggcacagaatgtggagagctatatttgctaactgaagaaatttagactttatcctctacaaaacaaagctattggtttttgaaggttgcataaaagctgcattttagcagcatatattttggtagagctgttacctgcctgaaaacatcaatgtcatttcacacaaatgatacttatcccttggtgtttgatctaaatttctacaatgagaatgtgattttatagtctttactggggaaggaagtaggtttttcaggccgaaattcttgtgtagcaaaaattaacacttaagttagcccttggcaatctccagttctataatggtaaaatggatttcccagaaagtcactctctatccctttgaatagacattagaaataacatgtactttaagtgggatttacagaggaagggggcctttaattctttactagtgtgatgccctgtaaaaaaataactaacattagagttgaggcctagaaatagcagcactgggttaaagtctgttttcaagtgcaagtttttctttttattcgtgtgtgtgtgtgtctgtgtgtgtttcacatagaaggaggaaatgccaatttcagttcttacaaatattaatgactgcaacttataaaaatgttacagactatattcttcccttttgtaacagatgagaagattttgaaatttagtctctactttttagtttggtaagacaatttgaataaactgcaataattgcaaaagaattctgaatatttgaacatttgacattttctatgtcaaatatacatttcttgtactatataaacattctagaaaagagagacaggcagggaggaaagtgctcattaaaaagagcttcaccctctctgaaaagggatttcctttacagtgctgtgtactaaagcctgtgttgtaaatcagaaagcactgagcacacatgttgctgctttggtagcatcagaagtcgattttcattagccttataccattcactatttctgccaagcaatcttaaattataaaagaatcttatttgattttgtgattctcttgttttctgctcataaagaaaatatcctaaattgaacaatggcatgctacgtttttagtttttaagacagctaatgtgtaaaaagacatttaaagtatagttgtgttaagtttttgaagtttacagttgtttcaattttgctgctatactttgttaacatattttaggaatatttcattttagtcacaactaggatataaacattattttggtggcgatctccttgtaatcacgacgtcaaccaaatttgggaaattttgatttgttagatttataaattttacagtaacacaaaagtctaatttcctatatattttcaaggcccctatacctttgtcaaaataaagtatcaatgaaaaatgaaaaaatcataaactatgttcaggccaaactgatactgactttgttaaaaggctagatagaaatctgttttcctcttctgttacatctcctcttctggagaccactctgtgtggactgaaggtttgagatcctaggacctaggctagaacagattaggagattgtgctgtatgttaagtggcagataccatggaattctaagcctgttacgaaggaggagaagaagaggcacaatgaccctgacacagcccctgggttgaccacagcagatatctcacttgagcaagtagatatcatctcaattgcttgctgattatctctaacttgtcagtaacttactttgataacctagatttaggagtctgacagcatgcagtgtatgcctcataataatctgctgtttatgaaagtcataacattgtatgtttagcataatggtgaagagcctgccatctggaatggtctacttatttgggatccacatacagtaagctctcacttaacatcatcagtaggttcttggaaactgtgaccttaagcaaaacaacctctaatgaaaccaattttaccacaggctaattgatataaacaagagttaagttcctgtggcatatttctggtcacaaaaacatcactaaacttctaaataaagacccaaaacacttataatattaaccactgaaataaatgtgagctatatatatacatttaagaataataaaaacaaaaaataattatttacccaatttttggtgaaccagtgagtgatagtgatcatagtgatggtggatgaaatcaaggaataaatatttgcaaagtgaaaattgtaagaagcaccccctgtcaccacatagctcagaaataataattagggcaggcttgctgagcatttttaaactgcactgtttattgtcatgcatttgaatgattatcgcagactttatgaattttcattttatattaatttgtaggccaggcacagtggctcacgtctgtaatcccggcactttgggaggccaaggcaggcgggtcactggaggtcaggagttcaacaccagcctgaccaacatggggaatccccatctctactaaaaatacaaaaattagccaggtgtggtggtacacacctgtaatcccagctatttgggaggctgaggcaggagaattgcttgaacctgggaggtggaggttgcagtaagccgagattgtgcccctgcactccggcctggtgacagagctagactctgtctcaaaaaacaataataataatttgtattcattcattttccaatgtgttcattccagttcagggtccagggggcctgcagcttatactcatagctcagagcaactgaccctatagacaggacgccaccccattgtagggtgcactcaaatgcacactcacactcaaactgggacccttcagacatgccagttaccgtatcacacacagcttcgggatgtgggaggaaagcgaagtatctggagaaaaactacacagacatgggaagaacgagccaactctacacagacagtggccctggacagagctgggcaggcatcagttttttttcttttttttgtggggggtgagggtggggcatggagtctcactctgtcacccaggctggattgcagtgcagtggtgtgatctcagctcactacaacctccacctcccgggttcaagagtttctcctgcctcagcctcccaagtagctgggattacaggcgcccgccaccacacctggctaatttttgtatttttagtagagacaaggtttcaccatgttggccaagctggtctggaactcctgacctcaggtgatccacccgccttggcctcccaaagtgatgggattacaggcgtgagctaccgcgcccagtcagcatcattttttttttctcatcaacgttaaaacaatgttgaacaaaacattattcaaagacctgccgtatggctattttctagttgtgtgactttctttgggaaagttagcaaccctttctgagcttaaatgtcctcattcataaaatggggctagtaataatgcataaggtttttgtaagaattagaattaataaagtacttagaccataataactaattagtattagttgttgtctttgctattattttgatgtggtggttgtttggtttcacctgtgtactatcaggacatgctgaaataaaatttaagaattggctttataatattagaaaagcaaacttttgtacgatatgggtatgaaaaattgttgggagtctactttttctctcttacctaatttgtcttagtctttttaaagcttagattttccaaatgagccatagcaaaatataatgtttaaaaatgtttaaattctaagcactatgtcatagttaaataacttaaaggtgctacatcttatacagtccaaaaggaacataattagtaaaattctacaatttagaaaaaaaaatagctgacagtgactgatttataaaagtaaaatatcttttgttaatactaatattctttttataaattaattgatgacaaaaaattgagtgaatgagatttgcagttcatttatctatgatgctggtttatttaatctctataatttgctgtatttgaaagagcatagtgatagaggtcatgataaaatctaggcccagtgccacaactaaatccctgtaggaactctcaaggttttgatttcatctctgaatgggaataacaccttccaagaatattatgaagattaaaaagttacgtatcataaatacacacagagtaacaatactgggaatattgcaacttgtaagaaagaggaagcatatggcatattctgatggttagggatatggactctgtagctgggatgcctgaaagagaactctgactccactaatggctagttatatgaaattgtgcagataatttaacttctctgagtttgcatttttctttgtctatataatggggataataatagtacctacctcacacatagtgttaatttctattagtggttctcattaagatagtattgttgttcatccctggttgttagccatcatgtatctgagttagagagtcattgattttagaaagtcccgaggagactatcaggtcaagcaacctgcctcctgctagacaattagctttatccatgagttaccaaagagggagccgaaacccagggaagctgaaagagctgttgattgtcaccctgtgagttggtgatagaaagatatctggaatcccagtagttgcccatttcctagttctgggctctgcattgcactagaatactgtgccattctaaatatgaaaaggcagtatgaccattgtgcttgtcactttccattccctagatgctatcttatatttgtccttatgaaatttaacctgtgactttcagatcacttagaaccttggttggacagtgttttctagtgttatttagtatatttttttgtcatcttctgttgtctttgggttcccctaaaagagctatactctgggtgccaggaaacttcacacatgactgtcttctcttcctcgacttccctctctacttacctttccagctcgtagcaaatcagaagacttctctgacacctctctatgtctaaaggtcctttgatattctcacatggcggcatgaatcacagtgtattttaactggccttttccttgtatgtctcctacaatgagctgttgaagcttcatgaaaacacaatctgttttactcagggcagttataattccaattacaaagcacatttcctggctcctggctaggaactcgatcatttttcgatgcttccttgctcaggactttctgattccttcttaaaacattttggggcatctccttctcctggtttttggaaacatattctcatactgctatgaaggtttttactgacatttccaacttctcttaaattgattcagcaaatgtttttccataataaatgtcattgatatgtcatcaatatggagagcaacaacagaatgcattgagtaaactcctcccctggaggtctgagaatctagattccagttctcacagagccaccaccttggtgaccttggacagtagaccttctaagcctcagtttccttatcccttaagtggggatattaatagaacccattctcagagatgttgccaagattaaaataaccaagataattcctgtagatgatttggcatagtgcctgccacgtactaagcaagagttagcctccgtcattatagtatgatcataaaaaatgaacagactaaacgaagtaaccagaaggaaagaaattttaattcttaaaatgtaatagtttcttggtttttttttttctgtgaaacacctgcatggcacctttttgttattcatactgttttgactgtggctgtcgtagattcttgttgaaagtctgagagactgagacttgtcattttgaacatggcatcagtggaacagcttatgattcaataattgcatcatcctggacaagcaccagtagaagtgagtcaggacatgtgataaaaagacattcattttgcccctcctccctctctgtattttctttgctataaaattattgatgttaagcccatagtactaatatttcagttcaattcataataaaatttgagggcatttgaatatattatctgttgtaaattataattttatatttgaccacagagtatttgaagtgggtcttttctttccccaaaattctattttaataactaaaaaatattcttaggagaagtattatttaagaacaggtttatattaaataacatcatttcactttcaactttctggtggtcaaaaaatatgctaatactaattaggatatgatacacatgttctgttagaacagttttggcagttagaagacttctcttcttgtgtttgaaagggatgttacttggggtagttatgagccatgtatccagatgtcctgaaaggaccagtggtagatgtatttctatttttgtcttttcttttttctttctggcattctagttgctgagtgactgacttttgttttcagctcttctcacaatcaccattgttctaataactttgcttaaatagaatgtctccttttgctataagccatggggccatttaccgttaattttttaaagtactgaaatgagaacctcataaattaaagaacactcctgattctgagttagcagatcctactaagccttttgcagatggaaatttcctttaaattggtttgttttcctttaacattccattatcctattgttcattctttggagctgtgatttgtttaatatatttcaggcttcttaataaatcaagtcatgtaagttattatttggatcatttcgaaactacaacagcttatcaaacctctgaaagaagaattttgtgtttgcccacagactgaagaactgattcagttttattggctgagctaccttcattattcatatttaattcctggtactgagggtgggaggagggagaggagcagaaaagatacaactattgggtactgggcctaatatctgggtgatgaaataatatgtacaacaagcccccgtgacatgtgtttacctatttaacgaaccctcacatgtatccccaagcctaaaagtttaaaaatatatatttggtaaatcaattgatgtgttttaaaaaatatcgccttttggccgggtgtggtggcccatgtctgtaaccccagcactttgggaggccaagccgggcggatcacgaggtcaggagttcaagaccagcctggccaacatggtgaaaccctgtctctactaaaaatacaaaaaatagctgggcgtggtggcgcgcacctgtaatcccagctactcgggaggctgaggcaggggaatctcttcaacccaggaggcggaggttgcagtgagccaagattgtgccattggactccagcctgggcgacagagcgagactctgtctcaaaaaaaaaaaaaaaaaaaaaaatcatctttaaagagataactaacccttccccagaaggcagggccaaagtctaaggttcttccaggtcctttgtattccctataaattttagagtcagcctgtcaatttctatacacacacaaaaaaagcctgctgggattatgattggtattgcattgaaattaaatcaatttgggtataagagacttcaatttggggattgagtctatattgagtcttccaatccaggaacactgtatatctctccatttagtcagatatttagtttatttcaacaatattttcagatctttagttcctttcagcaatattttctcatttttcctgtaaagctcttgcacatcttttgtcccatatctattgtgtatatgtgttttgctagttattaaattatattaatataaattttattttccaattgtttgtcgcatatatagaatgttttaaaaatattgtgtcctgtgaccatgctaaattaactaattctagtcattatgtcttcattatctttctcttgaattttcattgtcttccccttctgggactccattcatatgtaaggccatttgatactgtctctcaggtccatgaagttctgttaatttttcttcattcttctttttctctgtgttcttcaactgaatgaatgccattaataatttggtatgtaatggctcacttaaacttccttttgtttttaagatatttctactctcagctgtgtctggaatcctttagtccggagccccaccaaccctcagcctagaaggaaggaggagaaggatagggtgaaaggaaggggagagcttctagcttcaggacagagatcagaacaaacaacagagcagtcatcttggataaggaaacttccctcaaacctattacttatatcctcagaaataagaaaaataatgcatttatcaaattaaaggattttgaaaaagggaacattcagagaataaaactaaactcttgaaagttaaaaggatgataacataaatgaaaagctcagttgaaggattgaaagataaaagtaagaaaatatcccagaaataagagcaaaaagacagcaatgtaaaataggggagaagataagagaattagagaaccagcttaggagttctagaaagagaaaatgtagacaacaaaaggtaagaaatcatcaaagactggagtaggggaggtcatgctatctgtttctttttctattttttattttgagttacatttttttttactgtgaaacaagcatatgtacatgagaatgaacaaaacaaatatgcagtcatgtattgcttaacaacagagataggttctgagaaatgcatcattaggcgatgtcatcattgtgcagacatcatagagtgaacttacacaaatctgaatggtatgtcctacagtacacctggaccatatggtatagctgttgcttccaggccacaaacttacagcatgttactgtactgaacactgcaggcacctctaatacatcggtaagtatttatgtatctaaacatagaaaaggtacaataaaaatacaatataaaagaggaaaaaaatagtacacctgtataggtgcttactgtgaatagggcttccaggattggaagttgctgtgagtcattgagtagtgagtgaatgtgaaggcctaggacatttattatatgaagtctactgtagtgtaaactctgtagacttaggctacactaaatttatagaaaaattttcttcaataataaattaaccttagcctactgtaacttttttactttgtaaacttttaatttttttaacattttgactcctttttagtaacacttagcttaaaacacacacattgtacagctgtaaagaaaattttatgtccttcttctgtaagcttttttccatttttaagatgtttttatttttaaaactgttactaaaaactaatacacaaacacacacattaacctaggcctatacaaagtcagtgtcatcagtgttcaaccttcacatgttatcccactggaaggccttcaggggcaataacaaacacagagctgtcgttttctgtgataacagtgcctttttctgatatacctactgaaagacctggctgagagtgtttgacagttaacaaaaaaaaaaaaggacaagaagtacactctaaaataatgaaaaaagtataatacagtaaatacataaaccaccaacatagtcatttattatcattatcgagtattatgtactgtacacagttgtatttgctgtacttttctataactggtagcacggtaggtttgtttataccagcatcaccacaaacataagcatggtgttgtattacaatgcacagctgcagctaagtgataggactttttcagctccattataattttatgggaccatcactataaatgctgtccatcattgactgaaatttatgtcgtgcatgaccatacatacaatttaatgaaaaataataataataaagctagcagtgtgtaattaccaaccagggcaagaaatagaatattgccaataccttggaggcctccagtatgaccatataagtttacaaatcctattttgttcctcctccccagaggtaaccactgccctgacaaatgtgatcgttgttttcttgtttttcttactacctatataaacatccttaaacaatataactcagtttgtatattttgaattccatgttaatagaatatcatatgtatatgaattttatgtgaatagaatattatatatgtcattttgcatcttgcttttttcattcaacattgtaggattcattcatgttgtagtgtacagctgtcgtttattcattgctgtatagaattatatcctcagagataagatatatggatgtttataaatcattccactattatgaacatttgactagtttgtagtttttatttaaccaaaaaaatgctgctgccaacattcttacacattttactgtatatgcacattaatttatttacaagtataaatttctttttgaatacatatctattgatggagttgctacatcataggacattcttgtctttgactttactggataataccaaactgtcttccaaaatgattacatccttaaactcaggacacatcttattgtcaaatgtttaatttttgtcagtctgatgggtatgtaagttattttattgtcgttttaatttgcatttccctgattactaattaagctgagtaacttttcatatgtttattggccatttggagttcctgtattgtaaagtataagtttttttgtccatttttctagttttctgtccttttagttgaaatccaaatttgcctaaatctgttattctctgagcacaagtaacttgggatgctttcctttagatttagcctaattctttatcattttgtcagcttgatggtgcttttaaggagatatatatgtgtgtgtgcgcacacatgtgcgtgtgtgtatatatatatatgtatatgtatgtatgtattttttgagacagggtctcactctgtcacccaggctggagtgcagcggcacagtcttggctcactgcagcctccacctcctgggttcaagcttttccctgtctcagcaacccgagtagctaggattacaggtatgccaccatacccgctaatttttgtatttaatagaaacagggtttcgccatgttgacaggctggacttgaactcctcacttgaactcctcacgtcaagtgatctgcctgctttagcctcccaaagtgctgggattacaggcatgagctaccgcgcctggcctggatattttttaaaaatattttttatctagcactttggtttttggcaggcaggttggcactcatagtctgacctaccatttctataaaaagaaacctgtaaatgttcttaaacagactttgaaccagtcttcctgattttgaacccctacctttacccccagtttttgagcctttcagaattttttttcataataattaggttgcttcttagctttccccactggtgacttaacagatcttaggaagccaacaatccttgtccatctgctttctgtcttgtgaactgttgctggtattgtctcttctctttattcttagaggtgtatgcttttaaaaacatatactgggtttgagagggagctgaaataaaagcatgtgttaaatataccatctttaaccagaactacatttgactggtcattttattttcaagctcacatacacttcaaacagagatatggctaaaggaattatcatgtgaacaacagccagggctctgaacatcacagattatatcatcatacttgaaatatttgaaattttgattcaaaatgagagctttatagctatgtcctcaatggactaagtgtttaagtacttaacatccaaaacattcttactaatcaagagaagacaaacaccccaacagagaaataggcaaattttatcaatagccagttcaccagatttgttttctgttagaagcgaatatggggaaatacatgtgtccatgttttgcctacttttcctggagcaggtaaggagaggcagtttaaggatccatgtgataaaccctaaagttgtccatcggctttccagtcccttctaggaatttaacttagggaaataatcagacatttgcaaaggtgtgtacagtggtatttataatagtgaaaaaccaaagaatgaccaataacgggagaatggaagttacagccaaatactttacaactactaaagaatcatgtaaaatatctattgacataggagttttatcaaaatgtgaagtatacagatgaatagtaccacacataaaaagcaaggtgcaaattagccatttatattgttatccccaaaataaatagatgcagtttttttaaaagatgcaggctatatatggaagtgtttgctggttttctgtcaaaagaatggcgactttattttctaatttaaactttttgctgttttctaaattgtctaaatagttatagtttttataatgtaaaagtatcttccaatttagcttcatttgacaaattaccttttcattctatctagctatgtaattctaaatgaatttacagcagtaatcttagagcagatgaatttacaacaataatcttagagtagactacggattagatgtaaaaacatgagttgggctttatggttacagagagttttcctcagtgtggggatcatagctgtattgagtttattcagttttcctttcccacatgaatgaaaaatggggccagcctacaactggaagggcctcggcatgtaccactgtactgtgtatgatgtgatttcttgatgctagtagggagagaatcaaattgcctcctattcaaaccaagacccacaaatagcgtcaaccagtcatttcagctactccctgcagtgtcaagaaggtgtgaacccctcatgttctctattgcatacccttgtctaattcagtgtttcttcttcttttcaggttttggctttatgctacatttcagaaatcataataaccttttctggtattattttattctttttcgcactgtgagaaaaattaaactttcaagtggatgcttcttataaactatttatacccttttgctcccttttgggaggcagggacagggacagagttcctcctcaggctaactaagaaaacttactgcttccaatgtaatttaaaagatctccctctttctattgctctctgtactcttaattcttttttttttttttcacagcagagacaagtgaacatttatttttatgcctttcttcctatgtgtatttcaagtctttatcaaaacaaggccccaggactctccagattcaattatgtccttgggcttggtcgactgctgtaggagtctcagggagccttctacaaatgctagagtgactcatttaccaacattaaaccctaggatacatgcaacaaagcaggactccttcctccatggaatgtgccgatttcagatgacacagcacccaatgtagaaaacgctggaatttttccttggaactagactgtgatgagaggtgcttgacatgaacataagctactgtcttttctttttttttgagacagagtttcgcttgttgcccaggctggagtgcaatggcgtgatctcagctcactgcaacttccacctcccaggttcaagcgattctcctgcctcagcctcctgagtagctgggattacaggcacgtgccaccatgcccggctaatttttgtatttttagtagagatggcatttctccatgttggtcaggctggtctcgaactcccaacctcaggtgatctgcctgcctcagcctcccaaagtgttgggattacaggcatgagccaccacgaccggccagctactgtcttttctttgacccttcctttccagtttttgaagataaagcaggaaataatcttctctgaagatacttgataaaaattcccaaaacaacaaaacgcatgcttccacttcactgataaaaaatttaccgcagtttgtcacctaagagtatgacaacagcaataaaaagtaatttcaaaaagttaagatttcttcagcaaaatagatgattcacatcttcaagtcctttttgaaatcagttattaatattattctttccccatttccatctgaatgactgcagcaatagttttttgtttgtttgtttgtttgtttgtttgttttttgagatggagtctcgctctgtcgcccagctggagtgcactggcgcaatcttggctcactgcagtctctgcctcctgggttcaagcgattttcctgccttagcctctcgagtagctgggactacaggcacgtgccaccacacccagctcatttttgtatttttagtagagacagggtttcaccatgttggccaggatggtctcaatctcctgacctcatggtctgcccgccttggcctcccaaagtgctgggattacaggcgtgagccaccgcgcccggccagcaatacagtttttagttactcgacatctttaagcctataactcttaggctatgcatagccccatgtcctaatcaggcattcactgatcccagcaggtctccatctatttgtaccagcctcctctttcctcccaatctcaaggttactcttaaatactagtaaatgcaaaaagaacttgtaaagtggcaaggcatggcctatcaaaagtcagcccaagggcagttttcagccctgcctcacctgggtctagttcagctgacggatgagctgattgatgcgttcaccccgatagccaggtgtgcccatctccttgaggaagcccactctatttttggtagcatgatgggccactgagaggtggaaagggcgcaagaaccatgagatctcctggaaatgcttccctgggaaggcaatttcatgaatgaggtcttccaagcaaatgaagccaaacttccccaggtgctcctcaatcactgtgttgtctgtcagagggatggtcttattcttgaccttggcttgtccacgtttcaaaatgagttctcggacagacttcagatttggaaatccccaggtcacataaggttccactatatgcagcatttttagattctagggggtaacttttacaaagataccactaaaaattttctttaggcgaagtcttgcagtggttctctgcacccgtaaactcacgccatcaatcctttcgatgcgtacaacaaaggccaaggaatgtttatctggcaattccaaggcatgaggtttcacttctagtcgtctgagacgcaccttgtcacgtttctgccgccaggaatcatgtaggaatgattccagtcgcttaaacctgagcccttttcctttcttctgtcttgctactgccatctttctagtggtgcagctactcaattctttttttaattataatttttattttaagttccagggtacatgtgcaggatgtgcaggttacataggtaaacatgtggccatggtggtttgctgtacctatcaactcatcaggtattaagcccggcatgcgttagctatttttcctaatgctgtcccgcccccccacccaacgggccccagttacactcttaatccttatagctcagatgttatgatccacagtgtggttcttacagaaagttatggattaaaaaaaaaaaaaaacactcaaagtgcccgaactttcttaaaataatcctggtacagctaaactcatgcactgactgtccacctaatatttaacagtctgtgttgtgatatattgttttaatgttctgaatgcttgtcagctttcagtattgaagatgtgaatcatttatcagcaatgacacatttagtctaaggttgtcagctatttatgctacaaattaatgacttgtccttaaaatatcaattttgtgattcatgttttggcaggtggttagatgttttgtgttctaattttaaactatggataaaggttttgtcataatcattgttttattggttccttttctcccctgcccactccccaaaaaaccctgcaattcttttttgttaaacttttattttaggttcagaggtacatgtgcaggtttgttatataggcaaattttgtgccacaggggtttgctgtacagattatttcatcacccaggaaataaacacagtacttgatggataggtttttagtcttcattctcttcccaccctcaagtaggccccagtgtctgtccttcccttctttgtgtccctgtgtactcaatgtttagttcctagttataactgagaagaacatgtggtatttggttttctattcctgtgttagtttgcttaggataatggctgccagctccatccatgttgccgcaaaggacatgatttcattctttttatcgctgtgtagaattccatggtgtatatgtaccacattttctttatgcagtcttctgttgatgggcttttaggttgattctatgtctttgctattgtgagtagtactgcagtgaacatacacatgcatgcgtctttatggtagaatcatttatattcctctgggtatatacccagtgatgggattgctgggtcgaatggtagttctgttttaagttctttgagaaatcatcaaactgctttccacaatggctggattaatttacacttccaccaggagtgtataagcatttccctttctctgcaacctcaccaggatctattattttctgactttttaataatagctgttctgactggtgtgagatggtatcccagcaccatttattgaatagggagtcctttccccattacttgtttttgttgactttgttgaagattggatggttttaagtgtgtggtcttatttctgggctctattctgttgcattggtctatgtgtctgttttgtaccaataccatgctgttttggttactttagccttgtagtagtttgaagtcgggtaatacggtgcctccagctttgttcttttggcttaggattgctttggctatttgtgcccttttttgattctatatgaattttaaaatagtttttttctaattctgtgatgaatgtcattggtattttgagagcaatagcactgaacccgctaattgctttgggcagtatggcgattttaacaatatcgattctttctatcccctgcaattctttgttgttgtatttaactatttttacttgtgaagttttttcagggatgattttgttgaaagtgacaactctaaaaattatgttggtaattaaaattttaagtaatgacttttattttcagagattccacttctcttagactttggagctgttaacagcagtgtccaatctgcagtggtactcagcagtttctgtttcctgcatgcagaactgcttatatgaaaacacagttttaaaaatgctttcttatggctgacattcacattcttattccttttgattcttttcaagagggatttggtttgttaaaattaatttttgcaatacttttatgaagatacaaactctgacaaagcttttaaaacaagtttgagagaatacagtattgatttcacttgtaaatctgacaattattttagaaaaaaggaaaatattatttactattattttgcttataaatgtttatcaattttaaagcttccacattgcacatctcccactacaacagtagctaccatttattctttctcaaaaaaagtgctaagtgtgcccttgaaatttttacattgtgcagaatatccctaaaattttaaaacaaaaattacatcatcacttgctttaaatgtttcttctttatttaacatacagtttctaaaatgttagcaaatagcattttagaagagacacgttacttttctaatgaatgttctaaaatgaaccacagtaacctatacttacttagactgtgaaaaacaaaacttatattctattgttaaattttcaaaagtgaaactacacgatagtttacttggcacatcactctgttattgtgaattgacaaatgtatatgtagacaaatatgtgaaaatcagagtacatatacattatatgcagcaccacaatacattttttagtatgttttgactgatatttaattatataatttaccaagaggatctcaccagaatgtagaaaagtattgaattttagaacaattcacatatttaaaaaaaatgtagtcagcccttttatctgtatctggagaatgcagggtaaaggaataatacatgagtattggtatttaaaaaaaggtgttaatttcttacctatgatacctgttactttgggtatcatttaacctttatttctgtgaaatagaggagttctaacatcctctaattattataatattgttctaatttaatctatcttaatctgtgatacagtttgaaaaccaagcttttactattggcatgtgcaaaaaaataaagcagcagtagacttggaatcttgaatgcaaatttagattttgcctcttaataaatgtataatatagtgttctgggaccaattctctaacatttctgagtcctagtttctgcatctgtcaaatgggattagagatacctactttcaggatgtgatatggtttggctctgtgtccccacccaaatcttatcttgaattgtaatccccatatattgagggagggacctggtgtgaggtgtttggatcatggaagtgatttcctccatgctgttctcgtgatagtgtgggagatcgcaaaacatctgatggtttaaatatggcagtttcccctgtgctttctctctctcctgccaccatgtaagactttccttgcttcctctttgccttctgccatgattgtatgtttcttgaggcctccccagctatgcagaactatgagtaaattaaacctcccttataaattacccagtctcagatattctttatagtagtgtaaaaactgactaatacagagaattggtactggcagggttgggtactgctataaagataatctgaaaatgcggaagtgactttggaactgggtaacaggcagtggttagaacagtttggagggctcagaagaaaactggaagatataggaaagtttggaacgtcctagagacttgttttgaatacttttgaccaaaatgctgatagtgacgtggacaatgaagtccaggctgaaatggtcccagagatgaggaacttattgggaactggagcaaaggttatttttgctatgctttagcaaaaagactggcagcattttacccctgccctagagaactgatgaactttgagatgatttagggtatttggcagaagaaaatttctaagcagcaaagcatcctagtggtgacttggctgattctgaaagcgttcagtcatgtgcattcacgaagatatggtctgaaattggaacttaggtttagaagtgaagcagaacataaaggtttggaaaatttgcagcctgaccatgtagtagaaaagaaaaccccattttctggggaggaattcaagccagctgcagaaatctgaataagtaacaaggagtaataagtaataataagtaaaaagtaataagtaataagtaacaaggagccaaatgttaataaccaagacaatggagaaaatgtctccagggcatggcagagatcttcggggcagcccctcccatcacaggcctgagaactaggagggaaaaatggtttcctgctcagggccttgctgctctgtacagcctcacgacatggtgccctgcatccctgatgctccagctccagctgtggctgtaaggggccaagttacagctcgcaccattgcttcagagggtgcaagccccaagctttggcagctttcacgtggtgttgggcctgcaggtgcgcagaagacaagagttgaggtttgggaacctgtgcctatatttaagaggatgtatagaaacgcctggatgtccaggcagaagtctgccatggaggcagagccttcatggagaacctctgctagggcaatgcggaagggaaatatggggttggatccctcatacagagtccccactggggcactacctagtggagctgtgagaagagggcctctgtcctccaggccccagaaaggtagattcaccgacagtttgcagtatacgtctggaaaagccacagaatgccagcctgtgaaagccacaggggtaccctgctgagccacaggggcggagctgcccaagggtatgaaagcccaccccttacttcagtgtgccctgaatgtgagacatggagtcaaaggagattttggagcttttagatttaagggctgcccagctgggtttcagatttcatggggcctgtggcccttggtttgaccagtttctcccatttggaacaggaacatttacccaatgcctgttccctcattgtatcttggaagtaactaacttgcttttgattttataggctcatacgtggaagggacttgccatgtctcagatgagactttggtcttggacttttgagttaatgctgtaataagactttgggggactgttgtgaaggcataattggttttaaaatgtaaaaagacatgggatttgagagggagcaagtgcaaaataatatggtttggctctgtgtccccacccaaatctaatcttgaattgtaacccgcatgttttgggggagggacctggtgggaggcagttggatcatgggggggttttttccatgctgttcttgtgatagggagttctcaggagagttgatggtttaaatgtggcagtttcccttgtgctctttctctctcctgctgccaggtgagacgtgtcttgcttcccctgccccttccaccatgatcataagtttcctgaggcctccccagccatgcagaactgtgagtcaattaaacctcctttccgtataaattacccagtctcagatagtatctttatagcagtgtcagaatggactaatacaggatagtaatgaagattacagaatatgtagatgaagaagtgctaagtaaatagcagctattattatgtagtcaaattgaatgtatacattgtggtacttcagtgtcctttaaattgaataactagaaatttgttggctttctcaatctgctcacatcagatgacatgttaatttatgcctatacttttttctagttaatagatataaatctattcactcaacttctattgacagaactggtagtgtggcaagacatctcatttctagttaaggctgtataatattaagttcattttacttaaattaactatggtttgggaaatgcttttcatgtcatcatgtatgcccaatttgatactttagtgggacagtatatttcagaaaaaaacaaatgcttccccaaaaattccagggttgaatacattagtcagacatataacaatgtacttcagagttcctctaagggcaaaaatcgtggtatgaatatacaaaacactcctatttatacttttgtatttttgaaatgtagtcttcatgttaatttagcatttcaatgaccagcatgacattatcttaataatttggaatgccaatatgttcatttaagacttaatatagtaagtatctaaagaaaaaaatggaagtgactgaatgcttttgtatctcttaattataatttgtgctccattgtgatatgaaggatagaaggggcaggatagatagaaaacagaaattaactttgatgtttaaccttaccttaagactgtctgttaagtgacccacataatcttaaaaaactctgtcaagcttaatggatgctactctgcaggcccctgccaggcaacagtcacaaggttatgaggtgcatagattttggaattaggcagagctgaattcagatccaggtgttgccttataatgcgactttgggcaaataaaaggcccaatttttgtattcttatctgtaaaatggactcagtaaaaattatttgagataatttatttgtgtactgtacctaggcatgcagcttgacacacagaattacaagtcagtagtttccagtatgattattattgtgaaagagatattttgtttcacctactgaaaacttttttcagtcttaaattttttatctaactggctgtattgcagatgtctgctatataacttttatataattttaaaaactatttctttcctccttgatcttctaggggtaaggttaccaatgttttcattatttactaaatatagcagcccccaccccttattcatggaggataggttccaaaacccctagtgtatgcttgaaaccacagaccacagataatcccaaatcctatatgtatattgtttttcctatacatacatacctatggttaatgtttaacctactaattaggaagagtaaaagagtaatagtaactaataataaaataaaacaattgtaacaatattccagcatcactattcttgtgctttagggccaccattaagtaaaataagggttacttgaacacaagcactgtgatactgtggcagtccaactggtaacagagatagtgatgcggtttggctgtgtcctcaccagaatctcaacgtgaattgtatctcccagaattcctatgtgttgtgggagggacccagggggagctaattgaatcacagggtctggtctttcccttgctattctcgtgatagttaataagtctcacatgatctgatgggtttatcaggggtttccccttttgcctcttcctcatttttcttttgccaccaccatgtaagaagtaccttttgcctcccgccatgattctgaggcctccccagccctgtggaactctaagtccaattaaacctctttttgttcccagttttgggtgtgtctttatcacaagcatgaaaatggactaatacagtaaattggtaccagtagagtgggtgttgctgaaaagatacccaaaaatgtggaagcgactttggaactttggaggactcagaagaagacgggaaaatgtgggaaagttaggaacctcctagagacatgttgaatggctttgaccaacatgctgatagtgatatgaacaataagatccaggctgaggtggtctcagatggatattaggaactttttgggaactggagcaaaggttactatgttatgttttagcaaaaagactggcagcattttgcctctgccctagagatttgtggaactttgaacttgagagagatgatttagggtatctggtggaagaaatttctaagcagcaaagcactcaaaaggtgacttcggtgctgttaaaagcattctgttttaaaagggaaacagcataaaacttcagaaaatttgcagcctgacaatgcagttgaaaagagaaacccattttttgagaagaaattaaagctggctgcagatatttgcataagtagcaaggagcctaatgttaatccccaagaccatggggaaaatgtctccatggccatgtcagagaccttcacagcagcccttcccatcacaggcccagagacccaggaggaaaaagtggtttcgtgggccaggcccacggtcctcatgctatgtgtaggctagggactttgtgccctgtgtcccagctgctccagctgtggctgaaaggagccaatatagagctcaggctgtgacttcagagggtggaggccccaagccttggcagcttccacatggtgctgagcctgtgggtacacagaagtcaagaattgaggtttgggaacctctgcctagattttagaagacgtatggaaacacctagatgcccaggcagaagtattactgcagggcagggctgtcatggagaacctttgctagggcagtgcagaagggaaatgtgggattggagccctcacacagaatccctactggggcactgcccagtggagctgtgggaagagagccgtcatcctccagaccccagaatggtagatccaccaacaacttgcaccatgtacctggaaaagccacagacactcaatgccagcctgtgaaagcagccgggaggtaggctgcaaagtcacaggggcggagctgcccaagaccatgggaatccatcttttgcatcagcatgacctggatatgagacctggagtcaaaggagatcattttggggctttaaaatttgactaactcactggatttcagacttgcatgggccccgtaacccctttgttttggccaatttctcccatttggaacagctgtatttaacctgtgacacccccctaccccctgccccccatccctccggcccttgtatctggaagtaactagcttgcttttgattttataggctcataggcagaagagacttactagccttgtctcagatgagactttggactgtggacttctgggttaatactgaaataagctaagactttgggggactattgggaaggcatgattggttttgaaatgtgaggacatgagatttggaggggccaggggtggaatgatatggtttggctgtgtccccaccctaatctcaacttgaattgtatgtcccagaattcccatgtgttgtgggagggacccgggggtgggggtgcagtaattgaatcatgggggctggtctttcctgtgctattctcatgatagtgaataagactgacgagatctcatgggtttatcaggggtttccaaaacttttgcctcttcctcatttttctcttgccaccaccatgtaagaagtacctttcacctcctgccatgattctgaggcttccccagccatgtggaactgtaagtccaattaaacctctttttcttcccagttttaggtatatctttatcagcagtgtgaaaacaactaatacagatggctagtaagggactaaccggcagggagcgtctccagtgtggatatgctggacaaagggatgattcacgttccagggcataagatttcattactcagaattgcacagaatttaaaacttattaattatttctggaattttccacttaatgttttcaaactgtggttgactgcaggtacctgaaactgtcaaaagtgaaaccacagataagtggggagtcctgtacctaagattattcctttaaattgtttcagtggatatgtagggacctgagtgtgaagtgagagcagcagcatcaaaacctgagggaaatccagatagcaaaagaaacttgtctagtatactggcatgacagagaaaccaaaaagttctcaagttaatgtgagaatctaagaattaaagaattaagcctttgcctttgagggaaggaaaggggtaatgtggctttaaatcaggttgagattggttctgagggttccttttccttcctttatattgatatgaatatagacacaactgttctgcatttccatttgtttttataaatgtctttttaggatttaggaactgctaattatgcaatatgagatatctgttagtttgaggaacatttgaaaatttggtcaaatgacacagatcgtcacacagttttaagacaaatgtttttacctatttgacctagtctggcaatccctatttgggcaaaaatcttcatttgcaggtcatgattggaggcaggcacagaaaaaaaattgccaccttttttgcattatgtcatcaagacatcaaacttcagcctacaaagtagaaagtgttatttctcaagttgaaggcctggatatacctcagcttctcagttctgacactttatcatagtggaaaatgaagaagattgcttaagaacactgatgttggtgtcagaaagacctgggtttgaaccctgactttactagttacttagatcactttaggcaactcaacttttctaaatcttgtttcttcatctgtaaatgctgaaaatagtacccacctcttaggtctgtggagaggattaaatgagataatctatacaaagaaagagcttgcataatagtgccaagtaatggtgaggttatacctgtattctgattataatctcataaatatttaccatgttagctgtctcagagttcttttgcaaaacagataaagatagaaagtataaataagaaaaataagtgaacatatactgaactttgtacaagatgctggcgatatggagagacccaagacatgggccctacctaaaagagattattgatagaaacaggatacatatacatcaaaaggtaacataggatcatctgtgcaaagtgctatatggcagtgttttaggaagtctagaagctgtcatggatcaggaataccatggtggacacttcaggcagggaaaacagatcttagcaaaagctactcctatcataggtacttgataaatatttgtagaatccaggatccctgtagtgataaagaaactacatggattatgtaggggagtgataagacatatgactggaaaaataaaaagaccaaattatggaccatactgagcttgtactataaacagtggaggagcccttcagatttttaatcatgttgagaaaagagttttagcagtgtgtgggggatagaatggaaagagaagccagtgccagaaggactacttagtatcaaccattgcagtggttaaagcaagaggtgagagaaggcatgcattagaatggcagcggtcagagtggatgggaaggaataggtcctgacatagtgttacagggagtaataaataggatgtggaagatgggttagaattggcaaaatctctgcatgtaagtctgggttactaaatatagtgagagaaattcaaatctctctttaagaatcgaataaaatatttagaaataagttactgttgtatttgaggtgaacacaaatggcatttcaaagatgctcgagataccttgttggaaaaagtcaataactgcactattgtctccaacatgttcttgccttctctgaagacatcatgttcctaattctgaattatgaaccatctattatccttgtatgctcttatgtgtgaggaaccataaggtgggaacaaaatccggtcttcattctagaaataactatgcgatcaaaaagtttttagtctttcttcttaccatactggttcttggtattctgtttaccattcaatgtactattattgcttctgcttaaaactcgcatcccctaatgcaagcctgagcaaacagaactgataacacacagcctgagaagggagtgcttggggtctcaagacttattctgtttttctccatctttgacacttggtttgaagagcaaagaaggatacagctgttaggaagtaagttacccaaacacagtgaccaaactggattaattcttccaatgagaaagaaatacattatttctgtgagacagattagactttaagtagcatagataacatgattatattctctctacaaataaatacacaggacctaagaaaccctttacagatccaagtgttttcctctccacttttccatccccaaacccatcttgcaagatatggccagcttatttggagttaattaaatcaagaccttcgttttacagacagggaaaccaagcccagagacactgagtagtaggccactggtgtcttagaggtctgaaaaatcctttactgaacattctcttgatctattaatgtataggttttgttgctgtaaccctctccccaagaggagtgaatataaatgatgcagagtttggatgaactatcttaataagaacctaaagttgaaaccaatgcaaacctctctcaataaatgcaaagcaaagagaataatcagtctttctttggcttgttaaataagataaaatgtgttctgctaaaaccatttaacagaaatattgtgaaaggtttcccctaaagcatttttctatttgatttgaaaactattccatagcttattatcaaacaaatcagtaatcctttagctaatgcagagataaatgggcagtcagaaaatataatcacctggtgtgtgcagctgagtatttacatttttcctaatgaacaaagataagaaaagtgcaggtgactttaatgtgtaaaaactaccttttagtgctagcgctagagggaaaaagaaattactggctcaagccaatcctgtacttgataactaagccgtatagtccatggcttggcttcagttctgttttgaatctctttttggacttgtcttgaatggactgtttagggctgcttcagtagtgcagttgttgcatttttaagcatagtttaggttttaaaatgtttctggtccctttttttttttcttttccactttatgttgcttaaagctttatggccaggttttctcatcctcagcattattgacatttgaagctggatacttctttgtggtgggggctgtcctgtgccttgtaggctggttagcagcatccctcgcctcttctcacttagatgccaatagcatttccccaaccgtgataaccaaaagtgttttcagacactgccaaatgtctcctagagagcaaaattgctctctgttgagaactactgtgttacggtgtttggacaaaaactgacaagccaatgggaatattctattggtagttgtaaaaaattaatccagttatagcagctgtatttctggaatttttttccatattaacacttgctttctgaggtgataatatctttgttttttttctcccaaatagatttcttgcattacactgaaaaattgctgattaattcacttaaattgaagactaagccaatcatgtcatttgggtaatagtttaccaactctgcccctttctctgtcagggaagcctctaatttagtaagcgatactgtatccttttgtcaggtacattaccattcctattagcaatagggcaattgagattgagaaagattaaaaggtcaccaagctattacattgtagaattaggttatgaattgtagcctatctggtttagaatctttaccttactagtctccataacaacaattcttccagtgtggtccatggggccctgggagtctccccttaaagggcagactattttcacagtaacacgtactttatttgccatttcattatgtcagcatttgcaataatggtacaaaagcaaagatgagtaaaactgttggcatcttagtatacagtagttactgtattcactgtcatgcacttaaaatctttgaagaagcaaaaaaattattaattacattaaatttcaacccttaaatacatgtggtctttctcatgtcagtgtgacaaaatgagaaggtgcataatccacttatatcgcatatagcatttgatagttgtctcaaagaaaagtgtataagattaaactgtgagttaacctactttttttcatggagtaccatgagagataaactctggttttcagccttgggtatttggcgatgttttcccaaaaatgactgaagtaaacttagcactttaaggaaaacaacttaaagtatttgttgccaattgataaaatataggtttcaagcaaaaatcagaatttttgaagacttgtatctgccactgtgagcttgacaaatgtgactcttttatattacataatgaactatgtcaacatttgaaagatctgcataactcagtgaaccagtattttccagatgactaatgcatgataatacaaaatcatgcatgggtaaaagatacattcaaagtgcaagatagactgacatatttcaatgtaacaatcaaaagttcattgataacagttttggattccacattgcaatactaaaacctttaaaaaacgaaattgtccaattttggtgtagtaatcagaaaaggcaatctataattacctgaacttaagtttctggaggaccattaaccttctacaggctcatggggaagactgtagcacttctctttccctaagatcctccagaaaggaagaaggtaatccttgggggtagggtagagacctattgtgtgatgatcaccaagtatgtaacaatgctttatataactctaatatatataatccacacaaaccccctaaaatggcactaataagggaatggactcaaagaagttaagtcagctagccactgtcacagctattagagcactggaactaggatttgaacccagatttgtctgtatgtaaagctgattctcttcgtaatagtactgagacacaagaggcggctacaaaatattctggtactccatcctagaccagagtttcaaggttcgttatcatttgtagcatgatactggatcctcacagtgcttgcctttcattcaggtgccaggaaacgtctgcctgaatgaatgggtgtaatttacctgcacattttacatgcttctctaggtgtgtgaataactcataatccatccatgactttcacccataatcctccttgtagcaattgctttgcttgcaacaaaactaagtagacatatctagctttatgcatggttttctctctctgaactctaacataaactcagcctcaggaattattcggtttctactacatttgccattctgattgggaaccaccagcattcaggtattcacctggaacaaggcattttgttccaagggttcctcacttaaaagcaagcaccctagcaatagttcataatggaacttcttaacattctcagaatgtttggcacagctgtgagtgaacacacattgagcaatcaataactattacagataatgatgcccttaagaccaggatattttagctttcccattcaaagggggtgaaatatgcactcttactatggtatacttttggttccttctgccatgtatccttaataaaagatgtcaattccatatggttttctcttgagttctaaccattttgttgtaccctagcccttttaacaatatcaaacttgcaactgaataccatttagcattcatccattttttccaatggtgttcattataggctatcttactcctcctatttgtatgacaaaaattggcttttttcaccgatgtctatggtacatctggcagctttccatgtactcagttcttatctgatgtagcccagaacgactgcctgaagggatgccaaaagcctgattgaggttccaaattttcagctactgtactatcaatccatttgttcatttttactttcccttgtcatctgtagcttacagttgagtggcctgaacatgttttgcatacattgtaatatctaagaatttgggaatacggtcctaggatttagacttaatactaccttccatttatataatacttactcataaaatcttcagtgttcctgaaaaagaaaaaggaacatgtattgagtgcctgctagaagcaggaacttgtagtagattttctatgtgttaccttattttcacaacacacacacaggtgatatccttcccagtttactgatgaggaaactcaggggtcaaagtagtagatacctacccaaggtaacagaagctgtgaagtggtacagctgggatctaaaatatgtcagcttcaccgtagataggctccctgatgaaccacctgccacggcccgtatgaccgcatccaggggtgatgatgtcattttcacagggttattgagagctaaaactacgaagtactacaaactattatttaaaatataaatacatactatatatgcatatgtgtgtatatataattaatggggtaaacattacagaatactgtcctaacctttaaacaatgcactcgttttctgtaaactaatatacaaacaactgtttggtccctaaaaatagatgtcaggtgacagagactggctgagcaagaataggagtatcttcagaatagaagccagaggagtttttgcttccccaacacattgtcgcaccattcactgttccaggaccttcctacttctctggaaaactctggcccaaagcagctcctctacattagtcacaagtttccattaatcaggggtggcctgtgccggacctacagcagagtcatttcaggttattctgttacaggctttcgacgtgtagtcagtccactcgcccaaatctagcagggaatgaatgccttgtaatacggaagcatctacaaattcttcttaacagtgttcagagaacaatgtgaaaccctggggccttttcccagaattagggtggtgggaatgctgtcctattgactaagcctgttaggtaagcaggcagttggcaagattcaggaagcttcatttgaagatagaatttagggcgatcgtttggatttactggcttaattacttaaggtaacatttataaaagaaattgtcattccattattattaccttttaacttttattcctaaacggaacattagcaacaaactacattacttgataaatgtaatttctaaccagattgataactagaaaaaaattttaagttactttgctctgtgaattagtttaaacatatttgtaattgagacttactactgttattggctgaaataaataaaagcaagagataataaagaataacagagacaacgaacacccaatttaagtttatttctaagttccatcttttttagagaaaaggcaaattaagaaaagtttagagagaggtactagtatatttatgaacttgtatagatgataagcaaaacggactttaatatgtagaattccagaatcaacaggttgccagcatccatgtttttgaagatttgcttaagaacacaaccaaaaatggaatgggcagtctctaattacaagcagaaggctacaaaatcattttagctgcataatacagttttggttctaaagtcagcacgtaagaggaaaattccttaggaaaatacaacattgaaaaccattgtgtcatgtaatatgaaatgcaataattaatttttcctccagtaatagaaagatcactgtttcattggtttataaaaatatatctttatcattaaatgtggcaaaatgttaagacttggtgaatattggtgaaaagtatatatccattgtacaattctttccaattttttttgagattgaaaatttttaaaacaacaaattatcttttaaacagctaataatcactagacctgcactctttgtggtgagactatgaaaaatgttagagacctagtaagagaagcagattcacatttctgtcttcttcttcaagccaaacagtcatagagtggagtgggcagaatggaactcacttttgaaagcctagtgctttgtccaatcttactgcaagccagacaggaaggttatagaaaatgtttctggatcagtcttctctgagtcatatgaaattgtggtttcagccaagatgacattaggaattagagacatgggacaaaaactttaagattgtaaaaaaattttgactctagtaggaaacatgggtagaattgtaatgacacttgattgaattttaaaagatgcctgtataagatcttaaaattaggaaaaaaattatggcctaagcaattaaaggcataggaggcatctttttgggatgatggaaatatcctctctcctgattgtgatagtagttacatgaatattcatttaacaaaaaccataaattatagacttagaaaacagtaaatgttactgtatgtgacaccttaataaacgtgattataaaaataaatcctaagcatctaaaaaaaaaaaaaaaaagaagaagaagtgaaccagaaccacaccattctattttggagacacttcaaaagaaatgacctcattcttaattttgtttaaagaagaatataacatgatttgaatatatttagctaggatattttagtgcctgctagcacttgaagccagagttcactgtgagcattctga

SEQ ID NO: 1502 - DNA, 4788 bp, Homo sapiens
tttttagaaaaaaaaaatatatttccctcctgctccttctgcgttcacaagctaagttgtttatctcggctgcggcgggaactgcggacggtggcgggcgagcggctcctctgccagagttgatattcactgatggactccaaagaatcattaactcctggtagagaagaaaaccccagcagtgtgcttgctcaggagaggggagatgtgatggacttctataaaaccctaagaggaggagctactgtgaaggtttctgcgtcttcaccctcactggctgtcgcttctcaatcagactccaagcagcgaagacttttggttgattttccaaaaggctcagtaagcaatgcgcagcagccagatctgtccaaagcagtttcactctcaatgggactgtatatgggagagacagaaacaaaagtgatgggaaatgacctgggattcccacagcagggccaaatcagcctttcctcgggggaaacagacttaaagcttttggaagaaagcattgcaaacctcaataggtcgaccagtgttccagagaaccccaagagttcagcatccactgctgtgtctgctgcccccacagagaaggagtttccaaaaactcactctgatgtatcttcagaacagcaacatttgaagggccagactggcaccaacggtggcaatgtgaaattgtataccacagaccaaagcacctttgacattttgcaggatttggagttttcttctgggtccccaggtaaagagacgaatgagagtccttggagatcagacctgttgatagatgaaaactgtttgctttctcctctggcgggagaagacgattcattccttttggaaggaaactcgaatgaggactgcaagcctctcattttaccggacactaaacccaaaattaaggataatggagatctggttttgtcaagccccagtaatgtaacactgccccaagtgaaaacagaaaaagaagatttcatcgaactctgcacccctggggtaattaagcaagagaaactgggcacagtttactgtcaggcaagctttcctggagcaaatataattggtaataaaatgtctgccatttctgttcatggtgtgagtacctctggaggacagatgtaccactatgacatgaatacagcatccctttctcaacagcaggatcagaagcctatttttaatgtcattccaccaattcccgttggttccgaaaattggaataggtgccaaggatctggagatgacaacttgacttctctggggactctgaacttccctggtcgaacagttttttctaatggctattcaagccccagcatgagaccagatgtaagctctcctccatccagctcctcaacagcaacaacaggaccacctcccaaactctgcctggtgtgctctgatgaagcttcaggatgtcattatggagtcttaacttgtggaagctgtaaagttttcttcaaaagagcagtggaaggacagcacaattacctatgtgctggaaggaatgattgcatcatcgataaaattcgaagaaaaaactgcccagcatgccgctatcgaaaatgtcttcaggctggaatgaacctggaagctcgaaaaacaaagaaaaaaataaaaggaattcagcaggccactacaggagtctcacaagaaacctctgaaaatcctggtaacaaaacaatagttcctgcaacgttaccacaactcacccctaccctggtgtcactgttggaggttattgaacctgaagtgttatatgcaggatatgatagctctgttccagactcaacttggaggatcatgactacgctcaacatgttaggagggcggcaagtgattgcagcagtgaaatgggcaaaggcaataccaggtttcaggaacttacacctggatgaccaaatgaccctactgcagtactcctggatgtttcttatggcatttgctctggggtggagatcatatagacaatcaagtgcaaacctgctgtgttttgctcctgatctgattattaatgagcagagaatgactctaccctgcatgtacgaccaatgtaaacacatgctgtatgtttcctctgagttacacaggcttcaggtatcttatgaagagtatctctgtatgaaaaccttactgcttctctcttcagttcctaaggacggtctgaagagccaagagctatttgatgaaattagaatgacctacatcaaagagctaggaaaagccattgtcaagagggaaggaaactccagccagaactggcagcggttttatcaactgacaaaactcttggattctatgcatgaagtggttgaaaatctccttaactattgcttccaaacatttttggataagaccatgagtattgaattccccgagatgttagctgaaatcatcaccaatcagataccaaaatattcaaatggaaatatcaaaaaacttctgtttcatcaaaagtgactgccttaataagaatggttgccttaaagaaagtcgaattaatagcttttattgtataaactatcagtttgtcctgtagaggttttgttgttttattttttattgttttcatctgttgttttgttttaaatacgcactacatgtggtttatagagggccaagacttggcaacagaagcagttgagtcgtcatcacttttcagtgatgggagagtagatggtgaaatttattagttaatatatcccagaaattagaaaccttaatatgtggacgtaatctccacagtcaaagaaggatggcacctaaaccaccagtgcccaaagtctgtgtgatgaactttctcttcatactttttttcacagttggctggatgaaattttctagactttctgttggtgtatcccccccctgtatagttaggatagcatttttgatttatgcatggaaacctgaaaaaaagtttacaagtgtatatcagaaaagggaagttgtgccttttatagctattactgtctggttttaacaatttcctttatatttagtgaactacgcttgctcattttttcttacataattttttattcaagttattgtacagctgtttaagatgggcagctagttcgtagctttcccaaataaactctaaacattaatcaatcatctgtgtgaaaatgggttggtgcttctaacctgatggcacttagctatcagaagaccacaaaaattgactcaaatctccagtattcttgtcaaaaaaaaaaaaaaaaaagctcatattttgtatatatctgcttcagtggagaattatataggttgtgcaaattaacagtcctaactggtatagagcacctagtccagtgacctgctgggtaaactgtggatgatggttgcaaaagactaatttaaaaaataactaccaagaggccctgtctgtacctaacgccctatttttgcaatggctatatggcaagaaagctggtaaactatttgtctttcaggaccttttgaagtagtttgtataacttcttaaaagttgtgattccagataaccagctgtaacacagctgagagacttttaatcagacaaagtaattcctctcactaaactttacccaaaaactaaatctctaatatggcaaaaatggctagacacccattttcacattcccatctgtcaccaattggttaatctttcctgatggtacaggaaagctcagctactgatttttgtgatttagaactgtatgtcagacatccatgtttgtaaaactacacatccctaatgtgtgccatagagtttaacacaagtcctgtgaatttcttcactgttgaaaattattttaaacaaaatagaagctgtagtagccctttctgtgtgcaccttaccaactttctgtaaactcaaaacttaacatatttactaagccacaagaaatttgatttctattcaaggtggccaaattatttgtgtaatagaaaactgaaaatctaatattaaaaatatggaacttctaatatatttttatatttagttatagtttcagatatatatcatattggtattcactaatctgggaagggaagggctactgcagctttacatgcaatttattaaaatgattgtaaaatagcttgtatagtgtaaaataagaatgatttttagatgagattgttttatcatgacatgttatatattttttgtaggggtcaaagaaatgctgatggataacctatatgatttatagtttgtacatgcattcatacaggcagcgatggtctcagaaaccaaacagtttgctctaggggaagagggagatggagactggtcctgtgtgcagtgaaggttgctgaggctctgacccagtgagattacagaggaagttatcctctgcctcccattctgaccacccttctcattccaacagtgagtctgtcagcgcaggtttagtttactcaatctccccttgcactaaagtatgtaaagtatgtaaacaggagacaggaaggtggtgcttacatccttaaaggcaccatctaatagcgggttactttcacatacagccctcccccagcagttgaatgacaacagaagcttcagaagtttggcaatagtttgcatagaggtaccagcaatatgtaaatagtgcagaatctcataggttgccaataatacactaattcctttctatcctacaacaagagtttatttccaaataaaatgaggacatgtttttgttttctttgaatgctttttgaatgttatttgttattttcagtattttggagaaattatttaataaaaaaacaatcatttgctttttg

SEQ ID NO: 1503 - DNA, 2334 bp, Homo sapiens
atggactccaaagaatcattaactcctggtagagaagaaaaccccagcagtgtgcttgctcaggagaggggagatgtgatggacttctataaaaccctaagaggaggagctactgtgaaggtttctgcgtcttcaccctcactggctgtcgcttctcaatcagactccaagcagcgaagacttttggttgattttccaaaaggctcagtaagcaatgcgcagcagccagatctgtccaaagcagtttcactctcaatgggactgtatatgggagagacagaaacaaaagtgatgggaaatgacctgggattcccacagcagggccaaatcagcctttcctcgggggaaacagacttaaagcttttggaagaaagcattgcaaacctcaataggtcgaccagtgttccagagaaccccaagagttcagcatccactgctgtgtctgctgcccccacagagaaggagtttccaaaaactcactctgatgtatcttcagaacagcaacatttgaagggccagactggcaccaacggtggcaatgtgaaattgtataccacagaccaaagcacctttgacattttgcaggatttggagttttcttctgggtccccaggtaaagagacgaatgagagtccttggagatcagacctgttgatagatgaaaactgtttgctttctcctctggcgggagaagacgattcattccttttggaaggaaactcgaatgaggactgcaagcctctcattttaccggacactaaacccaaaattaaggataatggagatctggttttgtcaagccccagtaatgtaacactgccccaagtgaaaacagaaaaagaagatttcatcgaactctgcacccctggggtaattaagcaagagaaactgggcacagtttactgtcaggcaagctttcctggagcaaatataattggtaataaaatgtctgccatttctgttcatggtgtgagtacctctggaggacagatgtaccactatgacatgaatacagcatccctttctcaacagcaggatcagaagcctatttttaatgtcattccaccaattcccgttggttccgaaaattggaataggtgccaaggatctggagatgacaacttgacttctctggggactctgaacttccctggtcgaacagttttttctaatggctattcaagccccagcatgagaccagatgtaagctctcctccatccagctcctcaacagcaacaacaggaccacctcccaaactctgcctggtgtgctctgatgaagcttcaggatgtcattatggagtcttaacttgtggaagctgtaaagttttcttcaaaagagcagtggaaggacagcacaattacctatgtgctggaaggaatgattgcatcatcgataaaattcgaagaaaaaactgcccagcatgccgctatcgaaaatgtcttcaggctggaatgaacctggaagctcgaaaaacaaagaaaaaaataaaaggaattcagcaggccactacaggagtctcacaagaaacctctgaaaatcctggtaacaaaacaatagttcctgcaacgttaccacaactcacccctaccctggtgtcactgttggaggttattgaacctgaagtgttatatgcaggatatgatagctctgttccagactcaacttggaggatcatgactacgctcaacatgttaggagggcggcaagtgattgcagcagtgaaatgggcaaaggcaataccaggtttcaggaacttacacctggatgaccaaatgaccctactgcagtactcctggatgtttcttatggcatttgctctggggtggagatcatatagacaatcaagtgcaaacctgctgtgttttgctcctgatctgattattaatgagcagagaatgactctaccctgcatgtacgaccaatgtaaacacatgctgtatgtttcctctgagttacacaggcttcaggtatcttatgaagagtatctctgtatgaaaaccttactgcttctctcttcagttcctaaggacggtctgaagagccaagagctatttgatgaaattagaatgacctacatcaaagagctaggaaaagccattgtcaagagggaaggaaactccagccagaactggcagcggttttatcaactgacaaaactcttggattctatgcatgaagtggttgaaaatctccttaactattgcttccaaacatttttggataagaccatgagtattgaattccccgagatgttagctgaaatcatcaccaatcagataccaaaatattcaaatggaaatatcaaaaaacttctgtttcatcaaaagtga

SEQ ID NO: 1504 - DNA, 38596 bp, Mus musculus
  misc_feature (25545)..(25970): n = a, g, c, or t.
  misc_feature (27817)..(27864): n = a, g, c, or t.
ttagtgctaagaaatccagagagggagatgcggtgtgtctctggagcagggcatggctcagtgggacctgtctgccatggtgtgttatgttagaagctgaggatctgagtccggcttgctgtggtgctggtgagccatggaaagggatccaatggtggctactgccctgagtctctaccaggttgtcacacaaaattcactcatgtagcagagaagtggcacatcagagtcccttcctttctctggttctatctgctgatacagatgaaggaaatatatatatatatatatatatatatacatacatacatacatacatacatatatatatatatatatatatatatatatcaatcacctgaaacctccaatacagagacatggttctgatgaatggttttaaggaacaatgctatgtgcaggcctagtgtttaagaaccagtgaggatgacagagataggtaggtgcaccaaggtgagtggtggtgaattggatggccttggcttaaagacagagtccttcatcgggaggtgactcaccccaaggcccagccactcgaagaacagccagtggattggaacgtcccaggacagatgccacagccttgacccaggttggaggtgcacggatctcactagggtcagttggtcgtaggggaaagccccatggatccaccaggataagatgtttaactctacattaaacagaagatacactgtatttgcttggaggtagcatagtttttcagttgctggggaatgagagcattactggaataaatattggaacgtgtaggaaggcagagtcagctcatgagtgagaagagtagcttaagttacctttcagggtacttgatagagtaagaagtggccaggaatcctcccaaactgtgccccaggaggatcatggtggggattcccatggtctcccgccatgtctctattgaggtcacaaactcatcttcagctccttctgggtcccttgggaatgttggccttgagcttcgcccaaaaccaagcagatcaaaggtatgaagtgtgcggcgggcactcagtgaatccatgttgaggatccagaggcccacaccgcccccaaagccatgtaccatcaccagaggggtgcgatccttttgttctgggctcacagtcaccgtccagatcttgttctggtttgggagggatacataacgggccaggaacttgttctggagacctgggaagggaagaattcctgggtaaagcatcaagaatgcttcctgagagcacagacattttgcctagaatacactcttcagttttctctcctcttaaagagatcattttaggaagccctcctagtctccacagtgagttccaggacaacgagggccacatagaaagaccctgtctcagaagaaaagggtaataatgatgatgataataataataatgataaaagaagacatgctgaggaagccatgggaagcaagccaggaagccacattgctctatggtctctgcttcaggtcttgcctctaggttactgccttggcttctaaacttcatgatggattgtaacctgtaagccaaataaacatttcctccccgagtttgatttggtcaatattttaatctcaggaacagaaagtgaactaaaacagcctcatccatcttcggcctccttagcccggccttagacagaaccctaagtcaggttagcaagaactgtcacgtggtgtgccctgttcccccatctttagatctgatccagtgaaccaacttctatttttttgtgttaagtccttgacttttcttcagcaagaatcttgctgagttcactcagaagaaactccccgtcttgaggtctttagtaatctccatccactgaccctgtccgttccttagctctaagttccccagctgttcctgtagcatggggaactgggaatgttatcatcccagtgatgacaggtcgagggcgttgagggaccactgtcgtggaatactgtgttgtctgtctgtatcctccctgcaagccaatgattttctttcctctaacccatactctcctaatgaggaatcagggggctcagtggacccaggttggggaagatcctgtatcctttccaggccttttaaaggggaggagcaaactgtcccttctacttacactggaggatcctggcttccacattcttcagttgagacatggaagtggggcgccaagtggggagccagctactcagccagccctgaggcctacaagacacaaaggtacttactgacaacactggaaagaagccactgttcccagccttgctgatagctcctagagttatcagggtacaaggtgtttcccaacttcaggaggcctgcccttcatggtcttcaatatcagcaatgcctaagcagtccgatagatacactgttactctttccttaggcaaatggctattaagaacaatggcccttaacagatagcagataccatgtacacaaaacttgactcttttgtatttattaccttcctggagctttacaactcctctttgtttctggttattttaatctatgttcaaggagattacagagggagagggagagactttcactaatatttccattattctttgtcactctcagaactagccgttcttttagggtattacagacaaattcccatctgctgtcatgcatgcttctggaagtttggggtgctgttagtgcctgattggggaatccatccatcagggatgaatttagagctggggcaggcaaggaccaaggggtaagatatctggattcatgtcaccaaaagacacaggtggcctctggcccatttttcaggttgtaaaactaggagaaaacttgcctatgtcctagagtaaaactggtaacttatcctgctttccctttcacacccagtgactcagccactgaagagcagaggtgccaagcactggctctggagtatacagaactcctgggtctgaactatagacccacaagtgaggaacggaaggggttgaggtccagacatacagtgaaccttgacaggtgcctgccacaaatgtagttcttgttctacctttcctgtcttgcatgttttctctctttttgtgaactctgcctaggtgaaggtaagaggatggttgcagcaagggcttgtgggtttgagcaggagaagatgatggcatccttggcggaaccatcccagctactcatagcatacacaatgggtaccctgagtatcatgggaactcgctggatgaagcaccagtacctagaccacagatcttggccagtctcaaaagagagacttcctctttgcattgtaggctataacaagtcagaccatgacacctgaatgaaccccacacatctctaactctggacagcagagctcaagagaaatgcttccctatgagacagcaacactggcagcagtccacacaggcctggaaggggtgggggttgggggacagggagctatgggcacagcttggcctttcttctgtacaaacaatccagaaagagaaaaggcaacagtgcctgtcacactgtgtgtcagtgctattagggaggtgagagctgaggtgggagagtgaggcaagcagcctcttaacattgagcaagtctctgaatttctatgggcatccgcatctgttgctttatttgtaaaacggagctgaatggcctgagtcttctttggctctagtgccgtttcccgcaagtcactgtaggcaccataaatttcctcttagaaagcaatactcttcttgggcagttcttttaggtcccttacacgattgtttactattgatacaaagttatttcgttgttctgcagatccaaaaggacaaatattaggtcaagggaaggccctgttcccgtgaaacccttggagctgagtcattctcctctaagcaactttttcccgatcctgttagaccaccatcacacaggtggcatctcaaacttgatggccttgggcgagcagtaaccacatcccaatctaacaaacctacttctgaaaccacggcagtaagcatgtgtttatgattaagaacactatcaactaggattgcaagcagaacgtaaaggcggccaagggctaaaggaatttgcaagccagtttcacactaattccaccgtagtggagacttctttctcctacccatgccttgtccttcaagggcttttcacacccacgactttagttccgggcaagtctccacaagcaccacgtccgcatcgggaagagctagcttattctcgtgctttaccactaatctaactgggctaccaggggggcgatcgcgaagactagtggaaagtcagagtccccaggctgaacgcaaagcttaaccctcaacactctcccagctccgcagccttctcatctctcagcgctcccggggctcctgagcgcaacccatccctccctggaagccaacctgaaaggaaaggcggggagtctgaagctgtccgcaagtacagacagtccccggatcctggcccggacagatagagacagaaagagaaacggacaggagtaactcactgctgctccagatcatcagccatagtaaacaagccctgccgggtcgagctgagccagcccatccctccgctcgacgccagaaccagctgacccagggaagtatcggataacaaagggggcggggccggaggcggggcctgggtcgctagcggggttctagcaggcaaagttggcagaccgaccaactcagcacatggacagcaatcagttgggtgcttccttctgtttgctccctctggcctgcgtccaggctgaacactacagttccacaaaagtaggctcctaatccggatcacatccctttgggggacagtgagggagacaggaagacaggtagtttaaaactccaagttcctcactggaatgccaccagccccgcctccacacctccttcaattaaagagtgaaggaactgctttgcctcttgctcacgttctcaagcttccctctgtatctcaggtcacagacgcttcatctgccttggtagtcctatggaaatgatttagatgtccgtggagtcataagggtgcttcctataaaagggcctcggatattgtaacccaagatttcccggttccagaaatacaaaaagcaagctgcctagttaaattttagacagcaaagtttaaagctaagtaggctccctgtagtatttggggcatcctgtattcacagctctaagatgaggggtgacacctgtcagcataagcatttctctgttctggggatgtcttgcctcaacctactttccaaggaaaaagtagcagtatcctgcttccttccattcggtggacctcccagaggagggccagttaaaggcctaacgcataaggctgggcgtgattaggtatgtggatataagattaaggatgtgggatgtgaagtgacttaacccagaagttttgagcacatttcaggctggctcggcagagaggcgggacacatcttgaagctggcttcagaattcacttgaaatggcaaagggggtgtggcatccctggagcggctccctttccgattatccactgcagtagtttaatcatacttaaggggaaagaatctactgaggactctctctctctctctctctctctcactctctctcgctctctctcgctctctctcgctctcttacacacacacacacacacacacacacacacacacacacacacacgtcaaggtgtatttgtcctgggttggcctcacattggatgtgtatctgaggatgatcttgcttccgagtctcctgtttctatctctggagtgctgggattatagggtgttctgccaggcttgttgattcaagattgtggatcgaacccagggctttctgcttgctagctaggcactttagcagtggagctatgttcctagtcctacagtacttttctttggtcttcttgaaagacctaagtgaacctgagatttattctttccagaaacacaatgttaaactgatcattataagggtttaaagttgaagagaactggaattttcagaaatgtccatccatgattttagccaagctcagtggtcccacaattcactatacacagtcattgggtaggcttgataacaacgcagcttcctgtttcccatcctcagaatctaattcagttagtttggtttgaggctagaaagctgcttttcttttctttttttttttttgcattgaaggtgctggtgttccagaagacacactagttaaacaaatagaaccaatggtcagaagtctgggttaagttcaagttctttgttttgtcatttatttcctgatcttgggcaagtcattttgtctggctgctgcttcttctggagtgtgtggcttgtgagaattcactaaggcaattcaaagaagatttagcatacgtactttaacaatgatgtatcttatgtccaaagccaaacattatgttacacaaagaatccaatgataaaaagaaaggaagtcatcttttttggtggtccccctacagactccccaggctggttttggagagctggcaactatgtagtcagaacttagttcaaacttccctccttctaaaagagacccccatcatcagggcaccacatgactttagtttattttcctcagaacaccattttaaaaggctcttgcataatccatactcatttgcccctcctccagaaattaagtttcagggggggaatcttgtctgtttagcaccctgctttgctccctgcccacagcaaggtatgtgcttggcatttggtgaatgcatggacaagcaggctagtaagcatgcctgtctgacagaatgaagcattaagtgctaagaatgaagtactaaattctgagggtactaagtactaagtagctgacagaatgaagtactaagttctaggacaacaaaagctcccataatctgataacctataaaatgtgggtccttttgggaaaggctgatcaggtgcgactggtattaggactttagattctagaacatatatgaggaacacagtgcagagagcattagtattctgtctccacatgttccaaataagcattagcatagttgtttagaaggaagaaattcaagtatatggaaaatgttctttataatgaaagttatcctaaggtatttccagaattgatataactcaggattgagtagatcttctagaattatatacaatgaaatgaactcttggtacctactctagacaggcctctggagagaaaaatgtattctccccttcttatcttgaagtcaagacacatatggaagaatatatcctatcttaaaaacatatcttttaaaacatgcatgatttgatacataaagtattgtactcttttttattttttttctggttttgtttttttgagacagggtttctctgtgtagccctggctgtcctggaactcactctgtagaccaggctggcctccaactcaggaattcacctgcctctgcctcccaagtgctgggattaaaggcgtgcaccagtactgcctggctgataatataatttcttaggagaaagaatgaaagaatcacagagtatgccccctctactctcccatatcttatattgtggagcaccttagtaatgaagcctctaaggtcttctctgacttctgatttgacttaaaacctaatttgtctttgccagtcatcagatttacagtgctagcgtcatcttttgcatgcccaaagtattggagctttgcagtatggccgagttttaattatttggagaaacagaggtcgttcatgtcagaatgaataattgttagcaagtgcaaacatcttctgggcatttaccatgggctctggtctttgctgcttaatgtttgacattatttcatttaaccccaacgaaaacagtgctgtgattcaggtattgttatttccatgtcatggagatggaaaatgagaccatagtgacatatacctgtaatttcagcactcagtaagcagaggcaggaggattgcaaatttgaatccattctgggatacatagtaatttccaggttaggctacataaagaaaccttgtcaaaaagaacacaaagaagggaagcaagaattaaatgttaagtgatcagtctcaagtaattagtagtatgtagaatcaaagtttaacaccctctttgtctgactctggaacttgaacttttatctactatccctctgcacatgagctttttacacatagtaatgttctgactcacactactcaaaaccaatgaccatatgatttcctattgagagtttagttaagttcatatactgaacacacaacaaaacttttccgtattgttaattcaggtagctgagaaaatctggagttcagaatggctttgtctcagaatgagtatgcttgtctcaataagtgatgtcttgcattgattctgtcttcctagggagttcctatgaagatgttaatgacaaagatcaaaggctaagatgcgtctggaaggtgctgggatgatggcacaggaacttctggaagaattcattactggataattagaaacagccagttagcccatttggccttaagttgactaccagaggaatgtgttctacttgtgctgagacagggagaagggttcaattgcagatgcatttcatattatgtggagtaggaacccgtctggttatccttccacatcccacccactctacagtaacacaagagcacagaggctacatttctaggagtgcaaacttctctcttatgaatatgtatttacctcttttaacagactaaggctttccaaagacacgagtgattcactggaacctgggcagggctatttaagtcttattggattgtggcgctaagtgtttccgggctaaatacagataacaagcgacagtagttcagttgcgggtttagaaatgctgctcaactagttaggcagggcagttggaagtgtcttaaacgctgaaatgaagtaccggattctatgcgggtagactttttaactgaaagatgagatactaggtttagaaggtcgggttattgtgaacttgtaatggcagtgcaaacccgaaggcagaacttaagttttcttcagctaaaacgctaaaaagcagttaattgtacttgttaaaacctcaaactttcaattctttttctataaaatgattcagaggatcaggttgaaacaaatatgctctttggagccattcaaggaatattataacaatacctgttgtacgatgtcagtttgctgctgatcctgacccttcactctacgcacaagtgactatctctctttttagacagtgactgattaacctaaaaattcctacaatataactacagctattggacctccttggtactcaacgagcgtttgttgaatgaatgaatacctgctggcttaggttcttcgtggggcccagattcagccttccagttcaggatcctgtagaggtcaaccctctcccgccagtgtaaaccggcgcttggcccgtataagcatagttctcactgcggaggaacttgacctgctctaatgattggtcataggcatctgaagatagagcttttaagagaattagggccaggcaggttaagtccctggaccgccagcttggtctctaagcagattctcaagctagaccactgagggggatcaaagagagccggaactctctgggaagcgtctctgtccgctgttaaacctctccccttgttccggtcacaaatctcgtcgccagagcaacagtgggcgtcaacaaacgcagggcggaaataaggctatagtacacgtctccagagggggagataggccctgcgcaggagcattaatttatttccgtttgtagttctcagtctggatcagcagcctgcgtctgcgcattaattgtgacgtaccaatgctggcctttatgccggagccaattggcccgccggtgtgggcgtggctagggcccgctaacgcgcacgcgcgagccacatagtctgtggtcgtccggtatccgaagtccccgtgttcgtcatgtcggcgtctgtggtgtccgtcatctcccggttcctggaggagtacttgagctccactccgcagcggctgaagttgctggacgcctatctcctttatatactgctgaccggggcgctgcagttcggctactgtctcctcgtgggcaccttccccttcaactcgttcctctctggcttcatctcttgtgtgggcagcttcatcctagcgggtaatgattctgtaacctggtcataatgtcccactttggcgcgcagcttcgtcctcacggtaccctttggtaatttgtagaaggccgtcgtctgtgaagtcacgcttacttcttgggatccaggaagcaggctcagaaatgtcacgtttctaatgcctaacaggagttgaaactgaatatgtaaagaaatagctcttctggtgttcgtcgcaattaatacttctttaaggaaaaatatcctaccttgatgaaactttaacacaaatttaaagttggtagagctttaaattaaaatgccaagctgagccatttctatcactttggcctaatccctgcttcatctaggagaagactttagtgatagtataggaatataaatattagtgactgcttgtgaggaggtaatccaattgatgctggctttttagttgcccctacttatttctgtgcataatttatgtgctttttctctttaccctcaactcaatttttattcacacaattgtgtattagctcttctttcgggtctacgcatttaataaccttacagacttccaggtttaatgaggattgccgccatggatttcatctgaagtctgacctttcttgccccatggaactgagagaatactgggaacaggtttggctaaagaatgttactaccaaatgtatcatggtcagtcagcagtgttttgggggtttattagcaattgttttcctcagtgaattacagctggtttgggcagagacaaaatatagcattggacttgtttggagacttgatttagagtcttaacataaacctcacgtcacatgtacacattcacattgctaggtcaggcccactgggaacaattttacttttcagaacttaaataggtcccagccgacttgtgccccagtcagagctagagctgcaaagtcagcttattcagtggtcatcatattgtctttgggttttggtccagtttctggaggctacaccctaaccatcaggatatgttagcaccattagccaggtctgacaaacctctctactgtgcccaatactgttcccgacaactttattaaccagccaggagaaagcatttgctgagaacctcttacttatttagcctctggtgatggaagtgtaggaacagggtggggctaacatctgatttaagtaaggtctctcctgttgaagccacccatcttcacaagcctctgagttaagtcctgacttaccagaactacatagaaaaaaagtgatttgctggaaagttaggttagtgtgctcacactctctctttcatcccatctgtctttcctttccttttcttttcttttcttttctttctttttttttttctttttggtagatgacttttgctttttttttttttttttttcttttaaagatttatttacttatgtgagtacattgtagctgtcttcagacacagcagaggagtgcagaagatcttattacagatggttgtgagccaccatgtggttgctgggaattgaattcaggacctctggaagagcagtcagtgctcttaaccactgagccatctcttcagcaccagccccagccccagccccagcttttgcttttttttttttttaaatgttcttttaaaagtatttttgtgagcatctttgtgtgcatataatgtattgtaaagtgtcattatgtgtcagtgtgcatgtgtgtgtatatggaggtcaaagagcagaagtattcattggctagactgaactggctggtggatagagaactctggggagggagtgtcttcctgttgtatggtgtcttgtctgcctctctccaactctctgcaactccacagttaaagatgtgccagcaaaccaggtccttatgcttagaggcaggcactttaccaactgaaacatctctccagctcctaagtcctgtttttgtgcctgttgaggctgaaatgatcaggtttcagtgggaggtatatatatggcttgttattgactagactgcttagcaaaggaacactgttagtagtgaggtcattattaggagtgagggcattattattagtgaggccattattagtgaggacattattagtactgaggtcattattagtagtaagattggtgttagtagtgatatttacaaatcttttaggtaacagggaatagggtgagagaaataaaattgggtttaaggaaaagaaaagggtttctgataattcattgttgctgaagaaagttatcatttgcattctcttcccttcagtgaactcagggtattttgtcactgagctaaattctcagatccattcatcatccacccacctatccatcctttcttttttttttttttttccttttaatttctttttttttttttgagacagggttttaatgtgtatccctgccttgctggaactgtagattgggttgaccttgaacacagagatcagtgtacctccatgttctgagtgctggggttaaaggtgtatcagcaggccggctgccatgtttcttttgacagcattcattttactaagtccaacttcttttgctaggccagatcattgcctggtaacttgttttagtgaaaaattagaaatctggctgtttggccttcgctcacgttgttgagacaggggacctcaggcctggtgtttttgacttttctgtggtctttgggaagagcctggaaggggcagctttgctgagggaggttatagggaattctgggggaggattttgaaagaccaagtggcactaatgctggagctttggcctatttctgtaggagatcatctgagaattaacagtgacagcacaggcagatagatggctcagtgggtgagggtccttgtcaccaagcctgagcatcacctgagtttgatccctggggcctgggtcgggaggagagaaccaactcctgcattcttctctcacctccacatggacacactcacactaagtaaagcgtaaatagcatgcacacctgctgtccaacaacagttctctttttggaagtgaagggcagacttgaagttgatgttagttgcatgtcctgggggaggaccctctttggattgagtctcttcatgcttttggctggttgtttcttttgcatgtacatttgctctttagaaattggttaggacactgtaaatgagtttagaatgctggcatcaaacatttgaatcctgaaaagacacaatgctgtcttctgtttcctcatggctgggtggcttatttagggtctcaggaagggacttgaggtgagagggcacgagggatgggcttattcagcagcggatagtgtagtgggtttttaaaggacctcagggaagtcattttcctatctcagccatgctcagcagctgtctgtttatcttcctgttagctatcactagaggaggaacatctgtcgagtcagagttaacattccagtgttggtagtctttgtagtttccttttgtacctagctgggagctgctcatctcaagaactgtttagggagattaagtggcaattagttaagtctgtctttaaagtaagtcttactaggcagacacgccaccactgagcctcgtccctagtctgtgaagtcattgttttaagttactttacaactttggttcgtccgtactcaagcttatggaaacagttttatgggccggagagatggcttagttggttagagtgcttacagcggtgagttcagatacctagcaccaatgtcagaagctaggcatggtacctatgcctataaccccagtgctggagtgggggtgggaggcgcagggcagcatctaagaggattgctgagtcttgctggctgccagctcaggttcaatgagagaccctgtctcaaaggaataaggatgaaagagagcaggacacccaatgtcctcggcctctgaaagtatgcacacacaggcacgtgcatctggacacacgtgcacacacgccatacacacatataccacattcatgtctctgtctcacacacacacacacacacacacacacacacacactcacacacacactcacacacacacacacacacacacgacgacatttacaaagtaaagttttagtactcgcagttaagaaatcacagaggagtttgcatttgagagacacggagactaacatggagtgttttttgtctcaaggaagccattggcttatgtggactggggtggagctactttagggagtgtcctttgatctttggattcctctcagctactgtccaggaaattgggagtttgccaacttcgtggctgattgtctggtttctaaatgtcctatccatcacttttttattctcggtgtctcaggctgcttcctagctttgcagcccgtgcgtggtatctcttttagcttgatctgatttgcacgcctgatcatgttacttaaccaaatttgtctgtggtttccaaagtagagtttgtgttttgtttagtttgtttgttttttcaggacacaggctcttttgggagctgaccttgttaacaccaccctcttcatcattgtctagtgtcagtaagtcatttgccattccgaggttcttgtccctttctttactctgcagagcttggttcacatctgacccctctcagttcacggttgttgactcttccagtggacccagggctctcttgtccttgcttgcgtgtgtatgtgggggatgaggtaaggaagaggagaggtgggactcttccattagcctgtatttcttgtacttgtctgccctctgggaggcgagggcaggcgctttcatgcctgcatccttgtgcttgttaaattgtgagcacagctgtcttaatttaaggaagatggaggactgtttgccaggttctgtgctggtgtgctgtggattcagctgtgaggatcacagatgcggctcctccttaagagtcttacagtctgaaggaggatgcagacaggtctctgtggaagtattgctagtgaggacaggagcctgatggctccctggccctttcagtgctcatgcagtgtgtccctcgtgtgtccacttcccagaatgtgcttcgtaacttctcacagttttctccatttctttgcctgtattcacagtttatcttatatattagttttttactagcaaagtgagagtagccaggagtctgttcatcttctagtggctcacacctgctcctgtgcctctgctgtttgattccccccccatgtcagctcttgcacttagatacacagaggcaccagtcttctcttggtggctgaacagcttctgtggtgatcccttcattcagcattgtgggttttctctattgagtcattctcaagttttagacttgctctaatattgtctaatcttacagttgaaccaggcatggtggtgcatacttttagtcttagctcttgagtgaccgaggcaggaggatatctatgaatttgaggccaggctggtttacatagtgagttccaggccaaccaagaccctgtctcaaaaaggaaaaagaaaataagttccagtcgatcccaggcactgctagcaaccatcgctagcatcttttccttctcccttgttgtagagcttcttgaaggagtagttgctgtgtctccctttcccccacatatttctcagtgctcttgtgctgtggcctgtccccaccacttcctcaaactattttcccatgtggccagatggagtagtcatccgcctcactttacctgactgctcagcattagtatttagctcaaatggctggttctttctgagtgaaacactcgcttctcagcactcttgtgactgcctcttcctcgttcctcctcacctcctgctggcttttccttcccactgtgctgggcacttcattttgtatttctttccataggtgaatttttttttttttctcaacagggtttctctgtgtagccctgctgtcctggaactcactctgtagaccaggctggctttgaactcagaaatccgcctgcctctgcctcccaagtgctgggattaaaggcgtgcgccaccactgcctggcaccataggtgaatttaagttctgtatcctgtccagttggttcaaaataccaaatctacttgctgacgtatttctctttgatgtctcttcaatcgctcatgtttacatatcccaaatggacattccccttacccttcttcccagccatctgcttctttaccagccagtgtacagtgtcagccctgggtaggttgttcagccagatatataggaggtctttttgatctcataatttctctcaactcccacatccatttcaccagcaagctttgtcttctctggaatataggctgtctctatctctgtttctgcctacttttaccaccttaaccctgagctcttcatttcctaagtcattcatctttagtcctgcaaaccattctttatgttgcagtctggccttttaaagaatgtgagtcgttgttgcttggctagtcgaacccttgactgttgcttcattgccctttggctaagtctagactctgtcctgagtcctcaatatcagtgaccagatagcttggaagtggcaagactgtttttactatctgtattgctctgccccagatctttatgtgcctggctttttagcctttaaatggtctttagtagcatttttaaagacacgactactggatacaacagccttctagtctccttatcttgctacattttctccacagtgtgtaccccacacagaatttccttgttggtttgcagactggagacacttgtttgtctccacggactataggtccctcgggagccagagtcctgtatctggtcctgccatcttcccagcgtctagagtgatgcttgactcatagcaggcgcttgttacagcttttgctaaacacatgagcctttaaggagatgatgagcagaggtgctggatgggcagtcaggaggctgtcggtttccgtctctggaagtcctcagggagacgctgaaccctcatttctggagcactttctttatctgtctgtgtccaagccagctgagggatatggcatacttacgagtgacacaggatttggagggttggtggttctcatgctcatcaaatccaggacctggtaagtgtccttcagacaatttcccaggctcttctttggaggctgcttccagctcacctgtctcccaccacttcctggacattgctctagtttgctttctatggctgtgataaactacgaccagtagcaacctggggaggaaagggcttatttgacttacatggcatagccctttatcaagggaagtaaaagcaggaactgaagtcaagaccatggaggactgctgcttactgcttgctcaacccgttccttacacaaccaggaccacctgtctaggggggatagttgcactgcctacagtgagctgggtccttccatattagtcattaattaggaaaatgcaggagggatgactcagcagttatgaatacttttatagttgcttttctagaggacccaggttcgaattgaacctggcaccttgagggggtttgacatgctcttctggcctcctatgacaccaggtacacaagtgatacacagacttacatgaagacaaaatacccaataaataaaataaattttttaaaaggaaaaaaaatgcccccaacccccccagcctagtctgatagaggcaacccaaagccccacatgcagttccccagctgaggttctcatttcagctgactagtttgtgtcaagttggcaaaaagaaaaaaagaaaagaatccaactagcataggcattttatgcaccagatggggtatttgaagggctagagaatggctcagcaattcagagtgttggctattcttccagaggacccaggttccatccccagcacccacatggtttctcacaaccatttatgtaacttcagttccggggtatccagtgctgtccagtaacctcaatgggcaccaggcgcacacagatgatgcatgtatacacatgtaggcaaaacactcatacacatacactaaacaagtttttaaaaatggggtgttgatctcaatggcctctgaggtccactggatagttgtggggttgacttgtgcactgtaacttaatttgagttgttatagtcattttaaggtgactagcagctcatgactgtatccactggcacaaagcttttctcttgtcccctcatagttactccagacactacctcattttctatcccagtgctgttaacagttctgtatttatttctctagagtttttgctagctgacaagtaagtgatagactagatgtaaagtaaatatgaacatagtaattatatataaaagttacagttttagaaagagcagtttggggcccacggcagagcagctgcagaagcaggcagacctgagttaaggtcccagcactccaggtctgtcacccagggtggaggaaggggaaggcaggcagaccttgaacctcattggctagccagaccagggagtctaagcttcaagtagaatgtctgtgagaatccatgagttcataagaactcccttctcaaaaataaggtaggtggactggaaagatggctcagtggttaagatcacttcctgctttcagaggatctgagtttgattcccagaatccacatccaacctccaggaatgccctcgtcagccttttaggagcacctgtatacacaagtcatatagacatggcacacagtgaagtgcgcgtgcgtgcacatacatgcacacacagatacacagagacatacacacatacacagagacatacacacagatacacacacacacacacagatacacacacacacgcatgataaaaatgaatctgaaaaaaattaggtgggatgtgaatgaggaagattcctgaatttaacctctgacctccacacacatgtatgtgtgcacctacccttatgttcagcacatatgaacatgtacatatacatacacaaaatacagacatttacacgcaatactacagacacatacaaaaagagagctgacatgagttagtgattttgactatttttttcactcagtgaaagtgaatagctttcttgttagtgtatagagaatttcccttagtctgaataattgcataggatttcattgcaggtgtgtagtatgatttaattattccccttggtgacatttggagcatttctttttgttttctttcaattttgcaaacctactgtgttttgtaaaacacattcattgttaaaaggtaaaaacattttaaatactaagtggtattgccagtggctttcccccagaggtggactagcctggccttttacagcaaggctttaagtggttttcttactccagccagtgcccttcataaaggtcagtgcacttccgaagtgtgtctgtgcttaggttgatgggaactgttgccatggtgatgaactctggaggactaatctgatcattctgtcttctcagtggattctttgttaatgttggagtggatgctagcctgaagcaggtgcaataatttattgaagccataaaaggtgtttgagcagagaatgcccctggagctgcttttcatgtctgggtgactggctgccgcctcgttagagacttcagggatacagaaacgtgggagtagagatcactgtcaagagtcttgtgtgttggatcttctgttgtcttttgtgacaaataaagccactagaactttaccaaagacagtgtatctacagcaggaggcccttgtggaccttcagctgtactcctgatctctgccgtgtatcttctggtagaagatgattaagatgctatagggtcatcattcatcccagtcttcgttactgctgcatctgtagcccgtgtaggcataattagacaccttgaagtcaaccagcttaagagtgcttaggcagttaggaggtgtgagtaagcttacagctttagcacctctgatgtgttgttttccccctttattgttcctttaataacggaaagttaagattgtaaaggtatataattttatgagttttagttttctatttacttttttcagtttttagttattggatgtgtgtgtgctgtcaggcttgtcggcaaatgtcctccccagaaagctacctcacaatcttagtgtgatattttttgagacagtgtctgatgtagctcaggttccccttggacttgctgtggacttggagatgaccttgaatgattcgcccttacacctgctcctgcagtgccaggctgcagcggtgcagcaccatacctagtttggggtgaggttttagacactccggtctaactatgatgacttggatcaggacagaacgttatcactactgtacaggtttcttgcattttaagccatgattctgtcctgagagatgaaagtcactatctgtcttatgctactgtagatttactcagcctattttgtttatttgtttttgttgtcttgactttttgagagagtgtcttaactctgtagtccagactggtctccgaacttgtggctgtcctccttcagactcacgttctgggatcacaggtgtggaccaccaggtctggctggtttgcctggtgttaaggctccttatgtatgaatcatctagtgtgcactctttatgtttgagttgtgctgcatagcgtggtgaattccacctaacttggatgtagcagaagttccttttcattgctgtttagttttttcttgtctacatgtggtatgtagtctccctgtactgttaatagacattaacttttctagatggtgtacatacatcacagggatcactcctgtgcgtgcctcttggctgtggtgctttcattttattagagactttccatcacgggatatatttgtgtattgattagcaatcatttgttttatatttctgaataatgacttttgtgttttgtttcttacccagtttgcctgagaatacagatcaacccccagaacaaggcggacttccaaggcatctctccggagcgagcctttgctgacttcctctttgccagcacgatcctgcaccttgtcgtcatgaacttcgttggctgaactccgtttccttactgtggagttggagattggcggagcgtaagtggccatcccagccttgtgctgctgtgctgattccagcaggtggattagatgggctggttctggtcctggtcggccgagttcccatggtacagtagggtgtttgcaggcttgcccagcttcagtgggcagcagtttcatcgcgctcgtcagcctgtgggttacaggtgtgctcccaaaggcttttgaagaaagataaactgcaagttttgcttttagatttgttcttgagttttttcccaattctgattgccattgatgttaaatattaattatggccattgttgcctggtaggtactcagagtagtgtgaatgtatgacagctgcttcttaggaatgtgtgccctgaactcaaatggtaaagttggattaacttgtgagaagacttagaaccagacgggtagcattcggtttgtttgcttcatcccttgttaagcacgaagccatcttgcccccccaaacaaactttacagaattttgatagggaaatgcaggtaggcctagatctcttttgtagagctgaaaattctctctgccctcccttcataggttgtgtgccctcctctccactctcccgtcttgtctcagttacttcattaatgctgtgacaagacaccatggcagaggcagcttgtggaagaaagtgtgtaatttggtattcattgctgcaaagagctagagtctatggctgtcagggtggggagcatggcagcaggcaggcttggtgttagggcagtagctggcagcttacatcttgagccacaagcttgaaacaaagctaactgagagtggcatgggcttttgaacctgaaagcctactcacagtgacatacctcctccaacaaggacacacctcctaatccttcccaaacagttccacctactgggtggaagcattcaaacataggagcctgtggccattctcattcaaacctctacatcccagaagcagagtcttaagcagtgaaacggacatgatttttcccagcacataccaatatttttcctttgatgagagaaaatgagccgggaacaatgcagttgcttcccagatgcacaggcgcacgatgtagagtatcctctgccgcttgatgtttggccctatgcccatgcaactcagggacgaatgcctgtgcttttcctttcctttgcacaataagatttcgtactattgcttccaggtggcaagagaagagaatcttaggaaataataaccttttgggagaaaatgtcccaggtccaccctctttacatcactacatggaaacctgtgtgttggtactgagagcctcagaaacctcacacgagaaccagggatgcatggtgtgtgcagaatcgcccagtcccagattgcagtgcccgtcactttgttgaaagtagtaggctcctagaaaaggtggggaaacgctcttgtctggggatcgccctgcacattttccagaggcctttgacccgatacacgctagctaccctgtggtcccacacatctgtctgtcccatctgtgtggttttcattcagctgtgtgctctaatggtcacactaactcagaaggtaggatgaaaaggaaaacaaaaacaagaccactcagtgcgcttataaaacactcattcctaagacactggcggtgttgatgcccttattctgtgaaatgaattacggggctatagggcagcacagttggggctagattctcatgttgctgcctaacattctccttattttccagttgacagatgggcattttaaaaaatttaatgaatttgaaggtggtatttaaaaccaggaagaaaaggcatatcaaaagaaaatggcattgcgctgtaaaagtcagtgtgacttaggggggccagtgaagggcagttgcttcaagtggcgctcactgcatgtcctacaagtgcttgtgagtatcatttgactttcagatggcctcaagcaggcgagcctgccattcccatttgcagactgggcactgagagacccagagagcacgaggagaaatctttcatttgtttttgctttgaaacagactctcgcttcaaatcagttacgtactgaaggatggccttgtgttcttgaccctccaacccttgcctcccacgtgctgggattgcaagtataggtcctcagttcctgggcccaattttagatcctttttctaatttaaaaatttttaattttaatttgcatatatgtatatgtcttgtgggtttatgtatgttagtgcaggttcccatggcgaccagaagtgatgggtctcctggagctagttataggcagttaggaactgctcattgtcgtgttgggtaccaaacttgggtcttttgaaagaccagtttataatcttaactgctgagtcatctctccagctccagtttcaagattgttggcttgtttgtttgtttttgtagacagggtttctctgtgtagttctggctgtcctagaacttgctctataccagcctagcctccgactcagagatcctcctgtgtctgggattaaagatgtgtgccatagtctgaccggtttcagggtttttaaaagaaaggatgaaaagggaaatggcgcaccattgggttgcatttggggagttcacatacctggcgatatgggccatgggactggggaaagtgacgtgggcaccaagaataacacaacgttagtgtgcttgccttcctggatggaggttgttgccagaagcctgggctgaaattttgttagttctgcttttttaatattatggggagagtctcttactatctttaaaatttcgtagcatttaatcctagctagtgctggaaggctacctttaatcctagctagtgctggaaggctacctttgagctgacagtactgtttattactaggcaattctctttctttctttttttaatttatcataatttagtaatctagagaattaccttgggaagggactcaaactgtattccttttttccatctccatctttatttttaattaattaagagacagggtctccttatcccaggcttgcctggaacttgaaaaaaaaattgttgtttaaaatttattagattttattgaggggggaggagctggtgtgtgtgtgtctgtgtgtgagtgtgtgtgtgtgtgtgtgcctagaacacatgtggtgaacaggactgactacctctgaaagctctctccaccgtgtaggtcctagggatcacactggggcatcagcatccagggaagtgcccatcctccctgagccagcccacttgccctggactttaaagaaaaaaagttttaatttattctttaacaattttacacatgtttgtggtgtattttggtagtaccgcccctacctagtaccccaccacatgctcttttcaaattattttataacctaccgagtccatttagggcttcctgcatgcatatgggcatggggccatctcttcagtctagatggtaccctctgcactctgccgccatctagtggatgcacctttcctatgctgggagtggatcacaaagcataggagttgtattttggtggaacaactaaagctagttcctttcccgtcatgggagggcagcaaaggcccaggtaagcgtaaatgccgaccaggggtttctttccatcctggctaggagacggcagtgctgagctagggatccttagcaggacccaggcttgtcttcctcacctgtgctgataaatgcaggatttcacagggttccctttgtcagtgtctggacttggctttcatttattctagaccctttattgcctccagctcggagtgccccctggcaatactgttcagtgtttagttgatgagcgagtgggtcccctaactgtatctcggtgcctcagccctcagggggctgggaagtcaggtaacttctttatgattggtcttaatagttcttaaaaagcattaattgattcttttaatttgtggctgaattattctggttggtcttttgaaggcagagagctagacagatgtagttagatttattcgtgtgtgtgtgtgtgtgtgggtgggtggggggggggtctgtggatatgggcagcatggcagatgatccaaggacaatgttcgggggttgctctctccttccttccaccgtgtgggtcctggggatggagcgcaggttgtcaggagtagcaggagtacccactgatccagctctttttttttttttttttttttgagatagtcttgttnnnnnnnnnnnnnnnnnnnnnnnnnnnnnnnnnnnnnnnnnnnnnnnnnnnnnnnnnnnnnnnnnnnnnnnnnnnnnnnnnnnnnnnnnnnnnnnnnnnnnnnnnnnnnnnnnnnnnnnnnnnnnnnnnnnnnnnnnnnnnnnnnnnnnnnnnnnnnnnnnnnnnnnnnnnnnnnnnnnnnnnnnnnnnnnnnnnnnnnnnnnnnnnnnnnnnnnnnnnnnnnnnnnnnnnnnnnnnnnnnnnnnnnnnnnnnnnnnnnnnnnnnnnnnnnnnnnnnnnnnnnnnnnnnnnnnnnnnnnnnnnnnnnnnnnnnnnnnnnnnnnnnnnnnnnnnnnnnnnnnnnnnnnnnnnnnnnnnnnnnnnnnnnnnnnnnnnnnnnnnnnnnnnnnnnnnnnnnnnnnnnnnnnnnnnnnnnnnnnnnnnnnntggccttcattgtaatctcttacagctgttaactttcactaatacagttatgatgggcactgtgctgtggactccattttggttcgagttctctctctctctctctctctctccctcccttcctccctccctccctttccctcctccagttgttactttttattcatattctcatgggtgactaaacattaaagttcaaaataaaatgtccagtgttacagaactgtccatctataagatgcttcgtcagcaccacatctttaggattcctgtgtcttccacatgcaccttatatcagtgcatatagttcccctgcctgccctgtgcacggggagacagatagctgtgtatgtgcctgctttgaacctgaaggaacttggcctccgcaaaatttcagttgactttagtccttggtactaagtgactgagtgggcagttaatagtgaatgtttggatcctaagctctgatattcattgctctctatttttaaggacttttgagtaatgattatatatatatatatacacatacatatatatatatgtatatgtatatgaatgattatatatgtatgtttatgtatacacacatacttagaggattgtgtttgttaaaatattaaacatgcttaaatgggaaaggttacgagtggtttataagaagggataaagacagataacccaggtgtttctgcaaaggcggcatcattaccgtggtacaggagagaagtaggagcatgcatcttgggagagctgaggtgacctcacacagcacctgggtcctctgagtgtgtgtgcgtcccacccacaacagtggtcattggtcacatgattaatgttgcttggtggacttctgaaaagggactcaccaaccaaggaactaagttttaatttccttaatttatttatattttatttttatcagacagactcttctgaatccttagctagccttggactcaatccatagttaaggaagaccttgaacttctgaccctcctgcctccccaaggcctgggactgcggacgtgagccagcatgcctgacactgtgggctctgggtgttgtgatgctacagcatcctgccacctgtccccgcagccctgcctgcccatgatttaaggcggttttaaccagagttaaatacatgtgtgtagctgctgggtaatgtgttggacagaatagctgtggataaaattcccaagctaccaagttgtagatttatcatttctaaaggagaggattggcttagttgctttctggagtgtccttcattttagaagttatgatctgtgccttgtagtattagagtgattcaacagtgctctgctctcgggagttgagcacagttgtctctgatttatatcacccctagttccagctctgattgggtggtcaggatccagggaagggcagcatttgatcgtatctgtccaataatgacagtctagagaaggttctgggaaagagcccacagtcccaggagctgttgttattttcatctatagaatgaaatatagaaaatgtcattttcattatttcttatattttttcttgctttctattagggtgattagaataggtgggtcagatggtgctgtttcttcctgggggacagactggggaccccctcacctctctcagtaggtgccttccattttgcgtgtttcagtgacatcagggaggagattttgaggcagtttttgatagcagcctttattctgcttgcagatataaaagcattcttgtgagttcctcaccggtccattgtgccagcatttcagaaaccccaaggcctctgtttgagcacttgccaagtttgtcctcactggagaagacaaaacagnnnnnnnnnnnnnnnnnnnnnnnnnnnnnnnnnnnnnnnnnnnnnnnncatgtttttagtatcagaatccaccctgctcttagcagcagcctggccccactgcaggcattgctcaccttaacccaaagtaacttatgagacgtgagaactaaattacctcttcacagacctgactctttctgaggttctgagaagttttgtccacgttcttgagtctgtcctcaaactgaacattagtgctttgaggaatatgagggccaggaaggtgagtggctggtggagagttaggattggtaagtcaagagctggctgccagtctccagcacctcaacggcctttttttccttttctttttgtgagcttggaatttctgtgtgagcatagtccttctagaggctactctcatacaacgcttgtgaaacactggccatgttctggttattgtagcctggtctaaacactgcgatgcacttaggagtgcggcagctgtcttgtgggttgagagtttagatggaaggatttgggacatgacacacctttgtgcttctttcaggctcactctttgacgtcccctggatcagcattcttgagctggcagcttgttgcacatggcttcttcagattcgtgcttgactacgagtctcactggttgtgaggtggcacgtccaaagaactcccttcgctctatcggaccaactccacagtgtacgtctgttaacacagaatctgcctcccctcactgtagcccttactttccatattaaaaacatttcagcctccaagtgccattggttccttcatgtttgtgtgtccgtttccctcggctcagtgcgctctcatgacttgctcccagctgtgactcttcacctgtgacccttcacctttgttttcattaagtagttgtcattgctgacaacctggaaaatggcagtcctttgtcctttgctcggtcaggcaatcctttattaatccttcattgtctggaacggcaccagtgaacacttgtcagaaactgacctgtgtgctcttcctgctacgtccgtttccataagcttctgggagagtgaaatacatgtgtgtctctcgggcagtatagaacaagtgcaaagtgtgtgtgtgtgtgtgtgtgtgtgtgtgtgtgtgtgtgtgtgtgtgtgtgtggtgagagagaggtgtgactgtgactgcaggcaggtgtctctgtgtgtattgcattctgtgtgactctgtatgtgtccgagaggctggctgtgctgcctgtggcatgtgactggcgtgtgtgcgcgtgcacgggtgttgatttctctcacattgtttcccaaagctccctcacaagccttggtctcacgtcacagttgtcttcagagggtccagttctcctgaagtaggtcaggaaatgaagctcagatttgtgcttaagaccataggtcttcacaggagatcactttaaagacaaagccggagtagagtagcgtctgccggctgaagtctaggcatcctgtatccagtgagctctgtgtctctcaggagcagtaagtttgccatatatggggaacagccctgtcgtgttccctgaagctgattaccaaatgacccgtgctccagaagccctcccgtaggaccgcacgctgccataggctgaggaactcacagttctgttgcccgggtcacactggatcaaatcagtcttgggtgtagctgactacccctatcctggatgattgaggcttgccattcagtgggtagtcggccattagtggtactggccactgttggagctgttggaaaaggagactcccaggccttacccccaagcgacagaagcaaagctttgcattttaacacggtgccaggtgtggtggtgtgcacccggaagtctgagatgcccgcatttccagctctgggtgtatcctgcaactacccggaagcttaacagagcttgagcctctccattctttattagctctctgcttagctagacatactccagagtgagttaacaagccttttaggaatggttgggttcaatataatgacaaaacctggcaggggtcctgtgggccaaggctgagcactgaggagaagttcactaggatggctgagcgatcagtgtgctcgacactcgtgcagacatcctgcggctttccccggagaagtgggtgaggtttactttggattcaataagcagatatttcagatatgaaaagcaatcggactttgagagcaaaggaagacgtcacaacaatacgcgtgaagatttacatttctcgcagtggcttagagccacctgggccgggtactagtttccaggcgcagatctgcttttgtctcggggttgtgattttccccttggactagccttggcggcaggcgtagcttgctgtgagtctgtaccatttacaacagtacaaactactttcaggggtcttgagttcaaatttgaaaatgcaccataggtttgctgtagactttagttagcttgctctgtggctctcagttccataactagttgagttattcctcaactagggaagggccttccacaaggctccccgggcagaggggttggttttgctgactcaggtactgtatgggctgagggatggatgtcctgctgtttcctgcagcttccagctcacacctcctctgtgtgtgtgtgtgtgtgtttgggggggggttatttttatttcctgtgttcaatctgtggggctgcaagccatttaccacaactactgtacattgttccttgctcggcagtggtgggaaacagccctttgcaccctctgcctacacacttcctgtcaccacggcatgcaaatgttcctcctgcttcctctcccggcagcctgcacctctgctctttgatcacgtctgtgatcttggcccacaaagcgctcttgttatgattgttggaacatacttgggggaagtgacagagatttgttcccttctttgggaaagtcagcaagccagccagcatcagctagtttccagcacctggaagctgctagctcagttgtagctctggtgggttgtggactggaagtctaggctagtgtttgggtgcctcatgacttaagatttatcttagggttttcattgctgtgataaaacgccatggggtggggtggggggtggaagccccatgggaggaaagggtttgtttcagtttacagctgaaatccatcagtcggggaatgggggaagtcggggcaggaacgcaaggcaggagctgatgctcaaaccaggggtgaaagctgcctgctgccttacaataccttgctcagcctgctttcttatagcagggccagcttgcccagggtggcaccacctacaatgggttgggctttccctcatcagttactaagaaaatgcccccacaggcttgcccaccaatctgagggggacttttttcaattgacatcccttttcccaaatgattccagactgtcaaactgacatgaaaactagccagtataagacgatagctaattaaaaaaaaaaaaaaagttttccctgggtatgtgtggtcctttaccttgaataagaactttagtgagaaagaaaaaagtgagaatttctgtcagactagacagaaatattttacttacttaattttgaatttataagtctgagcacacaattttttttcctaatgtgggcagcccggtattgtggaatgtgctttgcatgatgtaaagtgttgaattgagactgtgttccgctacatattgtcttttgaaccttagaggaccctctgtctgtacaattctgtaaataattaattaggtgcctgggctgtgcccagtaggcatgggctataaagataagaagcagcctcgctgtctaggggtgagtaaacccactcatgccctgtgtgtctcgcacggtatcaagtgcctgttcccatctgccgttgaagttctatgatcccgtgaggttctctaatctcacagggatgtagtctcctttctccaagtggggaggtggagcgttgggttgccagtgttaggatgtgaatcttctttctgactcaaagcatttatttgctttggatgagctaatgactaatgagtctgggagcggtgatgcttcacgcatcagctacagattcaccggccctcatggaaggcagcagaactgacatctctcacatgatgcttcctccctcagcaccatatccagccggacggggtcttgccacggacctcgctggccagtgggaggagagaggtcccactagggacccattcttgctgctctcacagggatggaccactttgctttaaaaaattaaatattgccgggcgtggtggcgcacgcctttattcccagcactcgggaggcagaggcaggcggatttctgagttcgaggccagcctggtctacagagtgagtttcaggacagccagggctacacagagaaaccctgcctcggaaaaaaaaaaaagaaaaaaaaattatgtcatttcccccttccctccttctccctttcatctacttccctcccctcaatactttctcaaattcatggcctctggcctttttaattgtgataggtgtgtgtatgtttatgcacacacacacacacacacacacacacacacacacacacgtatgatttcagagctgaccatctggtgttggatagctggttggggggcttctccctggggaagaatgtttcccactgtcagtgttgcttggctgctgcgctccttgtttagggttggagaatcccccctcacatttctaagacgcaatctcagagcacacttcctgtttctccggttcttacagtcgttgtgcccccaatccccttctaagatgttccctgcgcctcgggtgcaggagctgggttgtcgatagatccgctggagccgggcaccccaggatccacggtcctctgcctctgacagggtgtggttttctttctgtatgcgtgcgtgcgcgtttgtgagtgtgtcagaggacatcttggcaggagtcggttctttccttgtaccatgtaggtactaaggttcaagcttgggtcaccagggcgtcactaggtgcctttgtatacagagtcatcttgtcttctgattttgccttatcactgaacttctgacccacggggctggcaaggtggctcagagagtaaaaaccccttctgcgcagccccggtggtctgagattgaccccccccgccccccagcttccacgcagaggtagagaactgactattgaagttctctgaccgtcgcagggcaccgcgccacaccatccccgccatgagactgagcctacagtttatgcatctattatgctatgtattccctcagcaggggagccttgtccacccatgctccctggagtggacagggctcgggtttgccattctaattcagtcctaaagaggaaccaagtaagtgcacacaatcacagctgagtcactgaagcagaatgtcagaaactggtctggttaggggccctgcctagctgatggctgcacctagcactaggacttcgtgttcgctctgtttggtgggaaaccaaggcatttggactagtccaccgtgtttttttgtttgtttgtttgttttttgtttttgtttttttgtttttcgagacagggtttctctgtgtagccctggctgtcctggaactcactcaggagaccaggctggcctcgaactcagaaatccacctgcctctgtctcctaagtgctgggattaaaggcatgcgccaccactgcccggcccaccgtggtcttatataagccagttcgtatgtttcctaagttgtcaaagaggcagagaaatgcgctgccttggttcaggtttgtaggatcgaaggaggtaatgtttgctttgatgttgagcaagcacacactatcgtgactcgggattctagacgaggatgttgcccgctcatgtgatatcattggaataactcagccagggtcagcaaggagaaggaaggatgccctagagtcgataaaaatcatgtcttgcgccaggcatggtggcgcatgcctttaatcccagcacttgggaggcagaggcaggtggatttctgagttcaaggccagtctggtctacagagtgagttccaggacagccagggctacacagagaaaccctgtctcgaaaagccaaaaaaaaaaaaaaaaaaaaatcgcgtcttgcagttttgttgaccacagtcttttaggtttaccttgggtatttcctgcccagactgaccatgaaacagaccagttgctcccacaacctaaaccatgttatttgatccacttcactctcaagttctgccagtcccatcttacgtctgtctgtgcttcttccatctggtgttttctttttttttccttggttgataaatttaatgtggatgtttcagagaatggaaggaactggatggtttcaaagtggatttcaggagggcttcaaaactggaatcctgtggcctctctttttgtttttgtttatttctgtttatttgtttattttggagacagggtttttctgtgtagccctggctgttctggaactcactctgtagactaggctggccttgaactcagaaatcagactgcctctgcctcccaagtactgggattaaaggcgtgcgccaccactgcccagccctgtggactctggaagggtggtatgctcacatttccaggacaaacacaccctaggatattgtaggacacactggctggaggaggaatgcttctcagaaaacctgccttgaggggaggtgcctggagagattgtatcctgctactactggctcaaggaatcctacaatcagggaagcccctggggtgccagagaggagggaaaaaaatgtgtctcctcacaggtgatacagtgagaagcatcaggggggccatgggataccgtggggtcctgtggtcctgaaaaaactgtgaccttgcaaaagctggaagtcatggaaggagtaacagatgcgcgtgatagaagctactggggccacagtcacgggcgaggtgggggaccgctgctgagcgggggacctggcgggccccaagcctatgtgagcgccggcatcctcacgcagcaggctgcttttatcgcagcatgggggtgcatgggtgcatccgagcaagcgcgcaggattatggtccatcctttcgctcgtgctgccatcccactgctttgtgtctgcctggggatttcggttcgcgaagcattagcataccattatctcctcagacaacagggagagaaggtgggcatgcattccggtctccgtgtgaataatggaaaatggagagagacaggggaaagttaaatgtgccacgaaggacactgaagcttacagaccctgctttgcctgacccctgcctgcctgaggactgccaggaagatattaacagaggccataaaattacagccattacgtctgtctcccatgctcacacagtgcccggactgtctgtgccttgactttaggcaatcttgagtttaatttacacacactgaggtgcagcaaacccaggctttccagctggatgcattttgacaggcatctaccccgatgtgcccatcatccaggttcagatcaaccgccccgaattccaaacccttgttctcctttcccatcagtcctttctccctagagacacctagcatgtgagtacctgttatgggcgacccctttggccatttcttaaactttagttgtatggagtcagagtccctgaaacctgacacagtgtctgccctttaacaggtatcccgctggaagaaggccttcgtttctaaactacctgagagaatgttggtacaaagaggagaactgaggctgcgggtttacaggctacagagtgaagtcatggatcctgggcctgccgggccccatattccatctcctggcttccaacagggtagtttctttctgggtttctcttgtagctgggtctcctaaacctgggcaggcagtgccccctgctgcctgaaggcctgaccctagactctttgcaggcagagaggatcacacaagtctggagtccagtgactggcacagggcaggaccctgtgaaacagaagccacttgtcattttattttcctttggaaagagtttttccgtaggatgcagggattttctttatcccgaataaacacgccgagggagaaagccttttggtggagtactgctgcccccgtgtggctaccttaagacactacaacagagtgggactcccaagacgaaagtttttcaggtttcaggttctgcgacttcctaggaccctgagagacagatgtccactagggttatctcttgacacttaaatttcctcctggagtggaaatgagagcgaatggggcttcttgtggaaggtatctgttggggaacgagctttagctgtgtgtgtaggcagctgcctctttcacaacctgtccagcacaagctggactggacatagactttctcccttgaactaagtatatagacttgtctaatttgagggcaatagaggtcaggggagggggacttcttgggagtggagccgcagtgcctccccagccggctgctgtgaatgggtgttaccaccaagacctgcaagccccacccaatgtgctctccgtggccttcttttctgcacctgtggttgggctgcggtgtaacggcccagcctacctcttctgggcacgtggcccggagagatcttatctctaactctgtatttttaactcctctttccagaggatgtggcttctgcgggagagcttcaaagggggacctgtttgcccatgtcagcaacctgacgtcatggaagtgggaggctgttcagacccaaacacctggagggaagtgggaaactttttccatttcctgttctacttctggctattgattcactatctgaccagcttacccatttcagggtgcagctgtctgtgtgattcttggaggaaatcctatgccttgtgtgtctgtatgaaaggagacagctgtgttacccatgtggcttttacccaaagcagggctggcgatccttcagactgccccccaccccaccccacccccacccgtagccagtacatgcaagagttacagtatttgacaggtctctcacactcacctctgggaaatatccctcggggacccagacttcaatcttgtccagggcggggtgggctggatatagacttcctgctttgtaaaccggaagcccttcttcccacatgttgctcgaggaactaggtttcagtgggtttgtgtgggtcactggggaaactgaaatggacattaagtgacctttggccctggatgctggttctcatgtaggaccagagtctttagacttttagaagccagtgtttcctggtaactgtcctgcaggattcagtcaacagtcatgaggctaatgtgagtctgaactcttcaagggcgcaccactcaagctctgattattctaatagtttttgccaagctactctattccttgcaaaaccgagacagtggctcacctggcctctgttaacgccaccacattccctctccagctcaggtccctcccagtgactgtgttgaccgtcatggggtcatctgttggtatctgttgggtgcaaggtactgcactaggtatggaggagctactggtgagcaaggtattcctcctatccgaagggtcatctatagtcccttgccaacatgtcacttggtaataaaacaatattagatttgatatagacatgagctttgggagttggattttatggtataccccaaacaaaaatgagacaaaactaaacccttgaagcctcagggggcggcctgagtggtcagagcacacacctgtccagcctgcctgtttctggactgaactgtgactccagctgcactggacaacgttgcagaacactttccacagttctagccttggaacgtgaagggtccatttttttttctgccttcagagctggcctgcagaaagcccttgagggagtaagggcatttatctagactctagagatacccattttacagctggccctggcaaggagtttgctggggtatgggtgccttctctttgggagttggtccagactggtctgggagcagtggcagccttgtgaccattgtcatgtcttcaggtttcctcagtagcctcttccagactaagcagtgagagatccagagtccgacgtggaagagtctctgcctgttccccacacttgttcagctcctgtggagatttagcctcagctgtgggagaaagttcttgttctgattggatggcgatgaagttgactttgatctatcagtggcctcctgtctgccttgtccaggcctcgcttgagttggggctggaagctatctatattcacttcaccgctgtgggaggcccttcaaatccctcccacgtcacctcactctggtcctcaggtgacgttagggttcttgtgacctctggatgttgctctctggggacactgggctagcatggttcaaccgaggctgggcctctttcacgtttagtgaggaggtctgtctttgattcctatactaccttctaggcttcttactctgtcccattcccacaaggtcccccttcagcctctgcattatggcagccagtttttaggagcccggcatctcctcagccacccacgctttctttgcctggattttttttttttttttaatagaacaaagtgaattaccactttaggagcaaggaaaaaaaaaagacaaactaatttgccctaagttcttaatggttgataaaggcttgctgcactaaccttcccatgggc

SEQ ID NO: 1505 - DNA, 638 bp, Mus musculus
cgtccggtatccgaagtccccgtgttcgtcatgtcggcgtctgtggtgtccgtcatctcccggttcctggaggagtacttgagctccactccgcagcggctgaagttgctggacgcctatctcctttatatactgctgaccggggcgctgcagttcggctactgtctcctcgtgggcaccttccccttcaactcgttcctctctggcttcatctcttgtgtgggcagcttcatcctagcggtttgcctgagaatacagatcaacccccagaacaaggcggacttccaaggcatctctccggagcgagcctttgctgacttcctctttgccagcacgatcctgcaccttgtcgtcatgaacttcgttggctgaactccgtttccttactgtggagttggagattggcggagcgctcactctttgacgtcccctggatcagcattcttgagctggcagcttgttgcacatggcttcttcagattcgtgcttgactacgagtctcactggttgtgaggtggcacgtccagagaactcccttcgctctatcggaccaactccacagtgtacgtctgttaacacagaatctgcctcccctcactgtagcccttactttccatattaaaaacatttcagcctcc

SEQ ID NO: 1506 - DNA, 341 bp, Mus musculus
atgtcggcgtctgtggtgtccgtcatctcccggttcctggaggagtacttgagctccactccgcagcggctgaagttgctggacgcctatctcctttatatactgctgaccggggcgctgcagttcggctactgtctcctcgtgggcaccttccccttcaactcgttcctctctggcttcatctcttgtgtgggcagcttcatcctagcggtttgcctgagaatacagatcaacccccagaacaaggcggacttccaaggcatctctccggagcgagcctttgctgacttcctctttgccagcacgatcctgcaccttgtcgtcatgaacttcgttggctg

SEQ ID NO: 1507 - DNA, 44325 bp, Homo sapiens
aagtaaaacattcccctggacatttctttcaagcccagcaagctattaattatggtcataaagttaattagttccccggacttccagttctacaggtctgaaaaacaggattactgggtccaggaaaggcccagttctggtgaaaccaaggctcggctgggagctgagtcattcttctcgtagcaactttttcttactcctgtcagattgcgaactgctagtcacaccacctacaggtggtatcccaaacctgatgcccttgaaagagtggtagcaaatcccaatagctctaaatctgaaaccattgcattaaagatgttgttacgattattaaaagcattatcaactaggatcacatgcggctacgtgtctcggtgggcgacagctaaagaaacttgcaagcccgttgttccacaccaatttcagcgcgatggagacctctccagtctctccacatcttctctttgccgggcggagggaggaggctctctccatccccacgactgccgttctggggggcaagtcgagacgagcacgcctggctgctacctccgcacccgcgtcccacaagcttgctttcggggatctcacacatcaacatggaatctctccagaggccagaggagaatgaggggcactcgcgaggactaaggtagaaagccaggatccccgggctgcgggcgagcgcgtctcccatggctccccaggctcagccgctgcctcttctgggcaaatgcaaagcaagcaacgcacccaccccccgccctccccggaggccgacctggaaaaggaagagcgggaaggtgtctacaactgttcctcagccacagacagtcccaggatcatggcccagagagagagagagaaagagagaaagggacaggattaactcactgctgctccagatcatcggccatagtaaacaagccttgccaggtcctggcgagcccgcccagcgcctgacgccagcaccagctgacccgggaggccgcggggagcaagggggcgtggccgcgcagggggcagggctcgcggcgggccggcggtcggcggtgggaccctcaaaactctgcaacttggtttcagctagtggggcccttgctgtgttttcaatcactggcatgtgtcccggcagagatgtctctgacggtctcagaatgggacagtaatcctggtcacacatttgggggagtccttgcaggagctccgacagccctcccttctctcataactaaaaagtggtagaactacgcctgcacgctcgcacccactctttgggcttcccattgtaactgtgtcctcctgaaatcgacccttgttaatgttccttctagtaagaggcttaaatgtttgtggagacaacgccattggttgaatgctcctacaaagggcctggatgccagatttcgaaactaaaatacaggacacctagttaaatgtaaattccagatttaaataaagcaaatacttttttagaataagtatgggccatgcagtatttgggacataagtaggcatcctgtattttctctggcaaacctaaacctatatgacatctgccaaaatgggcatatctctgctctgatgttgactctgaccccaacctattttccagggaaaatatagctcaactccaggtcaccctcagtttggaggataacagttgaaggactcaccaataaggctaggtctcctttcggtatgtaaatgcggggacagggagataaggctggcttggcccagaggtcctgagtgcacttcagtttgctcagcagaggagctaaatcttgaggctggctgctgaatttgcttgtaccggtaaacagggcctgacctccctggaactgtcagatttcagatcatccccttagttaaaaccagactaggggtggggcgcggtggctcacgcctgtaatccctgcaccttgggaggccaaagtgggtggatcacttgcggtcagtagttcgagaccagtctggccaacatggtgaaaccccatctcttactaaaaatacaaaaaattagccaggtgtggtagcaggcacctgtaatcctagctactggggaggctgcggcagggagaattgcttgaacccaggaggcggaggttgcagtgagccaaaattgtgacactgcactccagcctgagagacagagtgagactccatctcaaaaaccaaaaacaaacaagcaaacaaacaaaaaaaaccagactggggagtggtggaggatgggtgagagaatgctggtgcacaggggtttatcaaagcatttttctttagccttcctgcaggacccagatgattctgagatttcttctttgtagcaacacagtgttaagctgatcattataaagacttaacgtttaggagaaccagcatttatagagtttaggggcttaggaatttgccagatgtggtacaaagtagttcaactagcagaggacttgtctctttcatgcaaccttttttttttttgagactgattctcactgtcacctaagctggaatgcagtgtcatgatcatggctcactgcagccttgaactcctgggctcaaggggtcctcttgcctcagtcttctaagtagctaggactacatgtgcccagctaattttttttttagtttttgtaaagatggggtcttgttattttgcccaggctggtctcaaactccttggctcaagctatctttctgccttgggctctcaaagtgctgggattacaggggtgagccaacaaacttggcttcgttcaatctttcaacaaagcacagtggttctaaacttcagtatgcatagaatcatctggtggatttattagaaattcagatttctgggctgggcatggtggctcacgcctgtaatcccatcactttgggaggccgaggcagatggatcacgaggtcaagagtttgagaccagcctggccaacatggtgaaaccccatctctactaagaatacaaaaattagccaggtgtggtggcgcgtgcctgtaatcccagctactcaggaggctgaggcaggagaattgcttgaacacgggaggaggaggttgcagtgagttgagatcgtgccattgcactccagcctgggggacagagcaagactccatcttggaaaaaaaaaattcagatttctagcacctaccctctgagattcagattcagctggtttggcttgatgctagaaagccgcatttttaggaagcaccgcagatactggtgctccacgagactcactggttggttagaagtatagattctggagtcatgaagcctggttaagttcagtatttgctttgccacttatccactgtaaatccttggccaagttatttagcatctcttaatttcttcctctggcttgtatcttgtgagaactaaccaagataattcaaataaacatgtggtacacttatttgtgatacgaatattacttatttttgttgttgctgttattcaatgccaagaattatgttgagcactaaaaatacaattatccagcctgggcatcatagcaagactctatctctacaaaaatgaaaaaaattagctgggcatggcaatgcacaccaaaagtaacagctactccgaagggtgaggcaggaggatcacttgagtctaggagtcagaggttagagtgagctataatcccaccactgcactccagcctaggtgagagtcagactctgtctctaaaaaaagaaaaaataaataaaagcaattatcaaaaggaaataaacaacctgctctagtggtaaacacagactttctatctgttgctaccctaggctgttcttggctttgcagagctgataactttgtattcagagctcagctcaaacttcccctcatctgaggcatttcttgaccacaggatctaaagagagccccccatcactctgtcacattaccctatttttattttcttcataacacataacattatctgaaattatcttgcattgtttttactcatttattatcagtttccttccactagagaataaatttcctgggggaccctctctgtcttgttatctgctgtgctcccaacacctagaacaaagtgtggcagagtaggcactcaatatttgttgggtaaatgaagaaaagtctagtgaagaggcagaagcataaacaattacctatgaaacaatatactaagtgtcaaaggctttgggagctacattctaaattgtaccaaatagaaaattccatactgtatcactcccagacaggacaataaaatctcccacttttctgaaaacctgtaagttgtgagatttttttaggcaaggacgactacacatgaactggtattagatctctctagaccatttctcaggagtgcagagaagtgtttgtattttgttttcatgtgcgaaatcagctttaaagtagaggtttcttggaagtaggaaacttgaatggatggaaaatgcctttaataaccaaagttaccacagtttttaaggtatccccagtgctgatgtatctcaggatcaggatggatccgctagaattacacagagtaaagaggactctcggagcctactctaaggcaggcctctggggagaaaatgtaagttattttttttctccttatcatcaggacaaagcacaccatgagcaagtatgagactccaacaagtgtggatggaaattaatttgacaaatctgaaaccatctttgcaaaattatgactgagacagtgaaagagatctaacttaactgactccatctcgcttctaaccaggttgtccttgttcattcctgggcataggctgaactaactttgggagaaacttagtttatagtttgtggtttgtgacagataacagccctttcccggggctgacttccttgttgcctggagactagattgcctttgtaacactaacattagccataagattggaaattatggtttgggagtcatgcagctggaggctacaagattctgaccctccctagactgctcctaagatcagtgcttgagatatttggtgacccctgcacttgatggatcagctggtaccactcagattgatgaactggctcatctgatcttgcagcgccccccacccaggaactcagggcaagaagacagcttggactccttattatttcttccccgaccatcaggactcgtggctcactggcttccccaaccaagttgtccttaaaaactctgatccccgaatgcttggggagactgatttgagtaataataaaattccgttctcctgcacagctggctgtgtatgaattactctttctccattctaattgcccagtcttgatgaaccagctctgtctaggcagcgggcaaggtgaactccttgggaggttacaaaccctctttctatgactgtaagtcatcactgagtattccaaaagtaggtggagctgataaactgatagctcaggcctggcagctatagattattcttgtttcaaatgggtatcactgccatttgaataaactgtgaacaaggtatatctctttgactgaacatagaaatgagtggaatagctcataagttgttctgtccaatgacagccactagccacaagtggctacttagatttaaataaaagccaaataaaatttccttagtcacactgtaaccaagtatccccatttttctaagagatagtttaatgatttttaaaaaatctctcttcttttcccccttctcctcacttcctccttagctctttagaaatgcaattgtagccttttacctcctctttatcagacactccctatggggcaggttcatctaactatgtgcttagaagctccagagaggaactctcacccaccgggaggttgccttgagagacaacagcctatctacaacccaaagtatgcctgctacaaagctttctcttacctggagagttttggccacttttacaacccagtcctgcccacaaaaggcaccagcagtcactgtccagtagataaggcactgaaggtagtatgcagaccccccaaccactcgcttcctcccctcgtgccattcatgccagcattccatgccccatttcaaaagcaccctctttctgctccaaaagtgaaatggtacccttaaggcagaaaacctgtacttcctcccctaaggtagctttggaataaaatatcattttctttataccagatctcactcttgttaagtggactctgcaagcagcgagagagtgaacctgcatttgggttacaacactaactagtttaagtgctcaatagccacatatgtctagcagttactatactgggcagtgcagagacattatcacagaaaattctattgcacactgttgctcaggcactgatgatttcagccccatgttgtggtgagtgatctgctcttggaaaggacaatatagtggactcactttcgggtgccagcaagggggcaaaactgaggcttttttgagactcccaaacagctaggagggagggaaaccagacaaaggagctgaaaagttgttccacttcatcagaaactgaaaggatgaagggatatgggttcactgaagatatttactgctttactaggacttgatcagaaacttgatactttaaaaatttgactttgtgctgtttgcaacttgattctccttaaatttttatttctgaaaataataacctattttatctgttctattaggaaacaaggagagggggttttggtcacactggggccaaagtttagaaggtagagattatatatgcaatagcagttaacagaagcaaagaggggaatcttaaggcaaacgtgacaatgcaagggaaaggaaatggaaaagacattcttttccatgcggagatttcctttagaagagttattgtctactcaaactttggaggatttgtgtttcttttggtaaataatgtgatttctttttgtagaggatgtatgatgtaaaatcatggactttgcccttaagggaaccctcttgctcctccactcttccattgttttatgtaatgaaacccctaaagtatactctgacttcagtttcagcttataaattagatctgccctttaagagccatttgagttgcagtccctccagtgctatcttttgcatacccaaattattgggggcgctgtagtttggctaacttttaatcattcagagaactaggagaagcagacatggttaattactaggattaatgatagttaataagagcaaacatttactgaacatttactgtctgccaaacactatgctaacagcttaatgcttaacattatctcatttaatcctcacataatttcaatgagccaggtattgttatttctgttttatagaaaaggaaaatgagactgtcagactgagtaacttgttccagattagacaactagtaaacagcagaatcaaggttcaaacctaggactgtctgattctagagcttgcactcttatccactactctggacaagaattttaaactatattaatattctgatttaaactaattgaaatcaacactagtgttagcaatttcctattgacagatcagttaaaaatgtttcaatgattatagaatcataaaccgaatagagaagtaggccttttcttgctgttttaagtagttcagaaaagccctagtgtagtatattggtgtgactagcaggtctcagaaacaaatgcattcaataagtccatttggtgtttttcatctcttcttctctcctgtgagagttcctggggagatcttaatgatgatagttgacatggatcaaaggcagacaaaacataagggagaaaacactggaaggagcctggctgatggaacagaaactccctgaagaatccacacctgaatgattaaaaagcatcagcctagcctgtaaagtttgaagttgaatattcgtgaggaagctaccctcctacttgttgatgaggcagagagaaaggttcaacttgtcagagaaattgatgcttcctgccatattatattgaaataagaaccagcttgttatccactctttttttttctttctcagcaacataggtttaggctgaacttatgttcatatagctgcacaaatctccacgggtatgaatataaatctatctattcaaatagactctaaaggtttcttaggttatttctcttctttctagaacttaagtaaggctttgatcaccactgataatacatccgttagttaatgcgtgtagagtttccagtctaaaggcaaataaaaagtgaaaaggggccggcgcagtggctcactcctataatcccagcactttgggaggctgaagcaggcagatcacctgaggtcaggagttcaagatcagcttggccaacatggcgaaaccccgtttctactaaaaatacaaaaattagccgggcgtggtggcaggtgcctctaatcccagctactcgggaggctgaggcaggagaatggcttgaacccaggaggtggaggttgcagtgagccgagatcgcaccattcactgcactccagcctgggtgacaagagcaaaacttcatctcaaaaaaaaaaaaaaaaaaagtgaaaaggcaggaacgctgttgttcacctgctgttttaggaattttgctcacgtacagttcaaaatattaagaagctgaaaataaagtacctggtcatgtgtggaaaaacttacagctaaaaggtgagatgaactgggtctagaaggtcggattcacgtgaaattaaaagggcaacgaaagccagaacttaatttcttaaaaaaagttaaaacaggccgggtgcagtggctcatgcctgtaatcccagcactttgggaggccgaggctggcggatcacaaggtcaggagttcgggaccagcctggctaacaatggtgaaactccgtctctactgaaaatacaaaaattagccgggcgtggtggcgcgtgcctgtagtcccagctactagggaggcggaggttgcagtgggccgagatcgcgacactgcactccagcctggccgacagagcaaggctccgtctcaaaaaaaaaaaaaaaaaacagttaaaaccctcaaaataatcccacttgttaaaatacaaaacctgaaaccatttcagtttcttctgcaaaatgagttggagagagtagggttgaaccaggcatgctctttcgggcctttcgacgctgacatcccgggatattacaccaggttcaagataccagcttgcggaaagagagctgctaaacttgaccatatgctttttgcacgacattcgacagctgtccctcccttcaccagctcttttaaggctgcaaatatatctgattcacgtgagagtccctacaagttagtacaacgtcaggccccaaggaggcgcccaataaatgttggcattgcagggccagatcccgagttccagttcagaaccctgctgaggtcaggcttcctccctgcctcccgcccctcaccacacccactcactcccccaagtaattaagtctaaactggggcctgtgcagtgattggccgcgccgggtctcactgcggatgaacttgacttgttccaatgatctgtgacagacatctgcagacagcgcccttaacagaattagggtcaggctggtatcaaaccccaggaacgccaggcattgcctcaaagtagatgcaaaccgttaaatcttccaggactcagaaggaccagagagagccggatacctctggttagctacgcggtccccagtaaagcttattcccctcttcctcccagtgtgtcttgttgccagagcaactgtgggcgtcaccgagctgacgggcggaaacagaacagaaagagtacacgtccccagctcattgatagggccattgcgcagacgcattaacttttctgagttgtagttgagtctgttgatgcagtccgcgtctgcgcattagttgttacgcgccctggccggcctcagcgcctgcgcaaattggcacaccggggagggcggagttaggtcacgagggtgcgcatgcgcaaacagcacatccggtgtggtcgacgggtcctccaagagtttggggcgcggactggagtaccttgcgtgcagttatgtcggcgtcggtagtgtctgtcatttcgcggttcttagaagagtacttgagctccactccgcagcgtctgaagttgctggacgcgtacctgctgtatatactgctgaccggggcgctgcagttcggttactgtctcctcgtggggaccttccccttcaactcttttctctcgggcttcatctcttgtgtggggagtttcatcctagcgggtaatggttctataagtgatcataataataatgtgttactttggtgtgctgcttttgttttcatagtactctatatcagaccaccgccccttgaagttatgagaagagcctgcattgcccttttgttgtgaatggggaaattgaggctcagaaagcttagattatatgcctaataccaaacggctccgtaggagttggacttaaaagtctaaagaaaccaccttcgtgccgctactccacttggtgatccacttcacttaatattggtccggggaaaaccctattccaactttaacttaggtttaacacaactctaaaattagtagacttttcaaatgaaaaacccaaccttgaatcatctctgtcatcttggcctaatcattaccaatctccggtgaaacgtttcaatgaaagtgcaaagaatataaatactggtgcttttcttgttgaatcatcctttacttgattttgccttttagctgctactactttttttcttgttgaggaagctgttatttcactgtcctgaacccaatttttgttcacataactctattttagccttatttttccttttgattccaggatttggtaaccttgtagactgctatatttagcgagaacagtctccatcaatttttgttaaaatctgacttttcttgcccaacggggattcagtgaatactgaaaacaggcgtggcctctatcactggtatcacctgctactttgactttgaaaacatgccagcattcatggtttcttttcagtgtgatcatcagtcaggtcatcagttgtattttcagtccaatatgaggcattatggtaaaagctttggcacatgttctttatccgtaaagagtttatggtctagttggggtacagacaaaatacagcattggaattgtctggaggcctggcacagtggctcatgcctgtaatcccagtactttgggaggccgaggtaggcagatcacttgaggtcaggagttcaagaccagcctggccaacatggtgaaaccccatctctactgaaaatacataaattagccaggcatggtggcacacacctgtaatcccagctactcgggaggctgaggcagaatcgcttgaacccgggaggtggaggttgtagtgagccgagatcgtgccattgcacttcagcttgggtgagagtgaggctcagcctcaaaaaaaaaaaaaaaaagtctggtgacagtggtgctgtgcttaaagttacagacctatagaatgcttattgtacatttacattgttctgacacaccagagatatttcttagaatttaaaacaggtctgaggatctaatgacttgtgtactgaagttgcagattagccttttgattggatatttagttaccatctttgacttttgtcctagatgaccaagacctagttgtctgtggtggcgtccttgccttcaggatgtgttaaccatcatccgaccagatacactacccctttgctctaagtattctccaccacccacccaccgccctctgccacggtactatatgtttttattagccagcccggagaaggaaccttgatgagaacttttgatttaattttgtttgatgtttttgtttccaggtctggaagagtaggagcaaggcagggtctgaaagctgattttaaaaaagatgccttctccatgtagaagtcaccctgccttcataagcctctagggtctagaatgatttttcatggatgctttgaagaatgtggtttgctgaagagtgggcatggactagagttatagattatcagtgtaataaagccagaaggtttttttgagcaaatgactttcacttatgccaagacctgtttttgagcccgttgtggctgaaattgaattggcagactggactgcctttctcctctccagtgggaactaggtggcttgtcattgaagaaaaacctagtaaaagggcatattagtaatggggccaataagggggattaggatttccagatctgttagataacagataatagagctatagaaatgaaagcaacttcaagaaaagaagggattcatgataattcttagttgccacagaagggtatgatttacccttcttttgacagcattgactttcctaaatcctgcctcttctgccatttgttagcctagatcatcaactggagactggttttaatgggaaatttggacgcttatcctttgttttgattgttggcaaaggtagccttgttcctttttatggtgctggggtttctaactttcctgtggaatttcctgttgcaagagaatggaggagtccagtgagctgggagagggaaatgtaggcgatactgttgaaggattaggtagtgctgggtgctagatgtttgaatgccaggccaaggaatttggactttttttgagatggagttttgctcttttttctcaggctggagtgcaatggcgatctcggttcactgcaacctctgtctcccaggtttaagcaattctcctgcctcagcctccgaagtagctgggattacaggcatgtgccaccacgcccggcgaattttgtatttttagtggagacggagtttctccatgttggtcaggctggtctcaaactcctgacctcaggtgatccgcctgcctctgcctcccaaagtgctgggattacaggtgtgagtcactgtgcccggccaggaatttggactttatcctgtaggtaatagtaaagcttctgaagatgcttttttttttttttttgagacggagtctcgctctgtcccccaggctggagtgcgccatctcggctcactgcaagctccgcctcctgcgttcacgccattctcctgcctcagcctcctgagtagctgggactgcaggcgcctgccaccacgtccagctaagtttttgtatttttagtggagacagggtttcatcgtgttagccaggatggtcttgatctcctgacctcgtgattcgcccgcctcggcctcctaaagtgttgggattacaggcgtgagccaccacacccggcactgagggtgcttttttaaagaaaggaaaagatttaaaattggtgttagcatgtaggatgaattggagggaaatgttctttaatcttctctatttttttttggcagtctattctcttctattccctctgcatgtgttagtttagcatatgctctttggaaattgaccagtacattttaaaccaattcagaacgctaccaaacctttaaaaaacctgttgttattgggcctgatggtatgaaaatagtctgttttcttctattccctcatagctgagagacttaaccatggtttcaagaaggaaccagaggtagaaagttgtcattgagagatctttttttgtgtgtgttttggatcatcagagtataatatattggctttaaaaggacctcagaggtagaatatttttctatttgagacagatttcaaacatccagtagctgactgtttatcttgtagttagatatctctagaagaggacatctgtcccttttttagagttatattccagtgttggcaaccctttagtttccttttttgcccaactgaaagctgtgctcatttaaagtgctatttaggagggataagtagaaaacattaagactgtcctcaaaataagtctttggtcttgaaacaagttttaattcatttcccaactttcatctgttctgttctctaatctatatgaggtaattttgtcttaaaaaatagttttgtttttcctagtttacaaattcaaaaccagtttgaatctgtaaggcaaggaggcctagtccagagttttctgtctcacgggagctattaggctgttgtggactggggtccagcatttcttttggaattatccatcagatctgtggatcctaatattatctctcataactgttatccgagagattagaagtttgccacccatgtgcctgatagtcttgtttctaaatatctttcatatcattgctactttttcatcctctgttttagcctctcaatatctcttatgaagactactgtaatcctccttactggccttccggcctctggtttccagtccatcttctactgtgtttgcaggcttgatttgacttgcaaatctgattgtgtcactcccatgtacaatttgtgtttcccaaagtaaaattaaaactttttttttgacatacaggctctttcatgatctggcttcctcgctgtctgcagcttcatctcttgcctctgcctcctctatactctgctccaacagtattgagctacttgtcattctctgaacactctcatgtgtcaaactatttgcctttgcttgactgccttcaaaattccttcactttttagacttctcagctcaagtgcaatttccttttttttttgttactgtttttaaagagaacaaggtcttgctatgttgcccaggctggcctcaaactccttggctcaagcagtcctgcctcagcctcctgagtagctaggactataggcacacagcactatgcctggcttattgccctttggaacccttccctgactctccagcagattgaggtctttcctctgtattcctttttcaccttgtatgtgtgtgtgtgagagagatatggcattgtgctgtatttgggtgtctgccttctctctggaaggtgagcccttgagggcaggggctgtcttctcatctctccatcctcagtgctgaacactgtatatgttaaatggtgagcaggcctatagtcatgtcaggaatagtgagcaatgatgtgctaggttctctgccaaggtgctgggaattcaactgtgaagcacacagacgtggcttctactctcacagagtttgtaattagtgggaaatacagacaagtaaatatggatatggtgctgatggagaattattggtgagaatgggaacacaatgtgcatccaaccctgcctagtggtcctgcaataatatttctcttatacattcgccttcctaaagtaggcttcataaatcactctatttttcctcttttcctttattcttagttggtgatcttgcttttattttttcactaaaaaaaagaagtagataagaattccttcatcttttcaccactgaatcataacagatcacctacttttatacccatactctctgacttctcatggtggatgatgtgtctctttcctgtgaaagctctgcttgtgcagaggatccagtcttcccttgctcactcagggactccgcttctgcaattattcctctgttccgtgtcattaatttctgtttctctcctggatcattcccatcatacaaacatgttctaatattgtctatttaaaaaaaatccgtttgaccacagataatcttctagctaccatcccatttcctttccatcattacagaatttcttgaaagaataattaatgttcctacttcctcccttaactattcattccttaacccactcttggtattggtctgtcctcgctacttcactgaattacttcactgaaactactcttgccatgttgcaacgtttagcatttaatgtaggtattggcttctgtgtaaaaggaaagttttttcttgaatacaacactctcctgcttgttctgtctcacctcactgctttttcctttctgctgttttgtgctgggcgcttctctgactgagagcatggttgtagataccttcactttgtatttttttttaaatagataaacttaaataacacctgtatacctacaactactcctttatatttttagttttgaactgtcccccgaattccaaattagtaaatccagttgccaacttgatgtcttcacttgatgtctgatatgtaccttgaacttaacatgtccaagatcaaacctgctcatccagccatctgcctcttcaccagttagtacgtggtgtcaatgttggttgtggttttttttttttttttttttgagacatagtctcactctgtcacccaggctggagtgcagtggcacaatctcggctcactgcaacctccatctcccgggtttaagcaattctcctgcctcagcctcctgagtagctgggattacaggcacgctcccccatgcccggctaatttttgtatttttagtagagacgaggtttcgccatgttggccaggctggtcacgaactcctgacctcaggtgattcacccacctcggcctcccaaagtgctgggattacaggcgtgagccgccatgcccggccggttgtgtttttaaatgaagaaatttaagtttccggggtcccttgatttctcttatctcctgcatctgtttcatcagcaagctctgtcttctccaaaatatagcctgtatgtctttatttctgtccatttttactaccattcccctgagctctttgggtcctaagtaattcttctgcttctttttattttttatatttttgagacggagtctcgctctgttgcccaggctggagtgcagtggcgcgatttcggctcactgcaagctccgcctcccgggttcacgccattctcctgcctcagcctcccgagtagctgggactacaggcacccgccacaatgaccggctaattttttttttttttttgtattttttagtggagatgggtctcaccatgttagccaggatggtctcgatctcctgaccttgtgatccgcccgccttggcttcccaaagtgctgggattacaggtgtgagccactgcgcctggcctatttttatttttatttttatttttttgagacgcagtctcactgtgtcgccaggctggagtgcagtggcgcgatctcagctcactgcaacctccgcccttggagttcaagcgattcttctgcctcagcctccctagtagctgggattccaggagcctgccactgcacccggctaattttttgtattttatttttagtagagatggggtttcaccttcttgaccaggctggtcttgaattcctgaccttgtgatccacccacctcggcctcccaaagtgctgggattacaggcgtgagccactgcgcccggccttctgcctctttttaaccttgcgaaccattatactgttccaccgctcttataactgaatccatactgttttctgaggcttaccatgcccctcaggatttggcccttgtgtccttccccttgatcactatagtcttgttggtctgtccttgatttttttttttttttttttttttttttgagatggagttttgctcttgttgcccaggctggagtgcaatggcacgatctcggcttactgcaacttccgcctcccgggttcaagcggttcttctgcctcagcctcctgagtagctgggattgcaggcatgcaccaccaagcctggctaattttttgtatttttagtagagacggggtttctccatgttggtcaggctggtctcgaactcccgacctcaggttatccacccgcctcgacctcccaaagtgctgggattacgggtgtgagccaccatgcctggcgtctgtccttgtgtttataacatgtcaagattgttcttactgtctagaatgctctgcccccagatttttacatggttggttccttatctttcaaatattggtcttaaatagcaagctcttaaagagaccttctgttatgattgaatttaagaaaagcttcccagtcactctttattatcctgttttattttcttcatagtacatatctctacctagtagttcctggtttatttgttaacttattgattatatgtttctctccataggagtgtaagttccttgagagccagactgttttgttctgtgccatattcctagcacctgaaatgatgcttgtcatgtagtagatgtttagtaaatattttatggaataaatggacatttaaggggatagagtaaatcagaattgctaaaatggaacagactgcttgaagaggtagtaaatttccatctttggaagtgcccagggagagactgaaggatcattggtagtggagcattttgaacaggcttttttttttgccttttttgtttccaatgcatctgagagatgtgatatccttatcagtaacacaggctctggaaagttgataattctccatctggaggtggcttaccagattctgtaagtggtgagtatactttggaaagcttcccacgtgattagtacgcctccccaagcatggccaccccctaccacctcttgggcattgtatacatcaaatggggtgttggtgtttatgacctctgaggtcctttccaactttgtgggactctgattcatatgttttcattgaaataatctggttaccatgatcacaataataataacatcaatttattaccttatccaccttcatggataatttttctttttttccctcatatttcctcaaaactcaacaccgtgttctttactccaatgaccactattaatagttttctatttcttcagatttttttctagattctaactgaaatgacaagataattatgtatatcattatatgtaaataaaatattttactttttttttgagacggtcttgatttgtctcccaggccagagtgcggtggcatgactgtggctcactgcagcctgcaacctctacctcctgggctcaagcaatcttcccatctcagcctcccgagtagctggggccataggtgtgtgctaccacacctggctaattaaaacattttttttgtagagacagggtctccctatctttcccaggctggtctcaagctcttgggctcaagcgatcctcccaccttggtttcacaacatgctggggttacagttgtgagccaccatgccctggccaagtgaaattaggaatgggctgggtgtgggggctcatgtctgtaatccctacccttaggcaagcagaggcgggaggattgctgggcaacatagggagaccttgtctttaccaaaaacaaacaaaaaaattagctaggcatggtggtgcatgactgttgtctcagctactcagggggctgaggtgggaggattgtttgagcccaggaggtcgaggctgcagggagccatgattgcaccactgcactccagcctgggcgatggagtgagaccctgtctcaaaaaaaaaaaaaaaaaaaggattggctttttttcacttaataagtcttagatatgtttgctgtcaatgtacagagaatttaccttattcttttgaataattgcatgggatttcattgcatgtcagttgtatagtttaatccccttgatgtttagactgttttaatttttttttcaactttacaaacatactttcagaatgtctttgttctgtaagataaattcctttgtcaaaaggtaaaatcattttaaatattaatggatattgctagttgctctcccaagtggatgaatgaatctgtactttctacagcaggggtttacactggttacccttgcttcagtcattgtctttaatatttttaagggtctggatacctgaaaggatcaatggtgcttccatggtgtttacatgtttaagcataatgaaaactgttgccatggtgacaggctctggagaactagtctgatagttttctggcctttggattagatttgtttgttgctttttcttagttaatgatgggatgatgctagcctgaagcgagtttaggttttcttaagcaatgtaataatttatcacaggcataaagatacttcggaagagtgtattcctggaactgcctgtttttttttttttgtcaatggtgactgttagaatcttcaaggggatggagtgtggcagtggagagttctcatgaattatctctcttaggtcttctgccttttttgagacaaataagcagctgctagaacttcgagatcaaagatagtttatcgagaactgtgaggttctcaagaatgagcgtgctatctttataaactctgctacccattaaatgaatattctattagaaaataattcacatttttataactttttatcattcagcccggaccctttgttgttgcctcaagtgcatccccatctaggtataattagaaacctttaaatcagcagataagagagctttgtgggttttttggttatatatttttttctctgagaaagcctctaggtttcagtgtaactctgagaagtaatattttttttcctttaacagagtgcgaaatttaattgtacaacttgataaatttttaaatgtacctgtctaaccactatccagatcaagatgcaggacattaccagcaccatagatgcctccttgcatcttcccagttatcctctccctgtgaaagataaaaaccactatcttgccatagattggttttaccaagttttaagctttttgtacatggaatcatatagcatatacttttttgttttgttttgttttgagacggagtctctcttgcccaggctggagtgcagtggcgcaatctcggctcactgcaacctccacctcctgagtttaagcaaattctcctgcctcagcctcctgagtagctgggattacaggtgcgtgccaccatgcccagctaatttctgtagtttttattagagatggggtttccccatgttggccaggctggtcttgaactcctgaccttaggtgatccacccaccttggcctcccaaagtgcggggattacaggagtgagccaccgtgcctggcccttgttttattttttaatttttttttttttagatggagtttcgctcttgttgcccatgctagagtgcaatggcacgatcttggctcacctccacctccacctccaccaattctcctgcctcattgcctcagcctgccaagcaactgggatcacaggcatgcgccaccatgcccggctaattttgtatttttagtagacaaggggtttctccatgttggtcaggctggtcttgaactcccgacctcaggtgatccgcctgcctcggcctcccaaagtgctgggattacaggcgtgagccaccgtgcccggccttttttttgtttgtttttggtcaagataaaacatgacaaaatttaccattttaaccatttttaagtgtatagttctgtggcattaagtacatgtacattgttgtaaaatcatcatcactatccatatccagaacttttttgtcttccgcaactgaaattcagttcccattaaacagtaactcctcatcctcctctctgtcagtccctggcatctaccattccactttctgtttctaggagtttgactactcttgatgtcatataagtgaaaccacatggtatttgtccctttgtcatggcttatgtcacttaaaataatgtcctcaagattcagccatgttgtagcaggtatcagaatttccttccttttaaggctgagtattccattgtatgtatacatcacactttgcttatccgttcttctgctgacacttgggctgctctcaccttttggctattgtgactaatgctgctatgaacatgggtatgcaaatattgcttgagagcctggttccatcccccaccctcccaacctcccagatggagtttctctcttgtcacctaggctggagtgggacggagtgatgtcggctcactgcagcctccacctcctgggttcaagcgattcttctgcctcagcttccctagtagctgggattacaggcgcctaccaccacgcccagctaatttttgtatttttagtagagacggggtttcaccatgttggccaggctggtctcgaactcctgacctcgggtgatccgcctggttcagcctcccaaagtgctgggattgcaggtgtgaaccactgtgcctggccgagatcctgctttcacttcttttggatatgtacccagaagtggaattgctggattatatgatatggcaattctgtttttaatttttttgaggaaacgcagtactgtttttcacactggctaccctatttgattttcccacttgttagtgcacaagggtttcagtttctctgcattcttgccaactcttgtttttttgatactagacatcctaatagatgtgaggtgatatctcgttgtaattttgatttgtattgccctagtgattaatgatgttgagcatcttttcatatgcttgttggccattcctatatcttctttggggaaatgtctattcaagtcctttgcccattttaaaatctggttattattttgttgttaattgcattgtaggggtactttaatatattctgatattaaccctttatcagataagtgatttgcaaatatttttccccattccgtaggtgccttttcactgttgtgccctttattgtacctttatcacagaagttttaaactttgatatagtccaatttatctatttttactttgttgactgtacttttggtgtcatatccaataaatcattgctaaatccaatgccataaaacttttgctctgttttcttctaagagttttttagtttttggtctttatccatttcggatttaggtctttgatccgtttcgagttaatttttgtagtatatggtataaggtaagggtccagcttcattcttttgcctatggatatccagttttcccagcatcgttggttgagaagactgtttccccattgagtggttttgtcagtttggttgaaaatcatttgattttgtatacgagggtttttgtgtgtttcttaaaaaacaaagcaattaaattgattcattttttaactgtagtaaatgtatttttaaaataaacttataatggaaaacctgaatcattatccctaaatagaaggtcacactaaaaataccatggagctaggcagatgtgttcacccgtgcctgtggtcccagctgctcaggaggctgaggtgggaggatcgcttgggttccagtccggcctgggcagcaccaccagaccctgtctcctgccgagttctcagtggctctgtgtggctgcatcccagaatattcctcatctaattgagggggtacatttgttcccccagcatatacacttaggctctgccctgtggtctctgtgtgggagctgggcttttttgtctttggcttcctctgggtacctgccaggttccagctggtttggccagccagtgtgtattttttaagttttgtccgggcacggtggctcatgcctgtaatcccagcactttgggaagccgaggcaggtggatcacaaggtcaggagttcgagaccagcctggtcagcatggtgaaaccccgtctctactaaaaatacaaaaaattagccgggcatggtggcgcatgcctgtagtcccggctacttgggaggctgaggcaggagaattgcttgaacccagcaggtggagattgcagtgagccgagatcatgccactgcattccagcctgggtgacggagcgagactctgtccccgactccccaaaaaataaagtttttgattgtgttgcccaacttacttgtgcaattcatccatttttgtgtatagcagaagttctttttcattgcagtataatattctattgtttgtatatgctataatttatccattttactgttgatagacattagattgtttccagtttggggctatctgggtatcatttctgtgtatgccctttgatgtatatatgcattcatttctgttagagtagaattgttgggtcctcgggtatgtctgtgttcattagcatatttattttatacttctatataatcatttttttgtgttttgcttcttgtgcagtttgcctgagaatacagatcaacccacagaacaaagcggatttccaaggcatctccccagagcgagcctttgctgattttctctttgccagcaccatcctgcaccttgttgtcatgaactttgttggctgaatcattctcatttacttaattgaggagtaggagactaaaagaatgtaagtgatgatcatagtccttgtcctataatgttgattttaggaagagaaattggatgggactggttttgatcatggttggccaggctcccatactgctattgacatttgcagaattttccattggtctgcaaagtatgcattaatatcatcataattcatcagtgctactgctcttggtcattgccttgtctttctgttcttcaaatcattaaggtaatagaaaattaatgtttgtagctagtacaataatttctgtaccaataactccacgaaaataactcggagattttggaagagacataaatggtaggttttgcctttagatttgttagttaatttttttctgattttgatctcagatgacttttaatgctggaccattgttttcatagcacttaaatttgatagcatccagtgtatgttgaatgaatgactgtgggcatttgctaatatgtgccttaaagtagaaataaatggggaaattgggttaacttgggagaagactttaaaatataagatgggatgctgcttggttcatttgccattttcacttttttagcagtagagttctttctcccttctcccaaacaaactcttacaaaaagaatcttggtatataaagcagaagtagaattggagttttttttgatggacagaaattgaaaagccctctctgcttggccttcatcacatatggtacgccctcccctaaatcgctccctcccaagcagagttctaaagctttaataaatatatggctgttttccataccgtatgtcaacactgttactttatatatgagacaacagaggcctagaacaatccattggccttccctggccacatagttaagtgtttgcagtgaagtgccctagtctagcggtgttcttggccccgtactccttccggtatcccatgtagcttactgatgaatgcatgcaatctttgcctttgcattgcaaaatgtaatgttctgggtggtagagaaaagagaaccttaggagatctcatcctatttgggggaaggatatcctaggaccaacctcttcctgtcaccacttggaaagctgtcatttttatactaaccagcagaaatctagtataagagttagagcatctatgtgcaaagtggatgcaataatgtggaagtgactatacttccttttctgacatgaattagtcatttacttataatatgttacctaaatcctttcctttgatactgcctcaaaaacagttctgttagttcaggtaaggtatcattttggtagtggtaagttgacagtgaggtttatttcagtgaaaaactttttttttttcttttctgtttttttttttttttttttgagatggagtctcgctctgttacccaggctggagtgcagtggtgcgatctcggctcactgcagactccgcctcccgagttcatgccattctcctgcctcagcctcccgagtagctgggactacaggcgcccgccaccacgcccggctaattttttgtatttttagtagagacggagtttcaccgtgttaggatgatctcgatctcctgacctggtgatccgcccgccttggcctcccaacagtgaaaaacttttaagaaccactttgttctgttattttaatacaatttaactcattagacacctgattaagacttgagttatcctcttcctcccttcctccctccccttctatgtgccagccaatgtcttgttgttgggaatataaacaatattgttggctgggcgtggtggttcatgcctataatcccagcactttcggaaggcgaggtgggcgattgcttgagctcaagaatttgagaccagcatgggcaacatagcaagaccctatctcaattaaaaaaaaaaacccaaaagtgtggcttctgccttcaagacatgtacagtctagtaggggagaatacgtaaacataacagttaaaatacagcccatttagggcctcgctataggtttgaacaaagtgctgcaaaaatccagagaagagagcagctgtaccatctgggagcagggacagcagatgagttatctgagcaatggataacagctattgctagttaaaatgaactgttaccagtggataaccttgaatgcaggtagaaaactgacccaccaacattgaccttctcacgcttgcaaatatgagtaacccttgggcttcctgatagagccttctggaaaggtcatgtcttctgattgcttactctagatttctgaagttctttttttctagatgagtcatggtgtgtacttaggaaggggacacagcaaacatttcaaggatgttttctaggctcagggagataccaaatcatggaaaattatttcttagggctgtcatgattggaggaggactctactgcagagagcttagtatttcaaaattatgacaaaagcaaagacaaaaaagcagtctcagcagaaactgtgtactgcagaccatattaacaacctaggaccacctgctcagctgggaattatgggcccaaagcatagcaaaatcctcaatcccagattgcagtgttaaatctttctatggagagtatgttcatagaaaaatctttctctctgggggattgcccagattgtttttcatagagatccttcatttgaattatactatactgtcctgctctcagtttttaaaaatatacatttatttgctccttttatgtgcttctaactcagctatatgtgcactgtgccacagcactttaaaaatagttccaagtaaattctcaatatttataccagctcagaaggtagaacaaaacagattgaatgtctttatattttccaactaagttgagagtttgatattaaaaaaaaaattctgtaatatagctgatcttacatgaatttgggggtgacaaactctaacctactctgaaagaggcaggtcaaaagaaaatggcattgggttaaaaaaataaacaattcaaggggaagtaaggaagttaacagataatgagtgctcagtgtgtgctatgctttaagtacttcttgttctatatcattttattttcagaataatttcacgaggataggcttgctgttctcatttacagatgaggaactgaagttgagagagcctggctaggatggctgagcacggtggctgatgcctgtaatcccagcattttgggaggccgaggtgggtggatcacctgaggtcaggagttcgagaccagcctggccaacatggtgaaacctcgtctctactaaaaagacaaaaattagctgggcgtggtggccggtgcctgtaatcccagctactcgggaggctaaggcaggagaatcgtttgaacccatgaggcggaggttgcagtgagcccgaattgcaccattgcactccagcctggcaagagtaagactctgttttctaaaaaaaaaaaaaaaaaaaaaaaagagccccttgctagaaatcttacaactaatgtatctatccaggtgatcaagaaagactcaatattttttattttttagactatacaaatgaaaatacaaaagcaaaaattctcccagtgagcttctgacccccagaaatccatgcacacctgaaatgatcagtttttggtgtgtaggtggcggcatatttttgaatgaatccatgacagaaagaagctcagtggatttcagtatttaaaaatgtatatactttagttttttccatgtttgttcttctgtgtttctttgtgaaattctttttttttttttttttgagacagagtcttactgtcttacccaggctagagtgcagtggtgcagtcttggctcactgcaaccctgcctcccgggttcaagcaattcctgccgcagcctccccgagtagctgggactacaggcacttgcccggctagtttttgtatttttagtagagatggggtttcactctgttggctaggctggtgttgaactcctgtcctcgtgatccactcgccttggcctcccaaagtgctgggattacaggcgtgagccactgcacctggcctgtgaaactcttttttttaaaaaaaaaaaaaaatctcagtccatctcaggtgttctgaagggtaatgaggaaaagaaggacagaactgtattggatcacagtttgagaattaaagttcctgatgaattgggccctgggtcagaaggaagggtgaactgggcccaaagggacaaaaccttgcttgaaaatgtgctcagctcccagggagatagttgccaaatgcctgtgccttgttagcattgttttgtttttataatggagaccattctctcacaagtcttaaaaaattcagtgtttgatcctagctggaacaagggggctacagggttgggcagaacattttaaactctgactggcagcactgtttacaaacatgaaattatgttggcttttcgaattcagttaaagtatagtaatctagaaaattacctcgggaaggggaacttgatgttattctgtgggctttgctgccacctagtggatggtatgtttcatgtgttgagcggctactacaaaacatgaggagttgagtttgggggaagaagctactgatacctgtgttaaaaaacctagtttctttccagtcattggggggcagcagaggtccaggtgggtttagatgctgggttgggggttgctttacattctggccagaagtgggcaatgtcgagttaggaacaaaagggcatagaaccctaaagtggccctagattttgttgtgtgggggaagaccaagactgtgcacatagacccgcaggtttcccgtttgatttctttttttcacctccttagtttgagagcttctttttttggtttgttctacgtcttttattctcaatggtgacctcccacgcaataatctttaattttttgttggtggaggggcccatttagtttttatttcattttctctttgatatttccaccttatattgaattaggtcctgccgccaaataagctctctcagagggaactgtcctacatttgtaggaaatctgaggtagtcacatcataacttttttcaactcatttttctctgtttagaaggtgagattaattatatatttttttatgtgctggggtctcgctatgttgcccaagctaggaactccctggggtcaagtgatcctcctgcctgaggcttctgtgtagctggacctacaggtgtgtcacagtgcctggctctgagattagttctttacctttcattcttaaaactttgaatctacttattttatttgctaaaaagtgctaattgatgactttacttgtttattgaactctattttatatttggtgtatttaaggctaccaaagaaaaaagaatatcgaaatagatttatatttatgaatttcattgctgccctaacttactgccttattttctccatcctcccagcttggatgactcctattccaagtcattcccacccctcaggttgcataggagcccttagtctactgcattcctccagtgctgcacttatcacattgttatgaaactattcattcactttcttctctctcccactggactcaattgtgaacagtaacagtgtgtgtttgttgaatgagtgtatgaatgaataaaccttttttttttttttgagacggagtctcgctttgttgtccaggctgtagtgcagtggcatgatcttggctcactataacctccgcctcctgggtttaagcagttctcctgcctcagcctcttgagtagctgggactacaagtgtgtgctcccacgcctggctaatttttgtatttttaggagagacatggtttcaccatgttggccagtatggtctctatcttttgactttgtgatctgcctaccttagcctcccaaagtgctggaattacaggcatgagccactgtgcccggccaaataaacactttttaactgcaagaaaaagttatgttattaagttacttggatgctaaaacatggaaagtggtacgaaagaaaaaaagccaaggcaaagattcataggagaggctgtggggtggggaagagcatgagacaagaagtcagaggaggggctggtgcggtggcttaggcctgtaatcccagcacttggggaggccaaggtgggaggatcgcttgagcccaggagtttgagaccagcatgggtgatatagcaagaccttgtctctaccaaaaatcaaaagaattagaggggcgtggtggcgtgtgcctgtggtcccagctactcagaaggctgaggtggaaggattgcttgagcgtgggaggtcacggctgcagtgaactgtgatcatgccacttgcactccagcctgagtgacagagtgagaacctgtctcaaaaaaaaaaaaaaaaaaatcagaagacttgtattgtaggctttgctctgttaactagttgaatggacaaataaacttacctctgagcctcagtttctctgtctgtgttgtgagaggattggtctggatgttcatcaaagtctcttgccactgttaatgcctctcagcatgattcttgatggttcttttgtgtttgaggaggattgtactgtttttgtggatcctcatttgggctttgctttctgttttctccttaatcgttgctttttattcatattttcagattcccattatccatttataggaggcagaaagttaaatgattataacaagatgcacatatttgtatgaagccttttacaaaaagtaaacatttgtaaaatgtcttctagttcccacgttaacaggcttgtaggattcacatacattccacatatacttttacatacatcagctcatgtgatccttccttcctacccagtgatgtggagacagacaaatagtagtattcctattttacacttgaggtaattacaccttggtgaaactttagttgatgtatccaggccctggaactaataagtgactgagggggaactggataacagacatttggactctaaacctttatattccttcctgttatgtttaggactctcagatgatggctttatatatatgtcatgttagagggttttcattaaaaatattaaacttttctttttaagaaatttttatttattttaaattttcatcagagccatcagactggattcttttcttttttaaatgggaaaaatttggcagagattgataggaaaggatgaaggccggctatctcaaatgtttctgcatagttggccatacttaatatggtccaggagaaatggaggagaatgcaggtcaggagacctgactttggctagggagggtgatcctggaccagcactgtccaacagagctttttgcagtggggaaacattcagggtctgcaccgcccattatggtaaccactagccacatgtggttattgaacatttgaaatgtggctaacagactgaagaactgaatttttaatttaactttgactaagtttaaatagtcacctgtgtctagtggctgtggtgttggacagcacagctctggacagatttgtcaacactatcaggttacagttttctcatctctgtaatgaaaggattaaagaagctgatctctaaagctcctttcattttttagaaatacacagtctgtgccttctaaaactggtgattcaaattgagctgtaaacctagaatttctgcagaatggtctttgattcacattatttctaatttcagttttaattgggtgactagaatccaggatgagatgaatttgaaggaaaatcagtatttgaacatatctgcccagtgctagtgtctgaatagagatattgctggagaagaatacagattccaaatagaaatgaccctggctggcattatcttttctatctctacagcgtcatttttaacagttctttgtgttatgccttgctttctttttagatgattagaacaaactgattaaatggcactgtcttctgcccaggtgaaatagactgaagtcacgctaacttttctcagtaggtgtcttcattttgcatgtcttgatatcaggggaggagattttattagtcagtttcctgaaacctttatgccctggttaatagttgaaaccattcttcttagctgttgagtagtcaattgtgtgagctaatatttcaaagaatcctagaacctctgcttttagaatagtgtctggtaaatagatctgctttaaaagaggggaagcagatctttgtaaacagaattttctgaaaaccactatcaaagagacttactctcatgagtcaatttttgcctttcacgtggactggcctcagcatcttagatttaaatgttttaatataataaaatctttaaactttgattttgtactaaactaggatttcttttatatttctaaaagtgtcaaggctttgttcactgaaaatggcattatgatctagtcctctctcaccttggccattagaaatgtaatgtagccaggcatggtggcctgtgatcccagcactttgggaggctggggcgggtggatcacctgaggtcaggagttcgagaccagcctgaccaacatggtgaaaccccatctctactaaaaatgcaaaaattagctgggtgtggtggcacacgcctgtaatcccagctactcagcaggttgaagcagagaatcgcctgaacccgggaggcggaggttgcggtgacccgagatcacgccattgcactccagcctggacaacaagcacaaaactctgtcttgaaaaaaaaaaaagctgtaatgttatattggctgatagtctattgccagagagtttgctttaagaaatttgatggaatgaataggtgagtttgaataggtctgtttggttttgtttggcactgtgaacaccttttgcttcctgttattgctctttcttttatacatttcttataataccactgattcaggaatgttctgcaattatgtagcatttctgtaaataccagtgttagtgaaataaaagcattctggctgaaagtccaaaatctctcctttaagttctgatgccagaatctccaggttacttacttgacccaatataccaaataaggtagtgccctttttcctcctggggcagcccggttcttctgaaaggtagtatttcccagcctcttttgagtcatggtacacgtaggagattgcagtatttttatggcacactgggaaaatcagttgcttatagctggagacattggagcccctaaggctggaggtcactttccaaccagagctgtgctggagtccagtaggtgggaggctgtgctttgagggactaaaggaagcctgtatcttgtggtgagggttccacctcacaagttacagatctcagttccatttggctctagcagcaatgtggccacttctgttgcggttactctttcttcacctttttcttgccaaaaataaacttatctttaaatgaaaactaaattatttcttatattttggtcctttgttatagctgagattgggaatttttctttctttcttgaatccttacttccctaccctgcctccccaccaatggaaatctgtgcttcataagcattttagattccagaaagctctttaggttaaactacaaccctctcacctcaaagaatttgtgggccagggaagtcagtgacttatgtgaagtcttgcggctaattaatggtagagctggagttaggacacatgtctcacagttcctagttcgttttgctttgatgtgcttgaaattcagttttgacattaatttttctggatactactcccataaaatgttctttgaaaaatacttgcttctttctagtttttctcgcctggtttaaatattgtcctgagtgtgggaaccccataactgtcttgtgggttagaatttagatggaaggatttggggccctgtctctagtatcataagacatttaaccttgctgcttttttcttctaggttcactctttgaatttcctggataagagttctggagatggcagcttattggacacatggattttcttcagatttgcacttactgctagctctgctttttatgcaggagaaaagcccagagttcactgtgtgtcagaacaactttctaacaaacatttattaatccagcctctgcctttcattaaatgtaaccttttgccttccaaattaaagaactccatgccactcctccatatgcctctggctctgtttttattctttgctggtatcagaatcctttttttctcttcagtcctctgtgctgaactctttatgagttggtaacttacagctgtgaacctgcctccttgttttcattaagtatatttgaagttaatggcaaaaggcagtgctgacaaccctgggaaatggcagtcctttgtcttcttcctggagcaggtaatcctttactaatccttcgattgttacaggtgcttccactcttatgacagtgcattcctggaactgcatcattatgcactctgctagaaattgaactaagtatgtgctaccacatttacatctgtttcaacatgttttagtggtaaaagtgaaatatatttctcttaggcagtgtagacagagtgaaaaatgggggttatgtatgtgttgacttataagatacaatattttccaaagcaccttcacaaatattctctcattttattcttgcaattatcttaggggttcctgtcctcattagttaggtgaagaaattgaaactcagatttgtgacttgcttaagatcagagttcatgacaaagcttgggtggaatgtaggtctgctggctgaagtctgtcatgttcgcagccctgttttcatcttgggtgctgttgggttgctatatatggggcggaagctatgttgagaatgccactacttaaatttagccaactaccgagaatgatgagtttcaagcttctccaacttggctgcacgttagcatgacttgggtaatgtaaaaagaaaatcccaacgtccaggccacaacccacaccaattaagtaaaaatcgcttggggtggcttctgtagtttgtaaagctacccaggtgattccagagcacagcaaattggagaaacactgctctggattcttgctactcaaaatgtagtcattgactaccagtattggcatcgcctgggagcacaggcctcaccccaaacctacagaagcaacatcttcattttaacaaggtcctcaggtgatttatgtgcacaataagatttgagaatctctcatctacagcagtggttctcaaagtttggcatgtctcaagattacctaggaacttggtgaaaagcttgggcctgtatgtttcttattagctctctgcctaactgataacacactgagtcaggagtccgcaagcttttccttaaacaaatgggcatggctatattccactatcactttatttataaaaattggttgtggctatgtgggtcatggtttgccattcttaagtgatactagttcattgagattatgactgagcagtttaatctgcacttttttttttcttttttgtttttgtgagatggagttttgctctcgttacccaggctggagtgcaatggtgtgatctcggctcactgcaacctccgcctcctgggttcaagcaattctcccaccccagcctcccgagtagctgggattataggtgcacaccaacatgcccggctaatttttgtatttttagtagagacagggtttctccatgttggtcaggctggtctcaaactcctgacctcaggtgatctgcccgcctcagcctcccaaagtgctgggattataggcgtgagccactgtgcctggcctaatctgttttaaaacttatatacagatgtcacagaccctatcaggaggcttccggataatttttagtctagagaaattggaattttgaataagaaaagcatctggactttgagacacgggttgaaaactgggaataatagtaattttatgaaggaagacattgtaattgcagtctttaatacataggttttgtttaatttttcataatgatcttgagatacatgggacaggtattaaattcccatttaccaggtcagctattgtctcagaggttgtgatttacccaagccagttaccatcaacaggaaacattcttctttggtgtgtcttttcaatatttgcttcggggctaaaacctacagactgcttttggagtgttgggattagatttagttaaaggctcattataggtaactcttgtttttatgcttctgttgatttgctttatggttctcaatttgacatgtactgaagaattagctgtggacctgtgagtagccgctgcactccagcctgggcaacaatgtaagaccctgttcttaaaagaggccaggcatggtggttcatgcctgtaaatcccagcactttgggaggccgaggtgggtggatcacctgaggtcaggagaccagcctgaccaatatgatgaaaccctgtctctactaaaaatacaaaaattagccaggcgtggtggcatgagcctgtaatcccagctactcaggagtctgagacaggagaattgctagaacctggtaggcggaggttgcagtgagccgagattgtgccattgcactccaccctgggcaacagaagcgaaacttcatcacaaaaagaaaaaaaaaaaagacaacactgaaaaagcgccaggtgctcagtggcttacacctgtaatcccagaactttgggaggccaaggtggaagaatggcttgaacccaggagttcaagaccagcctgggcaacacagtgagtccctgtctctacaaaaattaaaaaaattagctgggcgtggcagtgcacctctgtagtcccagctactcgggaggctgagtttggagagtcacttgatcccaggaggtagagactgcatgattgcaccactgcgcttcagtctgggcaacagaacaagaccctgtcttgaacttaaagacacacccccaagccccattgcgtttctgattcttaggtgttttttcagctgaagtatgttgaaggagttgattttgagtactactgcatggagagtgaggtagaccctagcatttcctgctcccccttgctcaacacctctatggggtggtttatttttattttctgtgctcttttatggggccggaagccattcaccacaaacactgtggaaagtctattccctgccattctttgcagtggtgggaagcccagccctgagcacctcctgcccacacatttcctggcccctatcacatggaaaccatctctcttgttttcttctcttagcagcctataccttcggcctcttgtgatcacatcatttcatcttgggcttcaaaacacttttgttgtgatggctagaaaatacttggggaggtcacagaggcgtgctccctggtgttggaggttatagaggccagggagcttgtttgcaaacttagcgggagactctgctgctctcctatcttgttgggttgcagctcagctctgggcgtctgtaataaaagtttgtgtgtgaaatgacttaataactacggttaatttaaaagtttttaacaaatataaaaaatagatttctcctgtgggagaaaacactttctagaacaaggatcttagaggagagagtaggaaaaaagtgggaggaagcttatgaagaaggactaaacaaagtattttatttgcttacattgattttataggtaggtccaagttctgtcaatgggatttttaaaaagtattttcaaaccaccagagaggcagcctggtgttgcggaaaacactttgatctgaaagtgttgattcaaggacttgttctgccacttactgtctgttgaccttttgtcgctaaaatttagcaaataattacacacttaggctctgtgctaggtagtgcatggcattagaaaagataagacacagccctatcctgtccaggagtgagcgagcgtgggccacatgtctggcaaactgttaagcgccctcctgttacttgcgtttccctatcattgcatgaaggaggtgggtggcattcttatcttcctgatgaggaaatggagactcagcaagtgttaggcttgaatcttatttctgtctagctgaaagcgtttgggttacgctttgaatgagataagtcataaactcagcatggggataataatacttcatactgtggttatcccaacaaaacgttaagtgaaaatatctgaatgtaattgctctacaaatgtatcattcctttcagtgctcaccagaagctctgagggttccatgacatactgcttttctccctcagctgcacatccgtttcactgactttcagctaaagcactgtggtgaccaatggcaggcctggctcttcctgggagaagcggagagacctccctaggagccccgtttgagacctgctattcaggcctgttaaatcccagggataaacaactttgtttttaacttttaattgaaattttccctcatgcctgcgtatacatgcacgtcaagaggccagcaagctcccatatgtctaacagcttcaatgattgtcaacatttaaccccaatctagtgtcagggtataaataagagacatctgatggcagagctcattctttctgttattactccttcctttaaatttttgcttaccatgaattaagtgctacagaaatgatcagaacggacaaggcgcctcactttctgagccttaaattccattagggaagagagccaaattattacataaatgaaataattttgttgtgagtggagtgaaggaaagaaacagtaaacaatataatgtgacagtaaatggggctggggagggagctgcttagggtggttaggaaggacctctctgaccaggtgacctttaggctgagatctgacagctaagaaagagtcagcgaagggaccagccatggggagtgtgtctggatattagttatccccattggcatatgcttgagtagtggataagtattgccttgaggccacaaacatcaatttttttttttttagatggagtgttgctctgttgcccaggctggagtgcaatggcgcgatctcggctcactgcaatctccacttcctgggttcaagcaattctcctgcctcagcctccctagtagctgggattacaggcgcccgccaccatgcccggctaattttttgtatttttactagagatggggtttcaccatgtttgccaggctagtcttgaactcctgacctcaagtgatctgcccgccttggcttcccaaagtgctgggattacaggcgtgagccaccgtgcccgacaacatcaaatatttattgagggagtgcctcctaaaggtacagagctctgccttgccattctgatctcatcctgaagggggatcaaatccatgcaggcagagtcaggaagagggaagggccacggaggcaggaaacaagacacttagtcttagggggcctgggaatgccagtcaattcatgctccttcctctgatggctgaatctggaaccacttggtatttctgagtccacagagcttggtggaaagcctgggatccgagtctggtggggatcagggcctagttcaccgtgatcctgtgcaagccgctccatgtgccttctgatttgtaaaaggggagagaatactctgtctaccactggggtttatcattttgatcaaaagagttgatgtttgctttggtgttgtacagatgtaggatattgttaataaggagtccagataaggatgtcgttccacccatttcccttggtaaatcactggaataacttgggtcagcaaggataaggtggacaccttagaggttggtaaaaatagaatcttgcagcctccactggaaagaagtcccttttaaggtttacctactttcctcccatcaaggctggaagcatgaaatggagaccaggtgctccccattatgtaaaccatattccttcatctacctagactctcttaggtcctgccagccttgtcttcttacacttatatgatcttcctctaatattttccttttttgttgttgttgttgctaaatttcatgtgggtggttcggggaaagggtagacttgcactcctccccactaatcagtgggattttaggaaggctttgaaaatgggaaggatcctcccctcagatcctatcacctttggaatgggaacatgcccacatttccagagcgaacagacactggagtcctctcttctcaaaggtggcgaaccgtcctggagtgacgtggcgtgttctggcctgcgaggagatggctgcccgcagaacctgcccgctggagggcgctgcagaggtctggctccgtgctttcagatgtgttcggccaggggctccaggggctccttctgaaagcagagaagcccccagaggttgagaggggagataagacgtgagccttttcagctgtgatgtggtgaggagtcagggaggccgtgagcactgtggggccagaagtgttggcttctgtcagaaactcggcccagcctgaccgctgcctcctggccctgtcatttcccctccatcacgcgcttccttctggaagccggaagcaggaggtgggaagctgcggaggtagtgacaaaatcatggtgtaacaagaagctcctagggccgaagtgactggagaggtggccacatactatgagaaacaccagcgcaccggcagggcctggggagttctgagctctcccgggctgtgtgaagccgcagccagcccacttttttctcagtatggcagtgccatctgacctggcccagcccatcttgttcgggtcatggttcgtcttcctgggcattctgatgcattcccacttcatatttgcactgggatttcagtttactaagcattccacacccattactgctttcaatcccttcaacaacactgagaataggtgggcaggtatttttatctctatgtgaataataacacatggggactcagaaaaattaaaggccccaggagagaaggctagtgaggggcagtgacgcttagggacaaacaactggttctcctgcctcctgcctgaggactcctgcctgaggagaatatagtaacaaaagcctctgtcttgcaattgcagccattaacacatctctttcatacccactactcactggactgttaactccttgaagacagaaactctgtgtgtgtgtgtgtgtgtgtgtgtgtgtgtgtgtgtatttaatgggagcagtactttcttgaggcataattacatgaaaatacactaatgatgcatttgatatatatatagccatcacccaagataaagatatggaacatttccaccacccctgaaggtttcctcgtgccccttttcaatccatccttctaccccagaggcaaacagtgccctaatttctatcacctgtgatgcgttttgcctgttcttggacttcatctgtatggagtcatagtttgcacagagactgaatccccagagcacgacacagcctggcacatggcaggtatacaatgccaaagaaagcctggttcttaaactacctgtgagagagagttcgtcccaccgggaaactgaggcggtgggcggttagtgacctgccaaaggcacgagtgtatgatgtggtggatcccggactccagccagcctaattccgaacccaaggcctcctccgggcccccagccctccctgggcacttcctccggggctccgggtggagcgggtctgacgatcccggacgaacagcgccccctgctgccggcccaggccccaggccctcctctcctttcggggggatgtgacaggatgacacaggccttgcgcccagcgcagtgacgggcacagggcagggacttgtgggataaaagtcacctgcccttttattttcctcggaaaagagcttttcctaaactttgggggctttctatctccagaattaacagacaaagggagaagaggtctttttggtggagcgctgctgcccccatgcgggtggatggcgacactaccgaagagcaggcgatcaagcctggtatttttgggtttcaggttctgcggctccctgagacctgcagattcctggtctccgggtccctgggtcccggacgtgtccatcaaggcgtccattagggccatcacctaatggacaagcatcagggtaaggggggaggtgctattgggggggggtccctcagagaatcagccctagctctgtgtgggggcaaatacggcctccccacctccctccctcccaggagacactggcctgagcataagtctcgagggtctgccctgtactaagcaagcgcttaatcaggtgagatcaaggtctgatcttggctggtttggaggggcagcagaggtgcggtgagggaggcggctcagcggtggggccagcagcacctccccagcctgctgcgggcccggtgcaagtcaccgaggggccggcagcccctcccagcctggcatgttggccttgctgcacctgcggttggggggtggtgtaacggcccagcctgctcccctcggcacgtggcctggggcgatgctatctctaactcagtattttaaactcttctttccagaggatgtggcttctgcgggagagcttcaaagggtgccctacttgcccctcttggtaaccatgacgtcatggaaatgggaggggaccgccccagcccccaaacacctggagggaagtgggagactttttccacttcctgttctacttgtggctactgactcaatgtctgacctgtttattaattgcaaaatatagctctatgtgtgctacccagagaggcctcaggcctgtgtgtctctgtgtgaaaggaggcctgcactccccacccctcgccgcgttgcccaggtggccttgacacagacgcagggcgctggtggtcctgcagccttccggcagccagaatgacagcactgggtctccatgtgcttgctcccccagactcatcccagtcagaagctcgtcttcccacacatggctcacggaggtagatgggttttagagtaggactcatggagaaactgaggcgaacccacataaagtgactgttggctctggacctcagtgtggtcacacagtgaggtcagactcccaggtaccctgcgtgatttaccacagtccctgtcctccaggctttgttggatagatgtgtgcctgcctgggggctgccctgagcaaggggccaccactcaggctttccttgttctgaagttcttgacaagttactttagctcttggcaaaactgtgaagcattgactcacctgaccacttcctctactaatccccactttcctttctcctgtactccccactcctcacactcagctccccccacccagagcctaactgcaggagtcattcacttattcatttaacggcatctgttgtgtgccaggcactgttctagttcctggggacacattgatgacaagggacattcccatcccacagagcacacaggccaggggacttccacactaggatggtacctgataataaggtgctataggcctgtctgtatacgtgatcccaggggagttgaattttatgtttggacctaaaaaataagcaactccttaagactcagatggctgcccccagtgagggtagcagcagaggggttgctctgtcagagctgaagacctcaccaggatgctcctgaagcacgtgcttgcatagcctgccctttctcctgagtggctgtgactccagttgcactcagaggtcaagtcttcaagtgaagtttcagagagtcctctagaatcttagggctggggccacaagagctcatttagtccattcttctgcctttgggactggcctgtgcttaagtcttttgggagagtagggcatgtgtccagagaagtcccttctacaactggccttagtaacatgttccctgctgggatgtcggcctgaggttgggtccaggctggtagagctgcagctgcagctgcagcccaaggccttggctcgcagggtctgtgggtcttcatggccagtctcttcatgactgtgttttccaggtctcctcagctgcctattccctccaggctaagcaatgcccagttccgtatagctgggccctctgcactgaggggctttgctgtggtggcgttaggcccagtgctgacctggccggtgggcacaggagcccttctcctgagcctcctcacaa

SEQ ID NO: 1508 - DNA, 699 bp, Homo sapiens
catccggtgtggtcgacgggtcctccaagagtttggggcgcggaccggagtaccttgcgtgcagttatgtcggcgtcggtagtgtctgtcatttcgcggttcttagaagagtacttgagctccactccgcagcgtctgaagttgctggacgcgtacctgctgtatatactgctgaccggggcgctgcagttcggttactgtctcctcgtggggaccttccccttcaactcttttctctcgggcttcatctcttgtgtggggagtttcatcctagcggtttgcctgagaatacagatcaacccacagaacaaagcggatttccaaggcatctccccagagcgagcctttgctgattttctctttgccagcaccatcctgcaccttgttgtcatgaactttgttggctgaatcattctcatttacttaattgaggagtaggagactaaaagaatgttcactctttgaatttcctggataagagttctggagatggcagcttattggacacatggattttcttcagatttgacacttactgctagctctgctttttatgacaggagaaaagcccagagttcactgtgtgtcagaacaactttctaacaaacatttattaatccagcctctgcctttcattaaatgtaaccttttgctttccaaattaaagaactccatgccactcctcaaaaaaaaaaaaaa

SEQ ID NO: 1509 - DNA, 342 bp, Homo sapiens
atgtcggcgtcggtagtgtctgtcatttcgcggttcttagaagagtacttgagctccactccgcagcgtctgaagttgctggacgcgtacctgctgtatatactgctgaccggggcgctgcagttcggttactgtctcctcgtggggaccttccccttcaactcttttctctcgggcttcatctcttgtgtggggagtttcatcctagcggtttgcctgagaatacagatcaacccacagaacaaagcggatttccaaggcatctccccagagcgagcctttgctgattttctctttgccagcaccatcctgcaccttgttgtcatgaactttgttggctga

SEQ ID NO: 1510 - DNA, 29956 bp, Mus musculus
  misc_feature (1335)..(1858): n = a, g, c, or t.
  misc_feature (7091)..(7110): n = a, g, c, or t.
  misc_feature (20085)..(20586): n = a, g, c, or t.
  misc_feature (24372)..(24840): n = a, g, c, or t.
  misc_feature (29121)..(29589): n = a, g, c, or t.
tctatggcatagacagacacagtgaactgggtcattttggcatagacacagtgagctgggcctcagtcacacttagattgagtaagatttctccatctagaagctcccataatgcaaagtggacccagagttccccaaggcaggaaccactattaaggtgctgagcacaatatatcccttaccaatgacagttgtaaccaaccagaagcagttctgtgtttcagccagcccgtgtttgaaagagtaaagctgtcttttttttttggttttctgagacagggtttctctgtttagccctggctgtcctggaactcactttgtagaccaggctggccttaaactcagaaatccgcctgcctctgcctcccaagtgctgggataaaaggcgtgcgccaccacgccaggcgagtaaagctgtcttgtagctgagggtgtagcttggtggaagagtatgcacttattatgtgtgaggccttgggaatgggctagtgacctcagctgccggggagggtcagggacgaggctcccctgggcaactgagactctgcttcgaacaaacagaaaatggaagggttcgggatgtggagagtggtggcactaccctcctttaaccctgtacccaggcagcagggacagctggatttctgtgagtttgagggcagtatatggttgacttactaatctccaagccagaacacatggctaatttaccagctagcaagcctttcttatgcctgccagcctaacgttttggtatcatgatgaggtttatgtgggccgctcccttctcggaacacatgcaacttggagaatactcaaatcttgactactaaagaaaaagtcaggaaactgttgtgacacctagtagcttgtgcttcacaatgaccaagcacacgtgagtggtctgccacagactggccttcctatattccccatttgtttgtttgtatgtttgtttatttttttgacatctgagacagggtttctctgtgtagccctggctgtcctggaactcacttttgtcaacgaggctggccctgaactctgagatctgcctgcctctgcctccagagcactgggatcagaggtgtgtgccacctctgcctggcttgcctagattctatgtaaagcagtagtcgaaggcattcaggccggaatcccagtacacattccagacaaaagattcataaatctgcaggtttgctgctggcgcagaaaaagagctgatagccatgaagttggcaaccatggccaagtctacgagagtcggaactcagttagatgtgtttgacaattctggggtcaagccgggcgtggtggcgtacgcctttaatnnnnnnnnnnnnnnnnnnnnnnnnnnnnnnnnnnnnnnnnnnnnnnnnnnnnnnnnnnnnnnnnnnnnnnnnnnnnnnnnnnnnnnnnnnnnnnnnnnnnnnnnnnnnnnnnnnnnnnnnnnnnnnnnnnnnnnnnnnnnnnnnnnnnnnnnnnnnnnnnnnnnnnnnnnnnnnnnnnnnnnnnnnnnnnnnnnnnnnnnnnnnnnnnnnnnnnnnnnnnnnnnnnnnnnnnnnnnnnnnnnnnnnnnnnnnnnnnnnnnnnnnnnnnnnnnnnnnnnnnnnnnnnnnnnnnnnnnnnnnnnnnnnnnnnnnnnnnnnnnnnnnnnnnnnnnnnnnnnnnnnnnnnnnnnnnnnnnnnnnnnnnnnnnnnnnnnnnnnnnnnnnnnnnnnnnnnnnnnnnnnnnnnnnnnnnnnnnnnnnnnnnnnnnnnnnnnnnnnnnnnnnnnnnnnnnnnnnnnnnnnnnnnnnnnnnnnnnnnnnnnnnnnnnnnnnnnnnnnnnnnnnnnnnnnnnnnnnnnnnnnnncatacatgtgtaggggcatgcacacacacaatacatttttatttattgtgatcataatattttcattactattatttgagacaagctgttactatatagccctggctggcctggaactcagtatgtagactggctttgaacagaggtccacactggcttctgaatgctggaatgaaaggcctgggtgacaataagaactaaagttggggctcgggggacacacttgcttcagggtcttgtgacagcctgatttgttgtatgtcatatgccacatgagcaaggctactactatgtctgctggccaggtggcattgtactgaagaacaccaaccaatacctaggaaccaaactccagctctgactccactcttcaagttagaaacactggggtggggtagccctttgataatgggcaaacggtgcctagtggacaagacacggctttgagttggaccaagggcattgcaagtcctactgaaagatggattagaagccacaccactgtcattattgagcaagaggtggaaaaagaggaggttctttattcataccagagtctgtcacccgccattctaagagtcctgaggactgccttttttttcctttttccattacagacaatgagaaatttacagtgttttaatgttgatctctgcatttgttgttttttaatttttaaaattttttataagattagatgtgtctatgtaccatatgcattcaatccccatggaagccagagagggcattggatctcctgggcctggacctagagttacagatggttatgagccaccgtgtggatgctgggaatagaaccctggtcctcagagagagcagccagtgcttttgacaaatgactcatcaccccatcctgagctttgatctctttatgttgaacctgttcctaacctgtttcgaccacatctggctacttgacaacctttgttttaatcctcgaccagtgaggtgggactcatgttttgtgtaaaaagaagcaccttacaatttagagacaggcatggctttgcacaccacccatttgctcacacagggaatctagcaaacacatggttttgcatgatgtaagcaagatactgggttatgtactcagacttgcattctctggtcaggtgaatgtagatctaaatgcattccaagtagagagagaatttcttggtgaaaaggcctttgttgacggtacaatggtcaagtgtgtgtgcttgtgtgtgtgcgtgtgtgagtgtgtgtgtgtgtgtgtgtgcttatatgcgtgtgtgcgcgcgcgtgtgtgtgtgcgtgtgtgtgtgtgtgtgtgtgtacataagaggggagttattttgtgacagggtaacactatgtagctctgactggtttggaactctatctgtagcccaggatgttttagaactcacaaagaccctcccgcctctacccccacgagctggaattaattaaggtgtgtgtcaccacacctggcaacggtggtcatgtttcagatgaggaatcttcacttccagttctgtgtccctgtctagcttcctttgtgatttctcatgacccaactctttggtgtaaacagatgcatgcaggggtgaacagtagaagacaaggcacctatctgtaaaagatggatgctcctgctgtcttcttgtgtttcttgtgttggtttgtttgtttgttgcttgcttgcttgttttattttgttcttttttgagacaaggtctctgtatttgctcctggttgttctgtaacttgctgtgcagatacagctggcctcaaactcaggaagatctgtctctgtgtgctgggattaaggagatgggccatgacagccagctgtgatttgcttttgctcttgccagaacccagcagtgtgttgttgggaagatcaccggacctctctaatctcacagatcttcttattacttatctattggctggtgcatgcattttaaaaaactatgtgtgtgtgcgtgtgtgcatgtgtacatgagtctaggtgtctatcaaaggaggcagaagagggcataaaataccttagtggtagagttgggaggcaacttgttggaatctgggagctgaacttgggtgctctgcaaaagcagtatgagttcctagttgctgagccatctctccagccctctgtgtacgcgtctgttcgctgtgtacacatgtgtaagcagacgcttcggaatgtttatgggtgtggaggccagaggtcaggcgccatgggttttttctttccttttattgaaacaggatctcactgtgtagctctggctgtccaggaactcactgtaggagaccaggcagctggcctcaaattcacagagaaccatctgcctctgtctcctgagtgctggggttaaggacaggcgccaccacgcccagacaaagtgtcattctttttttttttttttaagatttatttatttattatatgtaagtacattgtagatgtcttcagacactccagaagagggagtcagatctcgttaccgatggttgtgagccaccatgtggttgctgggatttgaactccggaccttcggaagagcagtcgggtgctctaacccactgagccatctcaccagcccccaaagtgtcattcttagggaactgtccaccttgagtttcaaggcagggtacttcatctgttgctctgtggtaattttgtctggccggtgagcttccaaatgacaccatctcgccaggccttccacatggaaacacaggactcaggtccccttgctgtgctacaaacattttcctaactgagatgtcaccccagccactgtcttctctttaaaaatctgtgtgcgtgtgggtgtgcatatgtcatagtgtatgtgtggaggccagaggacaaatggtaggcattaggactctctcgataccatgtcccagagatcaaggtcagatcctcgattaggtggcaaggaagattacctcctgggccatctcactggctgacaaccccaccctcttccctttaacatggagtctcactctgcacttcaggctggcttaaaaatcactgctatcttccttcctcaacctcttgagtttaaaggtgtataccaacactcctgattgattgattgattgattgattgattgattgattgatttctttctctccttttttttttcttttaaagatttatctattatatctaagtacactgtagctgtcttcagacacaccaaaagaaggcatccaatctcattacaaatggttgtgagccaccatgtggttactgggaattgaactcaggacctctggaagatcagtcagtgctcttaaccactgagccatctttcgagtcccctggtttcttttctttttgttcttttgtttttttggtttttgagacagggtttctctgtgtagccctggctgtcctggaactcactctgtagaccaggctggccttgagctcagaaatccgccagcctctgcctcccgagtgctgggactaaaggcgtgcgccaccagacccggctctggtttcttttcctttggttttagatagcctctctatccaatgctgcctcagactacttgatgataagattacaatttttttttaaagatttaattttatttatatgagtacactgtcttcagacacactagaagagggcatcagagccaattacaggtggttgtgagccaccatgtggttgctggaaattgaactcaggacctctggaagaacaatcagtgctcttaaccacctcgagattacaaatttgtacccatcatgtcctgcgacacaattatcctacctacctatctacctacctacctatctatctatccatttatgtgtatgtacacctgtgcattgcatgcatacacaaggaaccccagcatgcatatggaagtcagaggacagtgttgtgaagattggttctctccttccaccatttgggcctcagggattgaactcaggccctctggtttggctgcaagcacctttacctgctgaaccattaagcaggccatatacatacacacacacacacacacacacatatatatatatatatatacatatacatacacacatatatatataatttaaagatttatttatttatttatttatttatttatttatttattatatgtaagtacactgtagctgtcttcagacacaccagaagagggcattggatctcactacagatggttgtgagccaccatgtggttgatgggaattgaactcaggacagcagtcagtgcttttaacctctgagccatctttccagccccagagtctctttatatagccctggctgtcctgaaactcactctgtggaccaggctggcctcaactcacagggacctacctgcttctgcctcttgagtgctcaaattaaagttgtgtgccaccatgcccagtctaggccccaatctgacagataccaggtactttatgaaaggctagactcagtccagaatatatttctttcctgaatgctctcttagctcaaaaccaacatcttctccagtctctgaagattccttctgctccgtcttctcgatttccttcaccgctgtataccatccgtagcatattattactattattattattattattattattactgatttttggcagcaagggttcctaaccaaggagccatctctccagcccctgaatcaccctccttaaccccaaacttatctctcggtttttcttttgttcctttgagacacactgcatatctcattggcctgaaactcaccatgtaaaccaagctaacatagacctagtagaaatctacctgcatctgcctcccaggactgagagctcaggctaaaggcataaatcatcacacccagtctctcttgctttttcccacagcttccaaaaatgtcagttctaaaacgtaccttactgctctaattacacagaccatcttctgtgggtacttcggttataggttaaccaacctgtgttttcctagggcccatgtaaatcacaaacaggatgctcactcactccccactcttcttctgggagttcctatcactgccagccgctttctggccataagataactgagctgataagacagcaattggagccctgacaagccggcttatggcctcgctgccatgggtggaagaaagagtgaatgtgtttgggtattcctttctttctttctttctttctttctttctttctttctttctttctttctttctttcttnnnnnnnnnnnnnnnnnnnnctctttctttctttcttttccttccttccttcctttcttcctttcttccttccttcctttctttctttctttctttctttctttctttctttctttctttctttctttctttctttctttctgttttttgagacagggtttctctgtgtagccctggctgtcctggaactcactctgtagaccaggctggcctcaaactcagaaatccccctgcctctgcctcccgagtgctgggatttgtgtactcgtttcttgagtctccccctccccacttcaagtttctgaggcaaggtctctttgtatcccaactaatcttgaagccctgatcctcctgcctccactccagtgctggaactacccacatgcagcacacatcaagcccaagtctattcagtgctggagatttgaagcttagtgtatttggcaaagcactatccactgagctacatccacaacccctctgaagaagtgtcttgatttggcttatttctccatggatgttgtattattcacccatatcggtacacattgtttaaagtccaatacccaagaggaaagcacactgaaagtcccgggacccgtgagatgctctgactagctcagattgtgagcctgaagagggttactctccagtcccattttctcacagtcccatgcaggggtgggtaaagttgcagggtactggtgggggcctttgcaaactctcgtaaactgagctaactaacgtatgtagggtggtgaaaaggagttgacaatctcagtgacaggtgacaagaaggtttggacaaaatcaggcacgctattgttatcttactgttttatgttttcaggggtttcgttcttgatccattgagtttctgagagaggatgtcatggaatccaggctggtctcgaactgatcttgaacttttgatccagcctctacctcccaagtgccaggaccacagacctagctggacgactatgtctagaatacagctaatatctgagcatagggccttcagattcttcagctgggtcttctgaattttgctaaccagatgtctcccctgctattacatccacttggacacagcataaattagcaagtcttgttttgttccactgcaaatgtgtggctcaaggcgggcctccccagggcttgctttgatcttctaaaatcgaaagtcaaagctcagtaggacactgtgcatccagctacctaagatgctgagcagaaagtctaattgaacacaagagtgctggaccagcctgggcaatacatggaaactctatctgaaaaataaacacataaacaaacaaacaaaaccagaggttagacctctgtaggtgggagaatctgtgcttagtctccaggacccagtgatgggtgttgcaggcgtctgagcaggtgacacacagtttcaattcttgtttgtttgtttgtttgtttgtttttcgagacagggtttctctgtgtagacttggctgtcttggaactcactttgtagaccaggctggcctcgaactcagaaatccgcctgcctctgcctcctgagtgttgggattaaaggcctgtgccaccacacccagcttcttcttttttttttttttaagatttatttttatttatttcatgtatgtgactacactgtagctgtcttcagacacaccagaagagggtctcagatcccattacagatggttgtgagtcaccatgtgattgctgggaattgaactcaagacctctggaagagcagtcagtgctctttttgtttgtttgtttgtttgtttgtttgggttttttttttgagacagggtttctctgtgtagccgtgtgtgtggggtagccctgtgtgtgagtgtgtgtgtgtgtgtttgtggtatgttgcaaaatagattaaacaactgagagatggaataggtcttcttgacatcaaaaacatgatcgtgaacccctttattaaatctaacactcagagacaggagcatctctgcaggtttgaggccagcctgctctacagaatgaatttcaggtctcaaggtcagcttggtctacaaagtgagtttcagatctcaaggccagccaagactatgcagtaagaccttagctaaaataaataaataaataaaataaaataaaagttaatcttcgcttggcaaaccgataattgaggaccagtgctcaggaaggaggcacacgggaattccagaggctacagagggagcctcgctctgacctggttagagcaactctactttactggctgtgtctatgaggttctgcttgatttcatttgacaaaaagtttccacagctaaaccaggcaagggagccgaagtagacacagccacccgggccgcgccaacaggtttctctctgctgctgagaagcaaaagcctgtttgaagaaactctctgaaggagactgtggttgagtggtgggggtaggggtgctggggttgggctgaggctgagggttgactctaaggagctggaacctctcagcttcggtggctaggcaggggagttgtaatgaagagggacaggtaccctccttggtggaggagggtggaatgaaactctcggtttcccccagaacttggcaaagtgtgtgtgatgtctcccaggtagtcccccaaaggaggaggctagcagagctggggaggcaggaagtgggtaactagactaacaaagatgcctgcctgtggcggtttgcccatcccaggtgggagggtgggactagccttgggcctgggcctcctgtgaacttggtgcttgagggctcagagggaacccagtcaggagcttgaatcccacgattcagcgcttctgtctgcggccaatgggggcctctgagctgacgatctcgggtactttttgtaacttccagaacagggctctaggatgtctgatgttggggcgagtggcttagggccagctccttcaggcctctctacattccttcagggatcatgggctgtgtctgcagctcaaaccctgaagatgactggatggagaacattgacgtgtgtgaaaactgccactatcccatagtcccgctggacagcaagatctcggtaagaggaagatgggattagtgaagggatgggggccaggagataggattggtggagggatgggggcggaggacataagattggtgaagggatggcatggggttgaaaggttgtgtatccaggagaaaaaacctaaatggaccataactaaaggctctggaaaatagcagcactcctatcttccctagcatacatcacagaagaggcccagctagaggaagggaccttcctaaggtcaaatgtacacatagttggtgaattcagagacaaggttcaaccaggctggagaaacggaaagaagaggagaggagagggagctagggtcagatcctgtcttttttctttgaccccagcctcatttcctaccccacagctgcccatccggaatggctctgaagtgcgggacccactggtcacctatgagggatctctcccaccagcatccccgctgcaaggtgacttcatccagcagcctgtgaaacatgatacggcctggggatgcttggttgttcgtgtccatactgtcttcatcttctctccaccttgtctgcatcctgtgtctctagaattccactgttcctgtcagccccaggctggcttttcttgactcttcttatctttacagacaacctggttatcgccctgcacagttatgagccctcccatgatggagacttgggctttgagaagggtgaacagctccgaatcctggagcagtaagtatacttctaacccaccttgcctgatgtggtgtgtgtgtgtgtttgtgtgtgtgtcctcagccctcctgcacccattacaggctctggcctcagctgaggggttttggaatgtgctagaaataagtctccagagtgtttgatccaggggagtaatgatctggtctaactggggactcaggggtttccagtggctatatacgccatgatgatggtctctgtggtgcaggagcggtgagtggtggaaggctcagtccctgacgactggccaagaaggcttcattcccttcaacttcgtggcgaaagcaaacagcctggagcctgaaccgtgagcaggagacctccgtgggaatggggttcacatccagggatctcagaacagggcgtggtccggggagtaggggatgtttgactgagatggaggaagaattggacaaaggtggcacaggcttttaaacctagcattcgggagggaggggcaggcagatctctgagttgaaggccagtctggtgtacagagggagttccaggacagctagggctgcaccaaaaaaaaaaaaaaaatcgatcaaaagtcgatggtcttgtatctgccttatatagttggttcttcaagaatctgagccgtaaggacgccgagcggcagcttttggcgcccgggaacacgcatggatccttcctgatccgggaaagcgaaagcactgcgggtgagagggcttggtgggcggagccccggtgtgggcgtggctgtgaggtgagggcgggcgcctccgggcgagaagggggcgggggcggggagctgtgggaaacgggggcggtgaccacctgatttatggaaggcaatccgccacattttctttttcctcttcaacttctcttctcttccctcctcccatctccaacctttcttcagggtccttttccctgtcggtcagagacttcgaccagaaccagggagaagtggtgaaacattacaagatccgtaacctagacaacggtggcttctacatctcccctcgtatcacttttcccggattgcacgatctagtccgccattacaccagtgagctccggcggaatgcgttcacctgtgcccatcctagcagcctctctctctctcccgcacccagtccttcttagggaccctccaaacgtctttcattccccttcagtggatgaggggtatagaacctgaccctagaccctgccggctaatgttgaatgacccacgttttccctcccataccagtcggtttcccctgcgaggaaagtggaaagagggtaggggctggagggagcatccaaggtctctagtgaccgcattaaccttctcttttgtctatgcagacgcctctgatgggctgtgcacaaagttgagccgtccttgccagacccagaagccccagaaaccatggtgggaggacgaatgggaagttcccagggaaacactgaagttggtggagcggctgggagctggccagttcggggaagtgtggatgggtgagtgtgaccctcgggactgattggaaagaggagagagaatgtgagcttcctctcacactggcctattcaggatggctgcctagttcgtcaggatcttgacctctgtaacttctccacccgtaccccatcagggtactacaacggacacacgaaggtggcggtgaagagtctgaaacaagggagcatgtcccccgacgccttcctggctgaggctaacctcatgaagcagctgcagcacccgcggctagtccggctttatgcagtggtcacccaggaacccatctacatcatcacggaatacatggagaacggtgggtgccctgctatgtccagccgcttgagggcgctattgtggtcccactaccttttggacccagggaaggaaggcgcttttacctctgatcttctaaagactcttttctgggtccctaagctttggaagaacgttccatctgatagtccctgatcttcagtttctgttcctttcttccaatgcccacctgggtttcagaatgcttgacctaagaaatggtgtatggtgcctgaagagaccagaaaggagtgtgggataccctggagttacagacaattgtgagctactggggatcaaacgcgggtcctctggaagagcagccagtgctctcaaacgctgagctacctttctagcccaaatatgtagtatgtttgttaaggatccaagagtctgactgcctggatagagttgaggctttataattgtatggctttgggctgatcccatcacggctttctgctccaaatagaactattttaatctgtaaaatagcgggtttagggccagcaagatggctcagcaggtaaaggtgcttgctgacaagcctgatgagcaggagttcaatgcctggaatccacaggagagagggaaagagctggctcttaccagagttgtcctctggtctccatacctgtgtaatggctcatgcatgtgccgcctcctatgaataaatacatgtaattaaagcatagctgcactagtggaagaactgcatctctacatagttgctatggggatggaagagcagttcctgtccagccttgcttttatgtggtttcgattgtttggagtgcaaatcttccaggaagggaaacaaaccattcattggctaatgattcctggaaatggcaaataggctttctttttggtagtttctttttttctttcttttttttttttttttttttttttttttttttggtttggtttttttttttttgagacagggtttctctgtgtagccctggctgtcctggaactcactttgtagaccaggctggcctcgaactcagaaatccgcctgcctctgcctcccaagtgctgggattaaaggcgtgcgccaccacgcccggctctttttttctttttgagacagggtttcttcgtgtagccctggctgtcctggaactcactctgtagaccaggctggccctgaagtcagaaatccacccacctctgcctcctcagtgctaggatcagaggtgtttgccagaaacctgattttgataatggacactgagaaaagcagtttgtgacctagggatgttcccaaataccccaggaatgtagacagtgaagatattttcctttctctttctttctttctttctttctttctttctttctttctttctttccgtctttcttctttttttttttgttttttttttgttttttgagacagggtttctctgtatagccctggttgtcctggaactcactttgtagaccaggctggcctcgaactcagaaatcagcccgcctctgcctcccaagtgctgggattaaaggcgtgcgccaccacgtctttctttctttttttggctcggcttttcaagacagggtttctctgtgtcctctgcctccctagcacagggattaaaggcatgtgccaccaccaccaggcattttttttttaacacaaggtttctctgtatagtcttctctgctctagaactcactcagtagaccaggctgtctttgaactcacagagatccctccatctctgcctcccacctccccagggattaaagctgtgcatcaccactccctggcctctttttgttgttattgtttttttgtgggattttttttttggggggggggatagggtttctctgtgtagccctgactctcctggtcccgaactccaagatctgcctgcctctgcctccgaagtgctgggattaaaattgtgtgtcacagttgctctgctaattagctgaaggaattcatgacagctggtaggaacagtgtagaagagtggtccagctgggcaggaaaaggaaaggagaaacttctagaagacaagaaatgaagcaaagagactttgaaggaagagtctagctatctgtgtggagaatccaacaataatctgtgatagagaaagtcaggtctctgggaagaagacacaggcatgaagcatgtcagcttggctgctgtggagatggggctctgtcttaactggaggcaagaagcctctggatcctctgctcatatcccaacctagccctctggaaaaggccatcccatatgctgagcatcccctccttgtgcacagcatcccccttgtgcacagcaccccccttatgcacagcatccccctcttttgcacagcatacccccttgtacacagcatcccccttgtgcacagcaccccccttatgcacagcatccccttatgcacagcatccccctcttgtacacagcatctcccttatgcacagcatcccccttatgcacagcatccccctcttgtacacagcatctcccttatgcacagcattcccctcttgtacacagcatctcccttatgcacagcatccccctcttatgcacagcatccccctcttgtgcacagtatccccccttgtacacagcatcacctccttgtgcacagcatccccctttgtgcacagcatccctccttgtgcacagcatccccctcttgtgcacagcatacccccttgtgcacagcatacccccttgtgcacagcatccctccttgtgcacagcatccctccttgtgcacagcatctcccttatgcacagcatccctccttgtgcacagcatccccctcttgtgcacagcatcccccttgtgcacagcatctcccttatgcacagcatccccccttgtgaacagcatccctccttgtgcacagtatccctccttgtgcacagcatctcccttatgcacagcatccccccttgtgcacagcatccctccttgtgcacagcatccccccttgtgcacagcatccccctcttgtgcacagtatccccccttgtgcacagcatctcccccttgtgcacagcatccccccttgtgcacagcatccctccttgtgcacagcatccccccttgtgcacagcatctccccttgtgcacagcatccctccttgtgcacagcatccccctcttgtgcacagcattccccctgtgcacagcatccccctcttgtgcacagcatcccccctgtgcacagcatccccctcttgtgcacagcatcccccccccttgtgcacagcatccccaccttgcacaagcattctcttcccttgctcacatcatcccccccttctacccccaagcacacactttttctcagtcctcattcttccttgccacggtcaggcactgcttccagatcctaggtggatctaggtggatcctaggtggatctaggtggatcctaggtggacctaggtggatctaggtggatcctaggtggatctggaagggtctacgggcttcgtcctgggcaatttaagtcaacaactcttgcttttgctcacagggagcctagtagattttctcaagactccctcgggcatcaagttgaatgtcaacaaacttttggacatggcagcccaggtaaggagccgggcaaagggctgggtatggctacagatcagtggggtaaggactggtgacctattcctggcctgcagattgcagagggcatggcgttcatcgaagaacagaattacatacatcgggacctgcgcgccgccaacatcctggtgtctgacacgctgagctgcaagattgcagactttggcctggcgcgcctcattgaggacaatgagtacacggcccgggagggtaggtgtgggatagagaggaggttcatggccagcaggagagcaagcacacacagggggactaactttgcttctctctaggggccaaatttcccattaagtggacagcaccagaagccattaactatgggaccttcaccatcaagtcagacgtgtggtccttcgggatcttgcttacagagattgtcacccacggtcgaatcccttacccaggtgagctttccttaagacaagcaactctaagtcttcaaggaaggggagccaagccataccttcctgctcacctctacccaggctcagactctgaaactctgagttgcttctctcccatccacttgggcctgtgactccgaaatcttctgttagatgcttcattccatctctgcctctgagtccccacacttctcaaaaactccagttcttccttgcttggttatggcagaggccacctagtatgtcagaggtggacaggaggtaaaaccttcctctttctttctctctctctctctctctctttgtgtgtgtgtgtgtgtgtgtgtgtgtgtgtgtgtgtgtgtgtgtgtgtgtgtgtgtttgaggcaaggtttctctgtttggccctggctgtccaggaactcaccatgtaaaccaggctggcctcaaaactcagacatccatttgtctctgtctccaaaatgctgggattaaaagtgtgccaccactgcctgacctccagtttcttaataggagatcagaatagtgcttaggccacactaagccattactagtcattactctgggtacgttatgttgccctctgagcctcagtttccccatacatagaacaagagactttgtgaaacacttgcatgggagctgcttagtaagcactggtgctttcctactgagatgtcacagctaaagagagaaaccatgtagatccctccttctaggaaaggcccttatcacgattttattgaatgtttgttttttagccattaggtttttttttttttttttttttttttgggagacaatgtcttacatagcctaagctgacctctaacactctatgaatctgaagatgtcccctgagctcccagtattcctgcttctgcctcactgggaggtgcttgtattacagcaagcatgtgcctatgtacctggggatcaaacccaggtcctgtgcacgcaaggtaagtgcgctgcccctgagccatgcttctaagcctgggggtgggatttttctagaaggaatttgataacctctgtggaaagaaaatgccacagaaaagagtaggaggttatagagttcagaggtcagattggcagaaacttcccacaggcccagggcaacaggcattgaaatttgatcccaggaatgtaaaggcactttgaatctcacagttagaggctagaagagttcccagctctgggcttgttctatctcacagcccagtattcatctcctgtgcctaggcccaaaagctagaaatacctcaacactgccctggctgtgggcttttatcccatcctgagccctgactaccccatctttgccatcaaatacgaacaaccccaggtacaccttataaaagaacacccctagtcaggtacctcttatatacactgattccttcagtcctcgttaaaactcggtgattcactctatgccagaagaggaagccgaggaggtggcccagtcaaggtcctgcggctggcatgtatgctattgagtgtgtgtaggcactataggtgtgggcctgacattcattcagcaggaaatgctagcgtgccttaccttaatgaagactagcatcaggttggattggtagttccatattctgaaccttacctgtgttggtcagcattccattactgaaaacaaaatcaaccaaagactcccaagacactctcaggtgacccaagcttgggtgacttgctgaggaagcctgatgaaccaagttcaatccccggtattcctggaaaggtagaagaagagaacctgcattcattcattcattcattcattcatatttttgattttttggggacagggtttctctgtatagtccttggctctcttggaactcactttgtagaccaggatgtccttgaactcccagagatctgattgcctctgcctcctgagtattgagattaaaggcatggtggcctgactgagatcccatacttaaaaattgttgtctgagggggatggggagactggagagatggcttagtagctacgagcactggctgctcttccagaggacctgggttcagatctcaacacccataaagcagattacagctgtctgtaattccagttccagagaatttagtgccctcttctggcctccttgagcactgcacacatgcgatatgtgtacatggaaaacacacttatagaaataaaattttaagctgaagatggtggcacacacctttaatcccagaaacacatgaatctctgagtttgaggccagcttgatttacagagttccaggacagccaggggtacacagagaaaccctgtcttgaaaaacaaaaaaaagaaagaaagaaagagagaaagaagatagatggatggatggatggatggatggatggatggatggatagatacatagatagatagatagatagatagatagatagatagatagatagatagatagatagataaaataagtaggaaagaaagagaactggagtcagtttagcatcagccttgcttttgagtttccaaagattaaagtcttgatgttttttcctccatcaacgttccaggaatgaccaaccctgaagtcattcagaacctggagagaggctaccgcatggtgagacctgacaactgtccggaagagctgtaccacctcatgatgctgtgctggaaggagcgcccagaggaccggcccacgtttgactaccttcggagtgttctggatgacttcttcacagccacagagggccagtaccagccccagccttgataggcctttcggtcccaagatcctcccaaccactgtgccctggctagggcagatggaattcctgtgccatatctgtgtggcctgtgcacacatggactctgactctgtacatgaaacctgtgcgtgtgtcacacataatgcagtttctgtcttgtacacacatctgtagttatgtgggttctacacatgtgtcttatacctgtggagcacgtgagtctaagccttggatacctcctaagatgtctcttcctataccgttccatttcctgaagccatagagaggagaaggcctgcgattgatgcgtgtctctgtctaccactgcctttcagagggtctccaggaaggccctccttgtgggctgccatccaatcttatgtctctgtgtgttctgtcctggtgcctagcacacaccaggagctcaataaaagtctgttgaattaaggttgtacatttttctactgcatactttatttctttatggcaaatagtgtgggggggggggggtcagatgatggagactggggttgctgttggatcgcccacactagattctcctgccctgagttgccactatcannnnnnnnnnnnnnnnnnnnnnnnnnnnnnnnnnnnnnnnnnnnnnnnnnnnnnnnnnnnnnnnnnnnnnnnnnnnnnnnnnnnnnnnnnnnnnnnnnnnnnnnnnnnnnnnnnnnnnnnnnnnnnnnnnnnnnnnnnnnnnnnnnnnnnnnnnnnnnnnnnnnnnnnnnnnnnnnnnnnnnnnnnnnnnnnnnnnnnnnnnnnnnnnnnnnnnnnnnnnnnnnnnnnnnnnnnnnnnnnnnnnnnnnnnnnnnnnnnnnnnnnnnnnnnnnnnnnnnnnnnnnnnnnnnnnnnnnnnnnnnnnnnnnnnnnnnnnnnnnnnnnnnnnnnnnnnnnnnnnnnnnnnnnnnnnnnnnnnnnnnnnnnnnnnnnnnnnnnnnnnnnnnnnnnnnnnnnnnnnnnnnnnnnnnnnnnnnnnnnnnnnnnnnnnnnnnnnnnnnnnnnnnnnnnnnnnnnnnnnnnnnnnnnnnnnnnnnnnnnnnnnnnnnnnnnnnnnnnnnnnggcatggggagccgttggcttactagacaaagtattatcagctaacctttaagctgattggttctgagtaaggtaaggggtggagtggggggatgggtggtgaacaggggaacttccagatcattgagataactgagaatgagtgttgtaaccaaaactttttagcttattagtagcattcctcagtgccagccacaaaaataaataaataaataaataaataaatctaccaggcagtggtgggacacacctttaattccagcacaggaggcagaggcaggtggatctctaagtttgaggccatcctggtatatagggtaagttttaggacagccgggattacatagagaaaccttgtctcatacaccaagggagaaaaaaaaaacatacagaaaaatggtttgtggagcagggtgtggtggtgcacgcctttaatcccagcacttgggaggcagaggcagacgcagacagatttctgagttcgaggccagcctggtctacaaattaagttccaggatagccagggctatacagagaaaccctgtctcgaaaaaccaaaaaaaaaaaaaagaaaaaaaagaaatggtttgtgtggtcacacaaagacagcacttgagataaggtcaactctctttgtagatttatttttatatttgtaaatgttttgcctgcaagtctgtatgtgagtaccatgtgtgtatctagtgcccttggaagcagatgttggaaatgaagttagggataattgtgtgccaccatggggtgctgggaacagtcttctgtgcgagcagcaagtgctcctaacagctgagacatcagtctaaactaccatgtctactactaaagtgtgtgtgtgtgtgaagatcatatatatgctctaaaaggttagatcacagctgctgccctgtagaacagatgagtcacagcttgtgtcctatctagaactttctctcagatgctcctagcatattgtacgatggtacaacaggatttatttcctagcttatggctttatagccaatctagcactgctactggcccaagctcagagatcccctcctatctaaagccagacatctcttacctttaaagtaagtgcaaggactgttctttgttctgttgacttctgcctgatctcttatcctaatgtcccagagctaggaaggcccagcactcctaaaggacatttcacccgaaaaacaaacaaataaagagagaaaccctgagttggggtgagagtcgggataaatgaaagtctgacctttttacaaaagtgtgtatatatgtgtgtgtgtttgtgtgtgtgcgcgtgctcagacgtgcatgtcatggtggagtcttggtgtaaaactgcatatccccagagtcagaggacaacgttagagagtcagtcctgtctttctaccttgtgggtcttgagcagcaaactcgtatcctcaaatttaagacaagaacctttaccaacgaagcctgtttcactggctcaggccagcattctttttttttttttttttttgagacagggtttctctgtgtagccctggctgtcctggaactcactttgtagaccaggctggcctcgaactcagaaatccacctgcttctgcctcccgagtgcccaggccagcattctttacccctctgatccaacttcacttcacctaaacagtaagtgtgaatgagttacctcccttttatacacggccatcagtttttttctctttctttttctttttctttttctctttctttttcttcttttctttctttctttcttttttttttttttttttttttttttttggtttttcaagacagggtttctctgtatagctttggctgtcctggaactcactttctagaccttgaactggctggccttgaactcagaaatccatctgcctctgcctcccaagtgctgggattaaaggcgtgcaccaccacacccggcttcagggcctcttgaagaacagtcagtgctcctaaccgctgaaccatctccccagccccagtggtagagatttttgtgctaaggttggagaaccttaaccttggataaagccttatgtatgcttagccaacgctccaccagttttgacattagggacacctccagtccaagaaggcttcgtttgtttgctcttgctttgtggcctggctcccctgaactcctgacttgcctatatttgggtcctgagcgccaggattacagacatgcccaacagggttcagtattttcacctgcattttaaaaataagtgaattcacttagctaatttctaaaactgggaagattttatatgtaaaactctagatctgggctgtctcttcaacaatgagaggtttggtttcctgggtttgtctgtcctagtggagcaagtactggccatccagtttagttgggacatgagttttccatccctgccagggtcccttccacccactactatcctaagccaagtgttaatagctatttatcaccaaaattggtgctgctgttctcgggataaagaggaaagtaaagaaagaaatttttaaaaaaatcaaaaattaggggctggtgagatggctcagtggttaagagcaccgactgttcttccgaaggtcctgagttcaaatcccagcaaccacatggtggctcacaaccatctgtaacaagatctgacgccctcttctggagtgtctgaagacagctacagtgtattcacatataataaaataaataaatcttaaaaaaaaaaatcaaaaattaaaaaaaagtctgagtttaaaaagttaaactcagagatggcagtatgtttgatcaaaaaagcaagaggtcatatattcctttaaggaagttaaaagctccaagctttaaaatgagcaaacaaacaatatctgagtcataagaatataaactcattcatttataccatgtgcttggcctatgcgggcatgtgaggttgtaacccttgctctacatcttataatccttcaatacccatgattctgtcccgtagtgggtactgtggacagccatggagcggggaaactttggagtcctcttctgtctacactgcaaagatgggaaaggaggcctagaaatgatgaggagacccacctaaagccagaagagtagcaggggtgtagaaatggaagtctgtgtcctggccctctgtcatcacacagcctccctgtctctaaaggccctgtgcaattcccaagggagtgacgctgagcatacaagggctgggggttgtggtgcaagcctcaatcccagcttttcagaacagggcttcattgtgtagctctggctgtcttggaactcactatgtagactagggtggcttccattcacagagatctacagtccagtgctggtattaaactcgtgtgctactatgtccaactgttgtaggaaacaaacaaacaaacaaaaaaaccccaaaaaccaaaaaactcagcacagagccttttggtggatcaataatggctacttgaagattgacggattcaggttttgtaggagcatgggagatggtggttttctgccatttagacactcccagacatttgtcaacctgtaaggacaattttgggtgtcacagtaagggcgtgtgtggggtgttgctactggtatagaagaaggccaagcagtcaattaacatctaaaaggcccgaagacagcccctacaacaaagagtgtaagtaattcaaggttaagaaattttgctggcatggtggggggagtggttgaaggtcttttttttttttgttgttgttgttgttggtttctccccccannnnnnnnnnnnnnnnnnnnnnnnnnnnnnnnnnnnnnnnnnnnnnnnnnnnnnnnnnnnnnnnnnnnnnnnnnnnnnnnnnnnnnnnnnnnnnnnnnnnnnnnnnnnnnnnnnnnnnnnnnnnnnnnnnnnnnnnnnnnnnnnnnnnnnnnnnnnnnnnnnnnnnnnnnnnnnnnnnnnnnnnnnnnnnnnnnnnnnnnnnnnnnnnnnnnnnnnnnnnnnnnnnnnnnnnnnnnnnnnnnnnnnnnnnnnnnnnnnnnnnnnnnnnnnnnnnnnnnnnnnnnnnnnnnnnnnnnnnnnnnnnnnnnnnnnnnnnnnnnnnnnnnnnnnnnnnnnnnnnnnnnnnnnnnnnnnnnnnnnnnnnnnnnnnnnnnnnnnnnnnnnnnnnnnnnnnnnnnnnnnnnnnnnnnnnnnnnnnnnnnnnnnnnnnnnnnnnnnnnnnnnnnnnnnnnnnnnnnnnnnnnnnnnntgagttcgagcccagcctggtctacaaagtgagttccaggtacagccagggctatacagagaaaccctatcttgaaaaacaaaaaacaaacaaaaaagcaaaaacaaacgagagaaacaaccccgctccccccccaccccccgttccccccaaacaacaacttaggctttcagtttagaaaaattaagttctgggtaggtgagatggttgctgccaccatgcctgacccaaattttctggatggatcgccccgcccccacccagagccattacatagaaacactcccttcaacactccctccagtaaattaaaaactaaacaccaagttctgttactttgtcacagtgctccggcatattggattttgtcttttaaaaaaaaaaaaatatgtacaattggagacggaatttaatttgtaacactgaataagctttacctgtaaaattgttttgttattttttgagacatgctttcactatggagagcaagttggcctcagattacagagatcttcctgactctgcctcctgagtgctgggatcaaagacatagcaaccacgcccaactgaaaacgagctttgacattaaaaaagaaaagtccgtcagaacttatgagcacataaaggtcttgccccactacagtaggcctctggatattttctttctgttccttgccattcatttctctctccagttctagtccagaccaaacctagtcttttagctgcgtgaccttgcgcaagcatctttccccgggaagcctcggcgtattctcggtaaaacgagaaagttggcctctgatctttgcacacgctcccaactgtgaagcgggctgcagagtttacggagccgactccctctcccgggactcgatggtacggcccccggtctcccccacccctccgcgccggactttggtacaggcccagggggcccgcggtggcttctctaagctgcccttgccccccgccgagttccgggcccgaccccgcgcatgccgattggttagagtgagacccgggctgtgcggctataggtgatcccgggggtgggcggggcttcgaggccggcccctcccccgggtcggacgccgtaaggagccgcgggcgggcgggcggacagactgacgggagggccgggcggcgagcaagatggcgcagactcagggcaccaagaggaaagtctgttactactacgacggtgagctgcgggtgggcggcgcgggccgggcgttggggaaaggctgggggaggaggctgggaggaggctgaagccccggggagcctgagggaaagtcgaggctgaaggaggaggttggagagaggaagtcgaggctgaggccggagatgaggtgggggtcgtggaaggggtagtctgcggtaatcccggtggcggagattctcggggaatccgacctgaagttggagtgggattcctggagggaagcctaagcctggcggcggggatcggaatatgatggagacggtttgcctggatatcttcccctgctgagaatacaaaggtttttcactgtccccattctctctctctctttttctttctttcttttggtgagttctgcaggactggccactcatcccctcccccactccatcccccaagtctatgagtagggcctgcagttgctagttgggaaatggggctccccggggatgcaaggagagaggtgcatgaaacttgttaagacgacttttcattgagccagcgcgagcatcttactctgtcctgggttgtgtttctgttggggctggagggctcatcgaggcacatttcctgtgttgagttcccgtctgaagggggagctagacaatgtcacaggtatctttcggagttagcgctgggacaagggaatgtggggtggaggagaacacagcaggagcctcagcccaacctgagaggagcaggttgtgtgtcagtgcttaggacccaagaactggagttacaagccaggccctggcaagtggagccaacagcagggggaggggacagcacctttatctgagaaagggtctcacagtgtaactcacgctggtcttggattaagccccttcttcttactcttgactccaggcttacaccacttggtccagcatttgtgttttgggaatagcagttgagttgttcaggggacatctagccagccagccagtaggcggttggctgtttagatctgaaatttagaagacagatattttttggtaattgtcggtataaaataattcagatagtaattttagctggattagaaaagggtgttataactccagttgtagagggtgaaaagctatgttgatactttttttttttttttgaaatggcctctgtgtaaccctggctagcctggaactcactttgtagaccaggtttgcttcctactggaagagatttatcctacgcccctcccgagtgctaggattaaaggcatgtgccacaaccctggcctgttttaattctgaagaagtggactaagaaggttcagtggtcctgattgctctttcactatgctgtctttcaactgttagccacattcctgtttcagtctttcccagtgctgtggggtgacggagccaccaagcctggtgtcttcttgtttctgttctgttttgtttttaaggcagggtctgtctctaacagtcctagctgtcctggaagttgctttgtagaccaactaggctggcctctgaactcagagagatccccctgcctctgccttctgagtgctggtattaaaggggtgcaccactgtctagcagcctcattttttgtttcggttctttttgtttgtttggtttggtttggtttggttttggttttttgagacagtttctctgcgtagccctggctgtcctggaacttactctctagaccaggctggcctcaaacttagaaatccgtctgcctctggccaccaagtgctgggaattttttttcttcttgttttttgtagataatacatttcttggagaaaagtctccttatctccacttcctaaaagattgggtagtataataggcataatttttttaaagaattatttattttacgtatgtgagcacactgtagatgtctttagacacaccagatctcattacagatggttgtgagccaccatgtggttgctgggaaacgaacccaggacctctggaagatcagtatgtgctcccaactgctgagccatctctccagccccataattttttttgagattataatagaattacataatttcccctccttttctctctttttttcttcaagacaggatttctctgtatagccctggctgtcctgaaactggtgctgtagaccactagattgttcttggactcacagagatcctcctttctcttgcctctcaggtgctgggattaaaggccggccctaatacttccttgcagaggttttccttgctttgttaactggagaaagcagggccctgagagatggctcagtagttggtagtgtgtacagcccttgcagaggacaaagctcagttcctagcatccaccttgggaggctcacagatgcctgtgactccagctacagggacccagcgccctcttctggcttccacaccgccctgcactcacgggtacatccataccacacaccagtttagagcatttcctactgagatgctgcgctcaattcccagggccccccacagccacttgtaactccagttggaaggaatccggtgatctcttcgcgcttcaagtgctagatgggaatgtggtgcttggacatacatgcaggcaaaacttcacacacacaaaagactgtcctagaactggtctattagacgaggcagctgtgaactcaaggagatctgccacctagttttcctgctgggactaaagcctgcactaatggggaagtgctgggagggattggggcggaagctagattggagagaagaggatactttagcttgcaattttttgattgattggttttttgagacagggtttctctgtgtagccctggctgtcctggaactcactctgtagaccaggctggcctccagctcagaaattcacctgcttctgcctcccaagtgctggggctaaaggtgtgggccaccactgcccagctagtttgcaattttatttttgagacagggtctctctctgtgtattctgcttggcctggaactaaatgagacccatccgcctctgcctccagagcgcttacactaaaggtgtgtaccactacacccttctaagagaggaagtattgtttttttgtttttttgtttnnnnnnnnnnnnnnnnnnnnnnnnnnnnnnnnnnnnnnnnnnnnnnnnnnnnnnnnnnnnnnnnnnnnnnnnnnnnnnnnnnnnnnnnnnnnnnnnnnnnnnnnnnnnnnnnnnnnnnnnnnnnnnnnnnnnnnnnnnnnnnnnnnnnnnnnnnnnnnnnnnnnnnnnnnnnnnnnnnnnnnnnnnnnnnnnnnnnnnnnnnnnnnnnnnnnnnnnnnnnnnnnnnnnnnnnnnnnnnnnnnnnnnnnnnnnnnnnnnnnnnnnnnnnnnnnnnnnnnnnnnnnnnnnnnnnnnnnnnnnnnnnnnnnnnnnnnnnnnnnnnnnnnnnnnnnnnnnnnnnnnnnnnnnnnnnnnnnnnnnnnnnnnnnnnnnnnnnnnnnnnnnnnnnnnnnnnnnnnnnnnnnnnnnnnnnnnnnnnnnnnnnnnnnnnnnnnnnnnnnnnnnnnnnnnnnnnnnnnnnnnnnnnnnnttcagtctcttttccggttgggactcacttcactcttactgtcaggtttgctgtagtaggcaagccactttaccttttgtaagtcacttttccctcccctcgcctcccttcctctctctctttctcgctctctcgcttcttctctccctcccccctcctttccttccttttctttctttcctctgtgacagggtttctctgtgtagtcctggaatttgtcctgtagaccaggctggtctctaacccacagaggtcctcctatctctgcgtcgcaagcactggcatcaagagctgtgtgccaccattgcctggctttccagaaaacagagagaacggtttctactgagagcagcagtgagaaagaaca

SEQ ID NO: 1511 - DNA, 2100 bp, Mus musculus
gaattccggattcaagctcctgactgcggccaatgggggcctctgagctgacgatctcgggtacgtttttgtaacttccagaacagggctctaggatgtctgatgttggggcgagtggcttaggggcagctccttcaggcctctctacattccttcagggatcatgggctgtgtctgcagctcaaaccctgaagatgactggatggagaacattgacgtgtgtgaaaactgccactatcccatagtcccactggacagcaagatctcgctgcccatccggaatggctctgaagtgcgggacccactggtcacctatgagggatctctcccaccagcatccccgctgcaagacaacctggttatcgccctgcacagttatgagccctcccatgatggagacttgggctttgagaagggtgaacagctccgaatcctggagcagagcggtgagtggtggaaggctcagtccctgacgactggccaagaaggcttcattcccttcaacttcgtggcgaaagcaaacagcctggagcctgaaccttggttcttcaagaatctgagccgtaaggacgccgagcggcagcttttggcgcccgggaacacgcatggatccttcctgatccgggaaagcgaaagcactgcggggtccttttccctgtcggtcagagacttcgaccagaaccagggagaagtggtgaaacattacaagatccgtaacctagacaacggtggcttctacatctcccctcgtatcacttttcccggattgcacgatctagtccgccattacaccaacgcctctgatgggctgtgcacaaagttgagccgtccttgccagacccagaagccccagaaaccatggtgggaggacgaatgggaagttcccagggaaacactgaagttggtggagcggctgggagctggccagttcggggaagtgtggatggggtactacaacggacacacgaaggtggcggtgaagagtctgaaacaagggagcatgtcccccgacgccttcctggctgaggctaacctcatgaagcagctgcagcacccgcggctagtccggctttatgcagtggtcacccaggaacccatctacatcatcacggaatacatggagaacgggagcctagtagattttctcaagactccctcgggcatcaagttgaatgtcaacaaacttttggacatggcagcccagattgcagagggcatggcgttcatcgaagaacagaattacatccatcgggacctgcgcgccgccaacatcctggtgtctgacacgctgagctgcaagattgcagactttggcctggcgcgcctcattgaggacaatgagtacacggcccgggagggggccaaatttcccattaagtggacagcaccagaagccattaactatgggaccttcaccatcaagtcagacgtgtggtccttcgggatcttgcttacagagattgtcacccacggtcgaatcccttacccaggaatgaccaaccctgaagtcattcagaacctggagagaggctaccgcatggtgagacctgacaactgtccggaagagctgtaccacctcatgatgctgtgctggaaggagcgcccagaggaccggcccacgtttgactaccttcggagtgttctggatgacttcttcacagccacagagggccagtaccagccccagccttgataggcctttcggtcccaagatcctcccaaccactgtccctggctagggcagatggaattcctgtgccatatctgtgtggcctgtgcacacatggactctgactctgtacatgaaacctgtgcgtgtgtcacacataatgcagtttctgtctgtacacacatctgtagttatgtgggttctacacatgtgtcttatacctgtggagcacgtgagtctaagccttggatacctcctaagatgtctcttcctataccgttccatttcctgaagccatagagaggagacggtctgcgattgatgcgtgtctctgtctaccactgcctttcagagggtctccaggaaggccctccttgtgggctgccatccaatctcatgtctctgtgtgttctgtcctgtgcccggaattc

SEQ ID NO: 1512 - DNA, 1530 bp, Mus musculus
atgggctgtgtctgcagctcaaaccctgaagatgactggatggagaacattgacgtgtgtgaaaactgccactatcccatagtcccactggacagcaagatctcgctgcccatccggaatggctctgaagtgcgggacccactggtcacctatgagggatctctcccaccagcatccccgctgcaagacaacctggttatcgccctgcacagttatgagccctcccatgatggagacttgggctttgagaagggtgaacagctccgaatcctggagcagagcggtgagtggtggaaggctcagtccctgacgactggccaagaaggcttcattcccttcaacttcgtggcgaaagcaaacagcctggagcctgaaccttggttcttcaagaatctgagccgtaaggacgccgagcggcagcttttggcgcccgggaacacgcatggatccttcctgatccgggaaagcgaaagcactgcggggtccttttccctgtcggtcagagacttcgaccagaaccagggagaagtggtgaaacattacaagatccgtaacctagacaacggtggcttctacatctcccctcgtatcacttttcccggattgcacgatctagtccgccattacaccaacgcctctgatgggctgtgcacaaagttgagccgtccttgccagacccagaagccccagaaaccatggtgggaggacgaatgggaagttcccagggaaacactgaagttggtggagcggctgggagctggccagttcggggaagtgtggatggggtactacaacggacacacgaaggtggcggtgaagagtctgaaacaagggagcatgtcccccgacgccttcctggctgaggctaacctcatgaagcagctgcagcacccgcggctagtccggctttatgcagtggtcacccaggaacccatctacatcatcacggaatacatggagaacgggagcctagtagattttctcaagactccctcgggcatcaagttgaatgtcaacaaacttttggacatggcagcccagattgcagagggcatggcgttcatcgaagaacagaattacatccatcgggacctgcgcgccgccaacatcctggtgtctgacacgctgagctgcaagattgcagactttggcctggcgcgcctcattgaggacaatgagtacacggcccgggagggggccaaatttcccattaagtggacagcaccagaagccattaactatgggaccttcaccatcaagtcagacgtgtggtccttcgggatcttgcttacagagattgtcacccacggtcgaatcccttacccaggaatgaccaaccctgaagtcattcagaacctggagagaggctaccgcatggtgagacctgacaactgtccggaagagctgtaccacctcatgatgctgtgctggaaggagcgcccagaggaccggcccacgtttgactaccttcggagtgttctggatgacttcttcacagccacagagggccagtaccagccccagccttga

SEQ ID NO: 1513 - DNA, 31842 bp, Homo sapiens
  misc_feature (1)..(2500): n = a, g, c, or t.
  misc_feature (28552)..(30747): n = a, g, c, or t.
nnnnnnnnnnnnnnnnnnnnnnnnnnnnnnnnnnnnnnnnnnnnnnnnnnnnnnnnnnnnnnnnnnnnnnnnnnnnnnnnnnnnnnnnnnnnnnnnnnnnnnnnnnnnnnnnnnnnnnnnnnnnnnnnnnnnnnnnnnnnnnnnnnnnnnnnnnnnnnnnnnnnnnnnnnnnnnnnnnnnnnnnnnnnnnnnnnnnnnnnnnnnnnnnnnnnnnnnnnnnnnnnnnnnnnnnnnnnnnnnnnnnnnnnnnnnnnnnnnnnnnnnnnnnnnnnnnnnnnnnnnnnnnnnnnnnnnnnnnnnnnnnnnnnnnnnnnnnnnnnnnnnnnnnnnnnnnnnnnnnnnnnnnnnnnnnnnnnnnnnnnnnnnnnnnnnnnnnnnnnnnnnnnnnnnnnnnnnnnnnnnnnnnnnnnnnnnnnnnnnnnnnnnnnnnnnnnnnnnnnnnnnnnnnnnnnnnnnnnnnnnnnnnnnnnnnnnnnnnnnnnnnnnnnnnnnnnnnnnnnnnnnnnnnnnnnnnnnnnnnnnnnnnnnnnnnnnnnnnnnnnnnnnnnnnnnnnnnnnnnnnnnnnnnnnnnnnnnnnnnnnnnnnnnnnnnnnnnnnnnnnnnnnnnnnnnnnnnnnnnnnnnnnnnnnnnnnnnnnnnnnnnnnnnnnnnnnnnnnnnnnnnnnnnnnnnnnnnnnnnnnnnnnnnnnnnnnnnnnnnnnnnnnnnnnnnnnnnnnnnnnnnnnnnnnnnnnnnnnnnnnnnnnnnnnnnnnnnnnnnnnnnnnnnnnnnnnnnnnnnnnnnnnnnnnnnnnnnnnnnnnnnnnnnnnnnnnnnnnnnnnnnnnnnnnnnnnnnnnnnnnnnnnnnnnnnnnnnnnnnnnnnnnnnnnnnnnnnnnnnnnnnnnnnnnnnnnnnnnnnnnnnnnnnnnnnnnnnnnnnnnnnnnnnnnnnnnnnnnnnnnnnnnnnnnnnnnnnnnnnnnnnnnnnnnnnnnnnnnnnnnnnnnnnnnnnnnnnnnnnnnnnnnnnnnnnnnnnnnnnnnnnnnnnnnnnnnnnnnnnnnnnnnnnnnnnnnnnnnnnnnnnnnnnnnnnnnnnnnnnnnnnnnnnnnnnnnnnnnnnnnnnnnnnnnnnnnnnnnnnnnnnnnnnnnnnnnnnnnnnnnnnnnnnnnnnnnnnnnnnnnnnnnnnnnnnnnnnnnnnnnnnnnnnnnnnnnnnnnnnnnnnnnnnnnnnnnnnnnnnnnnnnnnnnnnnnnnnnnnnnnnnnnnnnnnnnnnnnnnnnnnnnnnnnnnnnnnnnnnnnnnnnnnnnnnnnnnnnnnnnnnnnnnnnnnnnnnnnnnnnnnnnnnnnnnnnnnnnnnnnnnnnnnnnnnnnnnnnnnnnnnnnnnnnnnnnnnnnnnnnnnnnnnnnnnnnnnnnnnnnnnnnnnnnnnnnnnnnnnnnnnnnnnnnnnnnnnnnnnnnnnnnnnnnnnnnnnnnnnnnnnnnnnnnnnnnnnnnnnnnnnnnnnnnnnnnnnnnnnnnnnnnnnnnnnnnnnnnnnnnnnnnnnnnnnnnnnnnnnnnnnnnnnnnnnnnnnnnnnnnnnnnnnnnnnnnnnnnnnnnnnnnnnnnnnnnnnnnnnnnnnnnnnnnnnnnnnnnnnnnnnnnnnnnnnnnnnnnnnnnnnnnnnnnnnnnnnnnnnnnnnnnnnnnnnnnnnnnnnnnnnnnnnnnnnnnnnnnnnnnnnnnnnnnnnnnnnnnnnnnnnnnnnnnnnnnnnnnnnnnnnnnnnnnnnnnnnnnnnnnnnnnnnnnnnnnnnnnnnnnnnnnnnnnnnnnnnnnnnnnnnnnnnnnnnnnnnnnnnnnnnnnnnnnnnnnnnnnnnnnnnnnnnnnnnnnnnnnnnnnnnnnnnnnnnnnnnnnnnnnnnnnnnnnnnnnnnnnnnnnnnnnnnnnnnnnnnnnnnnnnnnnnnnnnnnnnnnnnnnnnnnnnnnnnnnnnnnnnnnnnnnnnnnnnnnnnnnnnnnnnnnnnnnnnnnnnnnnnnnnnnnnnnnnnnnnnnnnnnnnnnnnnnnnnnnnnnnnnnnnnnnnnnnnnnnnnnnnnnnnnnnnnnnnnnnnnnnnnnnnnnnnnnnnnnnnnnnnnnnnnnnnnnnnnnnnnnnnnnnnnnnnnnnnnnnnnnnnnnnnnnnnnnnnnnnnnnnnnnnnnnnnnnnnnnnnnnnnnnnnnnnnnnnnnnnnnnnnnnnnnnnnnnnnnnnnnnnnnnnnnnnnnnnnnnnnnnnnnnnnnnnnnnnnnnnnnnnnnnnnnnnnnnnnnnnnnnnnnnnnnnnnnnnnnnnnnnnnnnnnnnnnnnnnnnnnnnnnnnnnnnnnnnnnnnnnnnnnnnnnnnnnnnnnnnnnnnnnnnnnnnnnnnnnnnnnnnnnnnnnnnnnnnnnnnnnnnnnnnnnnnnnnnnnnnnnnnnnnnnnnnnnnnnnnnnnnnnnnnnnnnnnnnnnnnnnnnnnnnnnnnnnnnnnnnnnnnnnnnnnnnnnnnnnnnnnnnnnnnntccttcttcttctttcccatctctcccttcctcctatacattccctcttcttaacctcaaacttctacaatctttctcttgcctttttctaaaggctccaagaatgtcaagcctggcagggaccttactggtctaagtccacattccatctgatgttggtattctctttacaacacaaccaacttgtggtttcctaaggctcatacgactatcacaaacaacaggatgctcactacctcacaaaacagctcagcttatctgagaccagttccaggttgctgttagtcctttactgggggctcttgttgctaattactctcaggctataatagtcaaaaagtcatttgcagtcacagatgggtgcactctggtctagcaggatttcccaaatgtccacctccccccaggactcctaacagtaggggaaagagtgaatacgtacccttttcctggaaagtttcttgatttgatttaaaattccatgcacattttgcattttcctccataataggtcatgtttgtttaacttacatgaataaggtcaggaaacactcatgctctggaaaaatgcacaccatgacatgacttccggtacccatgggaggctgagtatctcagtttaagaaacaggagtcgagctgggcacggtggctcacgtctgtagtcccagcactttgggaggtcgaggagggcagatcacctgaagtcaggagttcaagaccagccagaccaacatggtgaaaccctgtctctactaaaaatacaaaattaggccgggcatggtggctcatgcctgtaatcccagcactttgagaggccgaggcgggcagatcacctgaggtcgagagattgagaccagcctgaccaacatggagaaatccagtctcttaaaaaatacagaattagccgggtgtggtggcacacgcctgtaatcccagttacttgggaggctgaggcaggagaatcacttgaacctgggaggtggatattgcagtgagccgagatcacaccattgcactccagcctgggcaacaagagcgaaactctgtctcaaaaaataataataataaggccgggcacagtggctcacgcctgtaatcccagcactttgggaggccgaggcaggaggatcacaaggtgaggagattgagaccatcctggcaaacacgatgaaaccccatctctactaaaaatataaaaaatcagccaggtgtggcggcacgcgcctgtagtcccagctactagggaggctgaggcaggagaatcgcttgaacccaggaggcggaggttgcagtgagctgagatcgcgccactgcactccagcctgggagacagagtgagactctgtctcaaaaaaaataaaaaagaaaaaagtaatgagagaaatgcaaatgcagaaagagaaatgcaaatgcctggcagtatgttgggcttcttttcaaaacttaaaaaaatttattattattattcatttatttatttactttagacaaggggtcttgttctgtcacccaggctggagtgcagtggtgcaatcgtagctcactgtggccttgaactcctgggctcaagtgatcctcctgcctcagcctcccaagcacctgggattataggcatgcaccaccatgcccagctagtttttataataataataataataagaggcttgcttgaggtgatggatagctcatttatcccttttgtgattattacacattgtatgcctctatcaaaatatatcatgtaccccataaacatatatacttaccagatacccataaaagtaaataaataaataagtaaataaataaatatacaaaattagccgggcgtggtggcacatgcctgtaatcccagctacttgggagactgaggtaggagaatcgcttgaacctgggaggcagaggttgcggtgggccgagatcgtgccattgcactccagcttgggcaacaagagcaaaactccgtctcaaaaaaaaaaaaaaaagaaaagaaaagaaacaggagtctagggctgggcacagtggctcattgcctgtaatcccagcactttgggaggctgaggtcaggagttcgagaccagcctggccaacgtggcaaaactctgtctctactaaaaatacaaaacacaaaatacaaaaattagccaggcgtggtggtgcacgcctgtagtcccacctgcttagggaggctgagggaggagagacagagcttgcagtgagcccagatcacaccactgcactccagcctgggcaacagagcaagtctaaaaaaaaaaaaaaaaggaaagagagaaaagaaacaggagtctaggctgggcatggtggttcacgcctgtaatcccagcactttgggaggctgaggtgggtggatcacttgaggtcaggagttcaagaccaccctggccaacatggtgaaacccccatctctactaaaattacaaaaattagctgggcgtggtgacacatgcctgtagtcctagctagtcagggggctgaggcaggagaatcacttgaacctgggaggtggaggttccagtgagccaagttcacaccactgaactccagcctaggtgacagagtgagattctgtctgtttttttttcttttgagatggtatcttgctctgtcacctaggctagagtgcaatggcgtggtctcagctcactgcaacctccacctccatggttcaagcaattctcctgcctcagcctcccaagaagctgggattacaggcgcgcaccaccacgcccagctaatttttgtatttttagtagagacagggtttcaccatgttggccaggcttgtctcgaactcctgaccatgtgatttgccctcctcagcctcccaaagtgctgggattacaggcatgagccaccgcgcccagccgagactctattaaaaaaagaaaaaagaaagaaacaggagtctaaagcaaaggagattaattacccagtcccattcttccaccttccaaagcaggagttggtaggacagaattgtgcactggtgaaagtgtttctaagcactaaactaagctaacattcatgtgagcttatgagaaatggatgaagagccccatttgacagaagaggaaaagtgaggcttaggaggaatgatttcagcaaagtcacacagtaagtgtcaaaattgctatttgaacttaggtctctaactatggggacagtcttctgagttttgctaatgagaaacttccactgctccctgcttccacttagacccagcatgaattctctctctctgtctctcttttgttttttctttttagacagagtctctgtcacccaagttggagtgaacagtgcggtggcagtggcaggatctaggctcactgcaacctccacctcttgagttcaagcaattctccagccaccatgcccagctaactttttttttttttttttttttgtatttttagtagagacagggtttcaccattgttggccaggctggttgtcttgaacttctgaccccaggtgatccacccaccttggcctcccaaagtgctgggattacaagcatgagccaccgtgcccagcctgctcttttgagatggagtctcgctctgtcatccaggctggagtgcagtggcttgatctcggctcactgcaacctctgcctcccgggttcaagtgattctcctgcctcagcctcctgagtagctgggattacaggcgtgtgccaccatgcctggctaatttttgtatttttagtagacacggggtttcaccatgttggtcaggctggtcttgaacacctgacctcgtgatccacccgcctcagcctcccaaagtgctgggattacaggaatgagccatcgtgcccggacttttttttttttttttttttttttttgagacggacggaatctcactctgttgccaggctggagtgcaatggcgcaattccggctcactgcaacctctacctcctgggtttaagcgattctcctgcctcagcctcctgagtagctgagattacaggcacctgccaccaagcccgattaatttttggatttttagtagaggcagggttgcaccatgttggccaggatggtctcgatcccttaatcttgtgacccacccgccttggcctcccaaagtgctgggattacaggtgtgagccaccgcgcctggcctttttttttttttttttgagacaggctctcgctctgttatccaggctggagtgcagtggcacaatcgtagctcattgcagccttgagctcctgggctcaagtgatctttttgcctcagcctcccaagtagctggaactacaggcatgccccatcacacctggctaattttttgattttttttctagagatgaggtctcactatgttgcccaggctagtctggaacttctgagtttgaatggtcttactgcctcagtctcccaaagtgccgcgattacagatgtgagccaccacgcccggccagcaactccagctttgctctactccaaataggttgtgtgactttaagcatacctctgtgggcctcagtttgctcatctaaaatcagaggtttagccaggtatggcagctcatgcctgtaatcccagcactttgggaggccaagaaggaaggatcacttgaagccaagaatttgagaccagtccgggcaacatagcaatacccccatctctagaacaaataaaaaatcacctgggctcagtggtgccagctacccaggaggctgaagttagaggatcacttgagcccaggagtttgaggttccagtgagttaggattgggtcattgcactgcagtctgggcaagagagtgacactttatctcaaaaataaatcaacaaataataaaattggagattaggcttgctggtttctaagacctttgcagatgggagactctatgcattaacactgcatgttccagttgacatttattaactaattttgggtgctggtggctttcagacaaataaactacagcttctgctcttgatgaacccccactctcatcaaaggtatgggagaggcagtgggaccctggggctgacatgtaaatcagtaatcatggaactctgtgtctaagttgattattgaggtctgaatagaatgttgcaggagactggggtgagagggaagcaaagagcattgggaagtcttcagactaggtgatatttaggccaggtgcctgtaatccgagcactttgggaggctgaggcaggagaattgcttgaggccaggagttcgagaccagcctggccaacatggtgaaaccctgtctctactaaaaatacaaaagttagccaagcgtgatggtgcatgcctgtaatcccaactactcaggaggccgaggcaggagaattgcttgaacctgggaggtagaggttgcaggaaaaaaaaaaaggtaatatttcagctgagccttgaaggttgagttagaattcagcagttggacaaaagagagcatgccgactgggttcggtggtgcatgcctataatcctagcatttggggaggccaaggcaggaggattgcttgagcccaggagttcgagatcagactgggcaacatagtgagacctcatctctacaaaaaaataatcagctgggcatgatggtgtgcacctttagtctcagctactggggaggttgaggtgggaagattgcttgagcccaggaggtctaaggggattgcgccactgcacttcagcctgggagaggaagggagaccctgtctcaagagagagagagaaagagagagagagagagaaagagagagagagagagaaagagagagagagagagaaagagagagagagagagagagagagagcgagagagcgcacgcatttcaaagcagggagaaccacaagtacaaaggcattaagtaagaaaatagcatggggtgtttgggaaaggcaagaatagttcagaacacaggctgtgtgtgtgggggtgtgtgggggtgcctgtgtgtgggtgtttgtgtgtgtgtgagtgtgggtgtgtgggggtatctatggaggggatgcctgtgtgtgtgtgtaaggtgagtgtgtggatgtgtgcatgggtgtgggtgagtgtgtggaggtgcctgtgtgtgtgtatgaatgtgtgttggggaggggagaatgtgtgtgtgtggggtgagtgcgtgtgtgtgggggtgaatgcgtgtgtgtgtgtatgtgggtgtgactgtgtgggtgtgtggacgagtgtgtgtgttcctgggtgtgggagcctgtgtgtgtagggggagtatgtatagggtgtgtgcatgaatgtgtgtgtgggtacgtgtgtgagagtgggtgcctgtgtgtggggggtgagtgtgtgtggtgggggggcacttgtggagggtgagtgtatgtgtttactgagtgtgagtgtgggtgcctgtgtgtgggagggtgagtctgtgtgtgagtgtgtgggggagtacctgtgaggggtgagtgtgtgtgtttatgtgaaagtgtgtgtgtgtggatgcctctgtggaggtgggatagggggtgcctctgtgtgtgtgtgtgagagtgtgtgtgtgtagggtgtgtatatgtatagggtgtgtgtgagtgtgtgtgtgtgagagagtgtgtgtgtggcagaatagactgcggaggtggatttcatcttgatatgaaaggtctggaatgcatggtacattaaactttgaggacagcgctttccaagcactctgaggagcagccctagagaaggaggagctgcagggactccgggggcttcaaagtgagggccccactctgcttcaggcaaaacaggcacacatttatcactttatctatggagttctgcttgatttcatcagacaaaaaatttccactgctaaaacaggcaaataaacaaaaaaaaagttatggccaacagagtcactggagggttttctgctggggagaagcaagcccgtgtttgaaggaaccctgtgagatgactgtgggctgtgtgaggggaacagcgggggcttgatggtggacttcgggagcagaagcctctttctcagcctcctcagctagacaggggaattataataggaggtgtggcgtgcacacctctccagtaggggagggtctgataagtcaggtctctcccaggcttgggaaagtgtgtgtcatctctaggaggtggtcctcccaacacagggtactggcagagggagagggagggggcagaggcaggaagtgggtaactagactaacaaaggtgcctgtggcggtttgcccatcccaggtgggagggtggggctagggctcaggggccgtgtgtgaatttacttgtagcctgagggctcagagggagcaccggtttggagctgggaccccctattttagcttttctgtggctggtgaatggggatcccaggatctcacaatctcaggtacttttggaactttccagggcaaggccccattatatctgatgttgggggagcagatcttgggggagccccttcagccccctcttccattccctcagggaccatgggctgtggctgcagctcacacccggaagatgactggatggaaaacatcgatgtgtgtgagaactgccattatcccatagtcccactggatggcaagggcacggtaagaggcgagacaggggccttggtgagggagttgggtagagaatgcaacccaggagaaagaaatgaccagcactacaggcccttgaaagaatagagtggccctctcccctgaaatacagaaaggaaaagaggcccagagaggggaagggaatctcctaagatcacacagaaagtagttggtaaactcagggataacatctaaccaggctggagaggctgagagcagagcaggggggaagggggccagggtctgacccaatcttctgctttctgaccccaccctcatcccccactccacagctgctcatccgaaatggctctgaggtgcgggacccactggttacctacgaaggctccaatccgccggcttccccactgcaaggtgaccccaggcagcagggcctgaaagacaaggcctgcggatccctggctgttggcttccacctctcccccacctactttctccccggtcttgccttccttgtcccccaccctgtaactccaggcttcctgccgatcccagctcggttctccctgatgccccttgtctttacagacaacctggttatcgctctgcacagctatgagccctctcacgacggagatctgggctttgagaagggggaacagctccgcatcctggagcagtgagtccctctccaccttgctctggcggagtccgtgagggagcggcgatctccgcgacccgcagccctcctgcggcccttgaccagctcggggtggccgcccttgggacaaaattcgaggctcagtattgctgagccagggttgggggaggctggcttaaggggtggaggggtctttgagggagggtctcaggtcgacggctgagcgagccacactgacccacctccgtggcgcaggagcggcgagtggtggaaggcgcagtccctgaccacgggccaggaaggcttcatccccttcaattttgtggccaaagcgaacagcctggagcccgaaccgtaagtggggacccgtcgtgggggtgggtaggagcagatctagggatcctggagcagggagtaggcctggggtggcggtgaaggcttgagggccacggaggaagatccgacgacagccgacggccttcgttcgcttccgccctgcacagctggttcttcaagaacctgagccgcaaggacgcggagcggcagctcctggcgcccgggaacactcacggctccttcctcatccgggagagcgagagcaccgcgggtgagcgggcggcggtctcgaccgggcgcgggggtgccccggggtgtgcccgagggggggcgcagggtgagcccgaggtggagacacggggtgagtcggagggggacgcgggatgagcccgaggtgggggcgcgggatgacccggagttgggggtgctgggtgagcccaaggtgggggcgcggtggcgggccagactcactgcgttctttcgtcgctttgtccatccattcattcattcaggatcgttttcactgtcggtccgggacttcgaccagaaccagggagaggtggtgaaacattacaagatccgtaatctggacaacggtggcttctacatctcccctcgaatcacttttcccggcctgcatgaactggtccgccattacaccagtgagcccgacgggacccctcccccgtgccctatcagcctatctcccctcagtccccctcaggtgtcccccatccatctttcaatgccctactccattccccgcagtgggtgaggtgtggaacctgaccctacggccccaagtgtttgggtgacagccccacacccccttgctagtccacttcacctagatgggggcttggagaagtgggggaggtggtgtcaatacgaggcctgccctattgacagccttcacccctccctcgtcctcgcagatgcttcagatgggctgtgcacacggttgagccgcccctgccagacccagaagccccagaagccgtggtgggaggacgagtgggaggttcccagggagacgctgaagctggtggagcggctgggggctggacagttcggggaggtgtggatgggtgagtgtggcctccaggactgcctgggaagaggggaacgggaggggccgctgaggtgatgagagtcccaggacagctgcctggcgactttcccactccttcccttccccgacccagggtactacaacgggcacacgaaggtggcggtgaagagcctgaagcagggcagcatgtccccggacgccttcctggccgaggccaacctcatgaagcagctgcaacaccagcggctggttcggctctacgctgtggtcacccaggagcccatctacatcatcactgaatacatggagaatggtgggtgctacccgagtcggctaccaggggatactgctctccctgctgtccctgccagagggtggaaatacaccttttcttctggcccaaagctcaagcaaggagggtttcttgagctttcctgccccctggagactcacctccagccgggcgcggtggctcaggcctgtaatcccagcactttgggagccgaggcgggcagatcacgaggtcaggagttcgagaccagcctgaccaatatggtgaaactctgtctctactaaaaatacaaaaagtagccaggtgtggtggcacatgcctgtaatcccagctactcagaagactgaggcaggagaatccctttaatccgggaggtggaggctacagttgcagtgagctgagatcatgccactgaactccagcctgggtgacagagcaagactctatcaaaaaaaaaaaaaaaaaaaaaaagactcacctccaggcatgagaaaaaggtgtatcctctgatctgatcctgtctgggggcaagcctaaggtggcaagaatgttctggaagagcattcaccccaaccttccctgacctgccattctgtttgccttcttcaaagccctaccttgatctcaggatgcttgatctcagaaagcaagtgggtccctagccctgtttctctcccttctgcccctgagccctaggagggcagatctgcccccaaagccctctttttcagttctgagtgagacccccacccctgcacccctcttggtctgttactggacagagtgagagccccaggaagaggaatatgagtttctagcttcagctttgttcacaccgatttgccgtgtgacaggccaagtgcctgcactgtctctggtgctcagtttccccaagtataacagcagaaatctaaatgggctcaccagaaataatacagagtattcatcaaggcctctagagtctgactgcctgggtcagaagcctggcttcatgattttatggctttgtgataattatatcacctctttctgccatggtttcctactataataacgcgttagtaacttcctcacagggtcttgtgaggatgaaataattaatgcatacagagcagttagaactatgcctacttccaggtgctgtggctcaagcctataactccagcactttgggaggccaaggtgggtggatcacttgagcccagaagttcaagaccagtctgtgcaacatagcgagacttcattcctacaaaaaaatgtttaaaaattagctgggcatagtggtgtatgcctgtagtcccagctacttgggaggctgaggtgggaggatcacttgagcccaggaggttgaggctgcactgagctgtgattgcaccactgcactccaacctgggtaacagagcgagaccttgtctcaaaacaaaaaacccacaaaactatggctaccatatagtaactgatcaataagtttgttgctgttatctggctctgattctttgggaatgtaagatctatccttttttcaggaagagaaacaagctgttcattggctaatgggaaatggcaaatagattatgtcatgtgtatcttttttttttttgagtctcactctgtcctccaggctggagtgcagtggcatgatctcggctcacttcagcctccccctcctgggttcaaatgattctcatgcctcagtctcccaagtagctgggactacaagcatgtgccaccatgcctggctaatttttgtatttttagtagagacaggttttcgccttgttggctaggctggtctcgatctcctgtcctcaggtgatcctcccgccttggcctcccaaagtgctgggattacagatgtgagccaccatgcccagcctatcatgtgtatcgactttgattggtagttgcttgtagtgctggagaaggattctgaggttcattggaagtgagtgccaggaatgattagtaacatctgccatggatacaatggaagaatggcagtatatctatgtctatgtatttgctgtgtgtaggtgaggtctttgtctttggtaactagttcagcactcaaagtggggacactcaggttgctgtcatccttttacagggttttaatctcttgggaagggccattggtcactcactgcatcctagcaactcccatccatgtccagctgccctccactattagagaggtggtccctcagacccccagaccccctctttcttattccatccaatatattcagcacatagttattgtttcttactctcggctgggcaccaggaacatggatggatgaaacaaggttcctgttgtcagggaaacctgattttagttacagctactggggaaaccagagtttgtgccatgggaaagttccagcatgcccatgggagtgtagatgatgatccagtttattatgcctggtaggatctagagaggcttcctagtggggcagtctagcagggccacgaaagaaaagtagaattttttttagcaggcagagatgaaacaaagaggctttggggtgagagcctagtggtctgagtgcaggatctcaaaattgctaaactgtttgaagtcaaaggcagagtgggggaaagagaagaagctaccagtgtggaccatgccaagcttaggatactagttgaggattctaggttctaccttattggtgatgaaaaacctacagatccctcccagcatgctctaccctagcccctctgcaaaaaaacctttacatatcctgggcatccttaccctgaacacacactcctccattctcactcttcaatcttccttttcacatgtcagacacacttctagactcccagttggaggagaaaggtctgggggcctccccctggggcaacttgggccagcaactcttgcttctgcccacagggagtctagtggattttctcaagaccccttcaggcatcaagttgaccatcaacaaactcctggacatggcagcccaagtaaggagactggggaggggggctgggcaagggaacagaccagtgacgtgaagacatctggctcaggaccgctgatctgtgtttggcctgcagattgcagaaggcatggcattcattgaagagcggaattatattcatcgtgaccttcgggctgccaacattctggtgtctgacaccctgagctgcaagattgcagactttggcctagcacgcctcattgaggacaacgagtacacagccagggagggtacgtgtgagatttaagggtggtctgggccctgcagggtctggccaagcagacccaggtgacctcactctgcctcctccttaggggccaagtttcccattaagtggacagcgccagaagccattaactacgggacattcaccatcaagtcagatgtgtggtcttttgggatcctgctgacggaaattgtcacccacggccgcatcccttacccaggttagagccaagggcaggaactgaaagggtgatgggaagggcaagtccatgtcttcccattcaattctttccagtctcagaatctgaaactttgtagctgcatctcctctatcttctcaggggtatgagtccaacgtccccaggcagatgccacatctcccagggctggcttccatctccgtatctctctttaataaccccagctcttttctttttctctttttttctttttcttttttttttttttttttttttttttttttgagacggagtcttgctctgtctcccaggctggggtgcagtggcgccatcttggatcactgcaacctctgcctcctgggttcaagtgattctcctgcctcagcctcccaaatagctaggattacaggtacgtgccaccatgcgcagctaattttttgtatttttagtagagacagggtttcaccatgttagccaggatggcctcaatctcctgacctcgtgattggcctgcctcggcctcccagtgttgggattacaggcgtgagccaccacacccggccccagctcttttctttagttctggcccaggcagcctggtatggtagaagaagatctagctcaggaacaagaggcctaccttttatcagcagatctgccactgttgctaactttctgtttggctttgttcagatcattactgtaactagtgaagctagtcacttcacttctctaagcctcagtttcctgatactaaaaataagagactaggccaggtacagtggcttatgcctataatctcagaactttgggagaccaaggtgggaggactgcttgagcccaggagttcgagaccagcctgggaaactggtcgaaaccccatctctacaaaaacaaaagttagccaggtttggtggcatgtgcctctagtcccagctactcagaaggctgaggtgggaggatcacctgagccagggaggcagaggttgcagtgagccaagaccatgccataacactccagcctagggcaatagaccaagaccctgtctcaaaacaagaaaaagagagactccatctctacaaaaaaaaaaaaacaaacaaacaaaaaaaacatttaaaaattagctgggcatggtggcacacacccgtagtttcagctatttgggaggctgaggtgggaggatcatttgagcccaggaggttgagggtgcagtgagccatgattgttctattgcactccagcctgagcaacagagagagaatttgtctcaaaaaaaaaaaaaaagaaaaagaaaaagaaaaaagaaaaaatgagagaccatttgtgaaagagcctgactcatagtaggttgtcagtatacactgactcctcccaccatctcctggacaaagccctttacccctgaattcagccaagacagggatggaatttttgaaaggaacttgctaagaaactctggggaaaggaaatggagcataaagacaggagtaggggggtcatgcggcacagtggctagatttgtagaagcttcccatatccccagagcaaggtgaacagacctttgctccaaggaaggtaaagacaccttggaaggccggatgcagtggctcacacctgtaataccagcactttgggaggccgaggcgggtggatcacaaggtcaggtgttcgagaccagcctgaccaacatggtgaaaccccgtctctactaaaaaaaatatatataaaaattatctgggcatggtggcacgcgcctgtaaccctagatactcaggaggctgaggcaggagaattgcttgaacccaggaggcagaggttgcagtgagctgagatcatgccaccgcactccagcctgggtgacaaagtgagactctgtttcaaaacaaaaacaaaaacaaccaccttggaaacaggtgaaaagctgaggggcttccctgccctgggcttgccccaaaccagcgtccaggggtagtgctggagctggaaatacagaaatattctccagttatcctgccaggggtcctcactgctccttcccggttcccacagaggcaaacccatagggaatgtatctattagaagaaaataggcagtgaaagcatgatgataaatggcaactgacatatagcattagggtcagggagacaatggggagaaatggggaccttggtaaacttgcagctgctccagcagatggctgcaattaaggcgtgggggacccaaaaaaacagatcttttgtttttttaagagaagcccaaacttggagttttaggaaaatctgttcatttccatttattggcgattgattcaaattgtttaaaagcactctaggggctgggcacggtgactcacacctgtaatcccagcactttgggaagctgaggtgggtggatcacaaggtgaggagtttgagaccagcctggccaacatggtgaaaccctgcctctactaaaaatacaaaaatattagccaggcgtggtgttgggcactggtagtcccagccactcaagaggctggggcaagagaatcacttgaaccctggaggcggaagttgcagtgagccatgatcacgctgttgcactccagcctgggtgacagagtgagagtccatctcaaaaataaatataaataaattaaataaataaattaattaaatgaataaataaataaaaccactctagggccaatccaaagtggatctgtgggctatactcaggctggatttagcctgtgggcttgcacccttaactctggccatgggtgtttagttccgtggcctatgtcctcctatgccccagttttaaaatgtgagagtcccagccaggcgtggtgggtcacgcctgcaacccagcactttgggaggctgagatgagcggatcacgtggtcaggaggtggagaccagcctgaccaacatagtgaaaccccatctctactaaaaatacaaaaattaaccgggtgtggtggcatgcacctgtagtcccagctactcgggaagctgagacaggggaatcatttgaacctgggaggcggaggttgcagtgagccgagactgtaccattgcactccagcctgggcaacagagcgagactctgtctcaaaaaaaaaaaaaaaaaaaaaaaattgtgagagtcccataggcagaggctcccttgtacaagtcctggggaaaaagggtctctgttgaccaggctttagtcccaagctttccaggagcaaaactttgattttgtaaataccctataaggttttggtctttgggaactgcttgtcacaatctttgttcagaagactgaaggagaaaccagacactacatgagcaatttagaaatagggaaggagggagctatgttactgctgtgatcatgtagttctccagagcagctcttcttggggtctacatgccaaaagcctgccagaggggccaggaccagcataaagggagggaaccagcccaaagactatttcatctgggtcatggaggggcctggggaaccttctcaagtccaagcaaggtctgctttgctaggcccagggtccatttggcttcgtgatgcaggatgtcatgtgcctggtcttaaaactggagagacctcaccactgtcttggttgtgggtgcccatcctgccctgggccctgaccatctcatcattcctaccaaataataataatcccaggtgccctttattatttatttatttatgtatttatttcagacagagtctctgtcacccaggctggagtgcagtggcatgatctcagctcactgcaacctctacctcctgggtttaagcgattctcctgcctcagtctctcgggtagctggaattacaggtgtgtgccaccacgcccagctaatttttgtatttttttagtacagacaggtttttactatgttgaccaggctggtttcaaactcctgaccccaggtgatccacccggcttggcctcccaaagtgttgggattacaggcgtgagccaccgcagatggcctcaggtgccctttatgaagcatctccgatccagactttctgtgcctggatagatttgatgctttctgtgatatatatatatatatatatctgtgagatatatatatctgtgagatatatatatatctgtgagagatatatatatgtgagatatatatataataatatatatattatttttatttttaatttttttgagacaagagtctggcttgagttgctcaggctggagtgcagtggcacagtctcagctcactacaacctctgcacctccacctcccaggttcaagcaattactgtgactcagcctcccaaatagctgggactacaggcgcataccaccaagcctggctaatttttgtatttttagtaaagatggggttttgccatgttggtcaggctggtcttgaactcctggcctcaagtgatctgcctgctttggcctcccaccatgctgggattacaggcatgagccaccatgcctggcctgtgcactatatttgatgctttctgtgcacaatctcatttaatcctcataacaattctatgaggtaggaacagttatttactctattttccaaataaggaaactgggctcgcccaaggttccacaactaacatgtgtgtattattgagcatttaatttacaccagggaagcaggttgtggtggtgtgcacctgttgtccagctatttaggaggctgaggtgaaaggatcacttgaacggaggagttcaaatttgcaatgtgctatgattgtgcctgtgaacagctgctgcactccagcctgggcaacatagtgagatcccttatctaaaacattttttttaagtaaataatcaggtgggcacggtggctcacgcctgtaatccagcactttgggaggctgaggcgggcggatcacctgaggtcaggagttcaagaccagcctgaccaacatggagaaacccgtctctactaaaaatacaaaattagcttggcgtggtggtgcatgcctgtaatcccagctactcgagaagctgaggcaggagaattgtttgaacctgggaggtggaggttgcggtgagccgagatcgcaccattgcactccagcctgggcaacaagagtgaaattgcatctcaaaaaaaaagaaaaggaaataatctataccaggcactccaagtggtgtgactgatattcaacaagtacctctagtgtgaccttaccattgatgaagaccaagattcttttggattggtgctcacactgtgccagttaaatattccgaacattacccttgcctgtgggcttccagtgcctgaccttgatgtcctttcacccatcaacccgtagggatgaccaacccggaggtgattcagaacctggagcgaggctaccgcatggtgcgccctgacaactgtccagaggagctgtaccaactcatgaggctgtgctggaaggagcgcccagaggaccggcccacctttgactacctgcgcagtgtgctggaggacttcttcacggccacagagggccagtaccagcctcagccttgagaggccttgagaggccctggggttctccccctttctctccagcctgacttggggagatggagttcttgtgccatagtcacatggcctatgcacatatggactctgcacatgaatcccacccacatgtgacacatatgcaccttgtgtctgtacacgtgtcctgtagttgcgtggactctgcacatgtcttgtacatgtgtagcctgtgcatgtatgtcttggacactgtacaaggtacccctttctggctctcccatttcctgagaccacagagagaggggagaagcctgggattgacagaagcttctgcccacctacttttctttcctcagatcatccagaagttcctcaagggccaggactttatctaatacctctgtgtgctcctccttggtgcctggcctggcacacatcaggagttcaataaatgtctgttgatgactgttgtacatctctttgctgtccactctttgtgggtgggcagtgggggttaagaaaatggtaattaggtcaccctgagttggggtgaaagatgggatgagtggatgtctggaggctctgcagaccccttcaaatgggacagtgctcctcacccctccccaaaggattcagggtgactcctacctggaatcccttagggaatgggtgcgtcaaaggaccttcctccccattataaaagggcaacagcattttttactgattcaagggctatatttgacctcagattttgtttttttaaggctagtcaaatgaagcggcgggaatggaggaggaacaaataaatctgtaactatcctcagatttttttttttttttgagactgggtctcactttttcatccaggctggagtgcagtcgcatgatcacggctcactgtagcctcaacctctccagctcaaatgctcctcctgtctcagcctcccgagtacctgggactactttcttgaggccaggaattcaagaacagagtaagatcctggtctccaaaaaaagttttaaaaaaatcaaacacacttagccgagcatagtagctcatgcttgtagtcccagcagatcaggaggctgaggcatgaggattgcttgagatatgattgtgccactgtggcactccagagtaggcgacgaagggagatcctgtctcaaaaaaaaaaaaaaaaaaaaagggaaggcttcattgagaaggtaggtggcttttgagcaaagattccaaggtgaaggagtgagccttgtatggaggaggggaggagcagtcagccagagggaacagggtgaggcaggcgtttaccgggcatgctctgagagagggggatagatcctacaggcctggggccttgtggcctctgcagaagccattttgaggaaactttgcaggaatctctgcaaagctgatatgatctgaattacattttattttatttatttatttttgaaataaataatgaaattatttatttattttttcttgctctgtcgcccaggctggagtgcagtggcgcgatctcggctcactgcaagctctgcctcccgggttcatgccattctcctgcctcagtctcccgagtagctgggactacaggcgtccaccaccaagcctgggtaatttttttgtatttttagtagagatggggtttcaccgtgttagccaggatggtctggatctcctgaccttgtgatccgcctgcctcggcctcccaaagtgctgggattacaggtgtgagccaccacacccggcctcttttttttatttttaattgagatggggtctcactctgtcacccaggctggagaacaaaggtgaaatctcggctccctgcagcctctgcctcctgggctcaaacaatcctcccacctcagcctcctcagtagctgggaccacaggcatacaccaacactcccggctaattttttgtattttcggtggagacggggtttcaccatgttgcccaggctgatctcaaactcctaagctcaagtgatccatgttcctcagcctcccaaagtgctgggattataggcgtgagccatagcgtccagccctgacttacattttaaaaggatggctcttgctgctgtcttgaaaatagactgagttagtcagtttataaaactggggagattttgcataaaactccagatttctgccttctcttgaaaaataggggctaggtgcgttggctcactcctataatcccagcattttggaaggccaaggtgggcagattgcttgagcccaggagtttaagaccagactggacaacatggcaaaaccctgtctctaccaaaaaaaaaaaaaaattagcagggtgtggtggtgcacacctgcagtcccagctactcaggaggcaagcttgtattcctagctacttaggaggatagtttgagcccaggaagtcaaggctgcagtgagcatgatcctgccattgcactccagccagagcaaaaaagagagcgaaaccccatctcaaaaaaaagggaagatttagctatgttggacttacctgtcctcatggagctgaataatggccacccctccaggtagggcctgaactctacctttgccagagtcccctccactccctgttggtcttagacaatgaaactgagtgttagtagctatttaccaccaagctcatgcttgttgttcttataataaagataaatggtttaataaatggtatgataaagaaaattatattatggtattataccatttaataaatggtataataaagaaaatggttttttgcacccacatttccattaaaaagtgagaaaattaaagatacctgaggatggcagagtgtttgatgaaagatagggaaatgttggccaggcaccgtgggtcacacctgtaatcccagcagtttaggaggccggggcaggcggatcacaaggtcaggagttcaagatcagcctggccaacatagtgaaaccccgtctttactaaaaatacaaaaaattagccgggagtggtggcaggtgcctacaatcccagctactcggaaggctgaatggcgcgatctcagctcattgcaacctctgcctcccaggttcaagccattcttctgccttagcctccctagtagctgggattacaggcgcctgccaccatgcctagctaatttttatatttttagtagacgtggggtttcgccatgttggccaggctggtctcaaactcctgaccttgggtgatctgcccgcctcggtctcccaaactgctgggattacaggagtgagccacagtgcccggcctctaatttttatttttaatttttttaatttttatttttttaatttttattttatttattttttgtaatttttaaaatatacaaaaaaagggccgggtgtggtggctcacgcctgtaatcccagcactttttgggaggctgaggtgggtggatcacgaggtcaggagatcgagaccatcctggctaacatggtgaaaccctgtctctactaaaaatataaaaaaattagccgggcctggtggcaggtgcctgtagtcccagctactcgggaggctgagacaggagaatggcgtgaactcgagaggtggagcttgcagtgagccaagatcgcaccactacactccagcctgggcgacagagtgagacttcatctcaaaaaaaaaaaaaattatatatatatatatacatatatatatgcaaacaaagagcatctgagtcataataatgtaaatctatcacctgactgacctgctgccacacctcatgatctcatctgatccccacactccttctctttgggatactgtgtacagccatagcgtgggtgaactttgtattcctatcctccccatttttgttattttattttatttcttatttatttgagacagagtctcactctgtcatccagactgtaatgcagtggcctgatctcggctcactgcaacctccacctcccggtttcaagcgaatctcctgcctcagcctcctaagtagctgggacctacaggcacacaccaccacgcccagctaatttttgcatttttaatagagacggggtttcaccgtgctgggcaggctggtctcgaactcctgacctcaggtgatttgcccacctcagccttccaaattgttaggattacaggcatgagtcactgtgcccggcctcctccccattttataacaagggaaatggaggcccagaatggttaagtaaacccacccagggctagctgagaattagcaacagagaactgggagtagaatttgttccctggccctttgctgtttctattataagccacccagtcttagattttctgttaccttataattaatgactcaaatgcagtttctgagtgagaaacacaagtcccaaacactctttaaagaggcataaagatgtatcttgttgttttcttttgtttgagacaaggcctggctctattgcccaggctggagtgtggtgacatgatcttggctcactgcaacatctgtctcctgggctcaagccatcatcccacctcagcctcctgagtagctggaactacaggagcgcgcccccacacctgggtaatttttctattttttgtagagatggggttttgccatgttgcccaggctggtctcgaactcctgagctcaagtgatccacccatcttggcctcccaaagtgctgggattacaggcgtgagccactgtgcccagcctcttgttgactgtaggaccacaagttggcggctaacttagagcaatgtttggcacacaggaagcactcattaaatattgacattattgtagttattttaatagcccagcattgcacttttaggtctttcagctttcagtgatgatcagttgataattgatgatctggtggagtggttcttaatggtagagttgggggcaattttacactcccttacaccccactaatcttccccccaacccaatggtaaagctattgcacagtacttggcaatgtctagagacaattttggttgtcacagcctggggggaaggtgctactggcatctagtgggtagaggctaaggatgctgcttaattttttttttttttgagacaagagtttcactctagttgcccaggcacagaacagcttcacagaagctgttaatgcacagaatagcttcctacaaaaaagcattacctggcccaaaatgtcattagctaccaggctgagaaacctgccctcctaggccgggcgctgtggctcacgcccgtaatctcagcatattgggaggccgaggtgggcggatcctgaggtcaggagttcgagaccacctggaccaacacggagaaacccagtctctaccaaaaatacaaaattagccgggcatggtggcacatgcttgtaatcccagctactcgggaggctgaggcaggagaaccgcttgaacacagaggcagagattgtggtgagccgagatcacaccattgcactccagcctgggcaactagagcgaaactcttgtctcaaaaaaaaaaaaaaaaaaaaaaacagggaaagaaaagaaaggaaacctgccctcctatcataggataatcccatttcctcctgtctaaagagacgcctacttagtcatcctgggtgactgcatcagggaggtagattttggagtctgaaaggctgggttctgtcactttgttacagtgcctctggtgcaaagaaagcattttaaaaaccctgtacaattaaaaaattgaatttaattactttgtgtaactttgaataattcacagaagtctgaacttctttatcctgtcctgtaaaatggaggtaaaaagcccttggccgagagctgttttgaggaaaaactgaaataacattggtaaagtgtcgcacagtacttggcacacagcagcccctcgacaaacattagctttctttccctttcttgtcggtttcttcctctccaaacccgcgtgttgcttttctttttaattatttttctgtagccctcctttgcggccacaaactcgctttctaacccaggttcagcccttttattggctgagtgaccttgtgcaagtcacttttcccctgtaggcctcggtttattctccgtaaaatcagaaagttggcctccgatctccaagcacgcttttcacgacgaagtgggactgttaagtttacagagctgctttcctcccccgggactgatggtacggtccccgggcggctccccacccatctgtcgcagaccttggtacaggcccagggggccctcggcggcctctccgggctgcccttgccccctgccgagttccgggcccgtgtctgcgcaagctgattggctggagcggtgcccgggctgcgcggctataggtgagcccaggaggggacgggcggggcgttataacaaaaacttcttctgaaataccttttcccctcatatatgttgtgatatctacattcgtatattgatatccatttttattctccctattgcgattgctatgttatatttgtatacttattggtagcgatatagtgctcacacccaactttgatgatctatattttattcttaatccttaatttacttaataacttgtttgacaatttatatttatccttctgatgtgtgtgtcctctatcagtcttcgtgtttcttgttcgcttccgcgtacatttggaaatcagcaccttcgtaagtctagaaacactctcctactactattccctagttctttctagtatatatacaccgcgtaatgcccatcacaaatttccaccaaatattcacacttatcataacttgatcatatgtttataacgttacaattttgactagtttgtttattaattatatatagatcatatcttattagggcgtaggtataacatctatatagataccgctctgtacttatatcaattctatctcttttatttcattgtcatctcgcgtctgctgtgctcactattgcatcttttcagttccccatacctcaatcacttacttacaaatcgtcgtataagtagtacattaactaacaattaactcgtcgatacatctgacgctattgttatttatacctggatatagtcgcataactgctctctcctctgaatctactcttccttactctctaacatcacttttcactccgctccttacaatcatcttaatgacgtttcattctctgaatagtttnnnnnnnnnnnnnnnnnnnnnnnnnnnnnnnnnnnnnnnnnnnnnnnnnnnnnnnnnnnnnnnnnnnnnnnnnnnnnnnnnnnnnnnnnnnnnnnnnnnnnnnnnnnnnnnnnnnnnnnnnnnnnnnnnnnnnnnnnnnnnnnnnnnnnnnnnnnnnnnnnnnnnnnnnnnnnnnnnnnnnnnnnnnnnnnnnnnnnnnnnnnnnnnnnnnnnnnnnnnnnnnnnnnnnnnnnnnnnnnnnnnnnnnnnnnnnnnnnnnnnnnnnnnnnnnnnnnnnnnnnnnnnnnnnnnnnnnnnnnnnnnnnnnnnnnnnnnnnnnnnnnnnnnnnnnnnnnnnnnnnnnnnnnnnnnnnnnnnnnnnnnnnnnnnnnnnnnnnnnnnnnnnnnnnnnnnnnnnnnnnnnnnnnnnnnnnnnnnnnnnnnnnnnnnnnnnnnnnnnnnnnnnnnnnnnnnnnnnnnnnnnnnnnnnnnnnnnnnnnnnnnnnnnnnnnnnnnnnnnnnnnnnnnnnnnnnnnnnnnnnnnnnnnnnnnnnnnnnnnnnnnnnnnnnnnnnnnnnnnnnnnnnnnnnnnnnnnnnnnnnnnnnnnnnnnnnnnnnnnnnnnnnnnnnnnnnnnnnnnnnnnnnnnnnnnnnnnnnnnnnnnnnnnnnnnnnnnnnnnnnnnnnnnnnnnnnnnnnnnnnnnnnnnnnnnnnnnnnnnnnnnnnnnnnnnnnnnnnnnnnnnnnnnnnnnnnnnnnnnnnnnnnnnnnnnnnnnnnnnnnnnnnnnnnnnnnnnnnnnnnnnnnnnnnnnnnnnnnnnnnnnnnnnnnnnnnnnnnnnnnnnnnnnnnnnnnnnnnnnnnnnnnnnnnnnnnnnnnnnnnnnnnnnnnnnnnnnnnnnnnnnnnnnnnnnnnnnnnnnnnnnnnnnnnnnnnnnnnnnnnnnnnnnnnnnnnnnnnnnnnnnnnnnnnnnnnnnnnnnnnnnnnnnnnnnnnnnnnnnnnnnnnnnnnnnnnnnnnnnnnnnnnnnnnnnnnnnnnnnnnnnnnnnnnnnnnnnnnnnnnnnnnnnnnnnnnnnnnnnnnnnnnnnnnnnnnnnnnnnnnnnnnnnnnnnnnnnnnnnnnnnnnnnnnnnnnnnnnnnnnnnnnnnnnnnnnnnnnnnnnnnnnnnnnnnnnnnnnnnnnnnnnnnnnnnnnnnnnnnnnnnnnnnnnnnnnnnnnnnnnnnnnnnnnnnnnnnnnnnnnnnnnnnnnnnnnnnnnnnnnnnnnnnnnnnnnnnnnnnnnnnnnnnnnnnnnnnnnnnnnnnnnnnnnnnnnnnnnnnnnnnnnnnnnnnnnnnnnnnnnnnnnnnnnnnnnnnnnnnnnnnnnnnnnnnnnnnnnnnnnnnnnnnnnnnnnnnnnnnnnnnnnnnnnnnnnnnnnnnnnnnnnnnnnnnnnnnnnnnnnnnnnnnnnnnnnnnnnnnnnnnnnnnnnnnnnnnnnnnnnnnnnnnnnnnnnnnnnnnnnnnnnnnnnnnnnnnnnnnnnnnnnnnnnnnnnnnnnnnnnnnnnnnnnnnnnnnnnnnnnnnnnnnnnnnnnnnnnnnnnnnnnnnnnnnnnnnnnnnnnnnnnnnnnnnnnnnnnnnnnnnnnnnnnnnnnnnnnnnnnnnnnnnnnnnnnnnnnnnnnnnnnnnnnnnnnnnnnnnnnnnnnnnnnnnnnnnnnnnnnnnnnnnnnnnnnnnnnnnnnnnnnnnnnnnnnnnnnnnnnnnnnnnnnnnnnnnnnnnnnnnnnnnnnnnnnnnnnnnnnnnnnnnnnnnnnnnnnnnnnnnnnnnnnnnnnnnnnnnnnnnnnnnnnnnnnnnnnnnnnnnnnnnnnnnnnnnnnnnnnnnnnnnnnnnnnnnnnnnnnnnnnnnnnnnnnnnnnnnnnnnnnnnnnnnnnnnnnnnnnnnnnnnnnnnnnnnnnnnnnnnnnnnnnnnnnnnnnnnnnnnnnnnnnnnnnnnnnnnnnnnnnnnnnnnnnnnnnnnnnnnnnnnnnnnnnnnnnnnnnnnnnnnnnnnnnnnnnnnnnnnnnnnnnnnnnnnnnnnnnnnnnnnnnnnnnnnnnnnnnnnnnnnnnnnnnnnnnnnnnnnnnnnnnnnnnnnnnnnnnnnnnnnnnnnnnnnnnnnnnnnnnnnnnnnnnnnnnnnnnnnnnnnnnnnnnnnnnnnnnnnnnnnnnnnnnnnnnnnnnnnnnnnnnnnnnnnnctgacctccagtgctccatctgcctcagcctcccaaagtgctgggattataggcatgagccacacttcctggcctctgatgtgggcaatttgatggtgagtgtttggaggtttggagaatgccatgtcagttgataacttttttttttttttttttttgagatggagtctcgctctgtcgcccaggctggagtgcagtggcgcaatctcggctcactgctgcaagctccacctcccgggtccatgccattctcctgcctcagcctctccagtagctgggactacaggcgcccgccaccacactgggctgattttttgtatttttagtagagacagggtttcaccgtgttagccaggatggtctggatctcctgacctcatgatccgcccgcctcggcctcccaaagtgctgggattacaggtgtgagccaccgcacccggccccaactttttttttttttttttaaacttctagagatggggtctcaatatgttgcctgggcttgtcttgaactcctgtgcctggcctcaagcaatcctgccaccttggcctcccaaagtgctgggattacaggcctaagccactgttttttttgttgttgttgtttgtttgtttagaaataactattgataactgttaagatgtttaggggacatccaagtagaggcatccagtaggcagtttagaagatagaaattttttggtagtcatcagtatcttagtctgctataacagaacactgtttataaagaacagaaattgctgaatgtggtggctcacgcctataatcccagtactttggtaggctggggcggatggttctcttgagcccaggagtttgagaccagcctgggcaacttagggagactctgtctctacaaaaagtaaaaaaattagctgggcatgatggcatgtgcctgtagagaggctgaagtgggaggatcacttgatcctgggaggtcgactctgcagtgagccatgatcgcaccagtgcactccagcctgggggacagagtgagaccttgtgtcaaaaaaaaaaaaagaacataaatgtatttctcatagttctggaggctgagaagtccaaggctagaa

SEQ ID NO: 1514 - DNA, 2032 bp, Homo sapiens
cgcctggaccatgtgaatggggccagagggctcccgggctgggcagggaccatgggctgtggctgcagctcacacccggaagatgactggatggaaaacatcgatgtgtgtgagaactgccattatcccatagtccgactggatgggaagggcaggctgctcatccgaaatggctctgaggtgcgggacccactggttacctacgaaggctccaatccgccggcttccccactgcaagacaacctggttatcgctctgcacagctatgagccctctcacgacggagatctgggctttgagaagggggaaccactccgcatcctggagcagagcggcgagtggtggaaggcgcagtccctgaccacgggccaggaaggcttcatccccttcaattttgtggccaaagcgaacagcctggagcccgaaccctggttcttcaagaacctgagccgcaaggacgcggagcggcagctcctggcgcccgggaacactcacggctccttcctcatccgggagagcgagagcaccgccgggtccttttcactgtcggtccgggacttcgaccaaaaccagggagaggtggtgaaacattacaagatccgtaatctggacaacggtggcttctacatctcccctcgaatcacttttcccggcctgcatgaactggtccgccattacaccaatgcttcagatgggctgtgcacacggttgagccgcccctgccagacccagaagccccagaagccgtggtgggaggacgagtgggaggttcccagggagacgctgaagctggtggagcggctgggggctgcacagttcggggaggtgtggatggggtactacaacgggcacacgaaggtggcggtgaagagcctgaagcagggcagcatgtccccggacgccttcctggccgaggccaacctcatgaagcagctgcaacaccagcggctggttcggctctacgctgtggtcacccaggagcccatctacatcatcactgaatacatggagaatgggagtctagtggattttctcaagaccccttcaggcatcaagttgaccatcaacaaactcctggacatggcagcccaaattgcagaaggcatggcattcattgaagagcggaattatattcatcgtgaccttcgggctgccaacattctggtgtctgacaccctgagctgcaagattgcagactttggcctagcacgcctcattgaggacaacgagtacacagccagggagggggccaagtttcccattaagtggacagcgccagaagccattaactacgggacattcaccatcaagtcagatgtgtggtcttttgggatcctgctgacggaaattgtcacccacggccgcatcccttacccagggatgaccaacccggaggtgattcagaacctggagcgaggctaccgcatggtgcgccctgacaactgtccagaggagctgtaccaactcatgaggctgtgctggaaggagcgcccagaggaccggcccacctttgactacctgcgcagtgtgctggaggacttcttcacggccacagagggccagtaccagcctcagccttgagaggaggccttgagaggccctggggttctccccctttctctccagcctgacttggggagatggagttcttgtgccatagtcacatggcctatgcacatatggactctgcacatgaatcccacccacatgtgacacatatgcaccttgtgtctgtacacgtgtcctgtagttgcgtggactctgcacatgtcttgtgcatgtgtagcctgtgcatgtatgtcttggacactgtacaaggtacccctttctggctctcccatttcctgagaccaccagagagaggggagaagcctgggattgacagaagcttctgcccacctacttttctttcctcagatcatccagaagttcctgaagggccaggactttatctaatacctctgtgtgctcctccttggtgcctggcctggcacacatcaggagttcaataaatgtctgttgatgactgccg

SEQ ID NO: 1515 - DNA, 1530 bp, Homo sapiens
atgggctgtggctgcagctcacacccggaagatgactggatggaaaacatcgatgtgtgtgagaactgccattatcccatagtccgactggatgggaagggcaggctgctcatccgaaatggctctgaggtgcgggacccactggttacctacgaaggctccaatccgccggcttccccactgcaagacaacctggttatcgctctgcacagctatgagccctctcacgacggagatctgggctttgagaagggggaaccactccgcatcctggagcagagcggcgagtggtggaaggcgcagtccctgaccacgggccaggaaggcttcatccccttcaattttgtggccaaagcgaacagcctggagcccgaaccctggttcttcaagaacctgagccgcaaggacgcggagcggcagctcctggcgcccgggaacactcacggctccttcctcatccgggagagcgagagcaccgccgggtccttttcactgtcggtccgggacttcgaccaaaaccagggagaggtggtgaaacattacaagatccgtaatctggacaacggtggcttctacatctcccctcgaatcacttttcccggcctgcatgaactggtccgccattacaccaatgcttcagatgggctgtgcacacggttgagccgcccctgccagacccagaagccccagaagccgtggtgggaggacgagtgggaggttcccagggagacgctgaagctggtggagcggctgggggctgcacagttcggggaggtgtggatggggtactacaacgggcacacgaaggtggcggtgaagagcctgaagcagggcagcatgtccccggacgccttcctggccgaggccaacctcatgaagcagctgcaacaccagcggctggttcggctctacgctgtggtcacccaggagcccatctacatcatcactgaatacatggagaatgggagtctagtggattttctcaagaccccttcaggcatcaagttgaccatcaacaaactcctggacatggcagcccaaattgcagaaggcatggcattcattgaagagcggaattatattcatcgtgaccttcgggctgccaacattctggtgtctgacaccctgagctgcaagattgcagactttggcctagcacgcctcattgaggacaacgagtacacagccagggagggggccaagtttcccattaagtggacagcgccagaagccattaactacgggacattcaccatcaagtcagatgtgtggtcttttgggatcctgctgacggaaattgtcacccacggccgcatcccttacccagggatgaccaacccggaggtgattcagaacctggagcgaggctaccgcatggtgcgccctgacaactgtccagaggagctgtaccaactcatgaggctgtgctggaaggagcgcccagaggaccggcccacctttgactacctgcgcagtgtgctggaggacttcttcacggccacagagggccagtaccagcctcagccttga

SEQ ID NO: 1516 - DNA, 59394 bp, Mus musculus
  misc_feature (4271)..(6912): n = a, g, c, or t.
  misc_feature (26986)..(27005): n = a, g, c, or t.
gggactacatgttggaaccttatcttaaacacacacagatacacacacacacacacacacacacacacacacacacacacacacacaaagcagggcctggagaggtgccttagtgtgtaaagaaagtgcttgcatcaggtcctgaagtcagaccccccacccagtgcccatgtaaaagccaggcatgacacacacctgtcaccccagcactagggacacagaatcaggagcatcccggggaaccaatggccagccgctctaggggaaatcatgagctgcgggttcagtgataaagcttgtctcaaaaagtaaggtagagaaatgattgaggaagacaccccaacatcaacctctggcctcccggctccctcacaggcaagcacaaccaggaacacacacacacacacatacatacaccatacaaacacaaaccacacagccacaccacacccacacatatgcacacaaacacaaatgcataccaaataagaataaataaaaatacaaaattttgcttttcatttctcttcttttcgtctttctctccagagcgaggggaggagagacagagacaggattcagacagagcacagcacccctctccagtttcaaatgacggctcaggcacaggcaaagcatgcaagtgagaggctcttcaggtctctaggacaggaagcacagcgacctgacctacctcagagagtaggcagaactaaattaaagatctgagacccatgagcgctctcgctctctctctctcattacacacacacacacacaatttagacctaaaaaaaaaaaagaacaaccccacaattttataagaaaaaaatatttagcaaaaatatttagcagaagctggccacaccgtcttttaattccagccctcagaagattgactgaggcgggaggacagccatgagttcaaggctggcctagactacatagtaaagttccaggccacccaaattcacaggtgatcattcaacaagggcaagccacacgccccccccccccccccacaactcagcactggtactgaccactaaactcaactgcctcccggtcgaagaggaaggtggctatttcttaaccaatggagaatctgaatgaacacacacttcctgctgtgtggcttaaggatattctagcaatatggattatcttgaccccaaaccagtcatataagttacaatataatgaaagtccaagatgccccttattcaaaatagtgaaaaatttcataaccgtgacaacagagaggaggcagccctccactgctactccgtccctgctgaagttcaactgtatggttatgaccggcaagatgtccatgtcaaggtctactccctagacacaagtgctacactgtcaagggacccattgtgttaaattagggcagtgtcaaaaccagaggaccagaggatcggcaagtatgagcattcgctcaaccttgaagtcaagggcagcaatgaccttaagttttctcccatagaatctactgcaagactttaattcccaagccctgccaagccttgccaccccaggactggggaggttaagaagggaggccactgaggaggtttgaggccagcctgggccacacagatgacttgcaggccacctagatgtacacagtaacaccctgtctcaaaattagaagattttaattcccaaattttaattccaaacgtcctcaagatttgtcatggtcaaagacaggagaatgtccccgggtacctttatcgccattttcaggaaatggtgactgggtcacagctgagatcttgaccaaggtgcgcctcttacttctgcagacagctcttcctcctcagtgaggagaaagctgcttacagaactcaggcctgaagcccgtggtgtgatgacaacaaaccttcctatcaaatgcgatttaacctcgtgactctgtactttcaacggtgctcggtgctcgggattcgaaccactgtgtacagcagaacccgtgccaaggctggatggaaccggaaccgggacccttccacgtcctagccccgggcgatacacctgcttcaactcctttttctgcatttttttttcatttttttaaaagatttatttattgattatatgtaagtacactgtagctgtctttagacaccccagaagagggagtcagatctcgttacggatggttgtgagccaccatgtggttgctgggatttgaactctggaccttcggaagagcagtcgggtgctcttacccactgagccatctcgccagcccttttttttcatttctattttgagacagagtcaaacttgcccagactggccttgaacctgtcattctcctgcctcagcctccacgacagctgtgggccaccgtgtccagtcaaaactggttactgcttctttgaaatgtccagagtgggccttgaggataggcagaagagcttctcgcttagattctagagaaggcctctgagctgtgtgtgtgatgcaaagagttatatcagcaggtatactgggatgcctgaatcatcctctctgggggcatgtgtcatatctctttaaatcctaagtcgttactgtgccatctaattaagaacaatgactcttacaaaaccgtcttctgtctggactaccctcccctgccccacacacacctgaggatgaaacccagggcctctcacacaatggacaagtgttggggccactgcgatacacacagtctcatcctttcttatttattttctgacagatcatcaccaagttgcccaggctagcctccaaatcttcctgcttcaacttcctgagtgtcttgggttacccgtgtacaccgccacacccgccatggaatcctttttttaaatgccacttctgacttcccatgctgcccatacaactaaatatatatatatatatggcaagctgcaaaccaacacttagaaccgttccaacagcgcttcgatgtggggctggcccaatgtttaccaatcaaaagaaccaagggttcgcaacaattactgagtcagtggttaagtcattcaaaagcaaggctctgacacactggctaagacgaatgaatgaagccaaaccgtaacaattatggcggatttcgggagtaattataaatccttatctcatttgctacaggctagagagcaactcagggcacccgtgcctaatgaaatgactgcagtgccattaatggcaggtgtctcattcctggtgggcggctctgcctttcagcaggctacccctcccccaagttagaagccagcctgagctacacagtgaattctaggctaagcagggctatacagtgagaccctgtctcaagcaaaaagaacaaaaaccaagaaacccaaacaaatgaaataagaattcatattaatgcaaagattcttcaccacggctctaactaacattggagtctgataacactcagtggtgggtgagtggctgccttgaacactgtaaggcacagcgaggtcgctggcctctccccaatgccatgccaacagcacccacctctaaagtcaacccaacccaaaacgtcttgtctccttgcattcccaaatattcactatcatcttcatctgagaaccactgatttacagaggtgggaagaaaagaaaaaaaaaaaaaaaaaaaaaaaaaaagcacttcagaacaggaaggtcctaaggagtctgagcagcagagattctcaaaccaaccaccctggggagctcgttaaaaccccgattcctaggcccagccgcagccccatcaatttagacaagtactgggttttccgtcgtcactgcctccatcctcatccaatgggtaaggaaaagtggggtccccccaacgtaactgctttgcccaaggtcacaagagagttagaaccaggccaccgaagccaaccaagctcttccccagcaccagggcgggtggagtaaggtgtgtttcttccgtcttcaaggccataaagcttaaaggtgaattctggggccagcgagcctgagataaacgatctggacgtggttttcattagcccgatggccttgcgccttgcgcaaggcaagtaggctctggggtctcagtttccttctctgtcaaatggaacaataagcgctcattcctaacgatatcagaaagaggagaatggaccaaaagcccccggcaccgagcccggtctacggtaagcgctctatggatcccggggctcaggaggagaacggatcccgactccgcgccgcgcacctcacctggtcccgcagctccttctccagctgctcgtnnnnnnnnnnnnnnnnnnnnnnnnnnnnnnnnnnnnnnnnnnnnnnnnnnnnnnnnnnnnnnnnnnnnnnnnnnnnnnnnnnnnnnnnnnnnnnnnnnnnnnnnnnnnnnnnnnnnnnnnnnnnnnnnnnnnnnnnnnnnnnnnnnnnnnnnnnnnnnnnnnnnnnnnnnnnnnnnnnnnnnnnnnnnnnnnnnnnnnnnnnnnnnnnnnnnnnnnnnnnnnnnnnnnnnnnnnnnnnnnnnnnnnnnnnnnnnnnnnnnnnnnnnnnnnnnnnnnnnnnnnnnnnnnnnnnnnnnnnnnnnnnnnnnnnnnnnnnnnnnnnnnnnnnnnnnnnnnnnnnnnnnnnnnnnnnnnnnnnnnnnnnnnnnnnnnnnnnnnnnnnnnnnnnnnnnnnnnnnnnnnnnnnnnnnnnnnnnnnnnnnnnnnnnnnnnnnnnnnnnnnnnnnnnnnnnnnnnnnnnnnnnnnnnnnnnnnnnnnnnnnnnnnnnnnnnnnnnnnnnnnnnnnnnnnnnnnnnnnnnnnnnnnnnnnnnnnnnnnnnnnnnnnnnnnnnnnnnnnnnnnnnnnnnnnnnnnnnnnnnnnnnnnnnnnnnnnnnnnnnnnnnnnnnnnnnnnnnnnnnnnnnnnnnnnnnnnnnnnnnnnnnnnnnnnnnnnnnnnnnnnnnnnnnnnnnnnnnnnnnnnnnnnnnnnnnnnnnnnnnnnnnnnnnnnnnnnnnnnnnnnnnnnnnnnnnnnnnnnnnnnnnnnnnnnnnnnnnnnnnnnnnnnnnnnnnnnnnnnnnnnnnnnnnnnnnnnnnnnnnnnnnnnnnnnnnnnnnnnnnnnnnnnnnnnnnnnnnnnnnnnnnnnnnnnnnnnnnnnnnnnnnnnnnnnnnnnnnnnnnnnnnnnnnnnnnnnnnnnnnnnnnnnnnnnnnnnnnnnnnnnnnnnnnnnnnnnnnnnnnnnnnnnnnnnnnnnnnnnnnnnnnnnnnnnnnnnnnnnnnnnnnnnnnnnnnnnnnnnnnnnnnnnnnnnnnnnnnnnnnnnnnnnnnnnnnnnnnnnnnnnnnnnnnnnnnnnnnnnnnnnnnnnnnnnnnnnnnnnnnnnnnnnnnnnnnnnnnnnnnnnnnnnnnnnnnnnnnnnnnnnnnnnnnnnnnnnnnnnnnnnnnnnnnnnnnnnnnnnnnnnnnnnnnnnnnnnnnnnnnnnnnnnnnnnnnnnnnnnnnnnnnnnnnnnnnnnnnnnnnnnnnnnnnnnnnnnnnnnnnnnnnnnnnnnnnnnnnnnnnnnnnnnnnnnnnnnnnnnnnnnnnnnnnnnnnnnnnnnnnnnnnnnnnnnnnnnnnnnnnnnnnnnnnnnnnnnnnnnnnnnnnnnnnnnnnnnnnnnnnnnnnnnnnnnnnnnnnnnnnnnnnnnnnnnnnnnnnnnnnnnnnnnnnnnnnnnnnnnnnnnnnnnnnnnnnnnnnnnnnnnnnnnnnnnnnnnnnnnnnnnnnnnnnnnnnnnnnnnnnnnnnnnnnnnnnnnnnnnnnnnnnnnnnnnnnnnnnnnnnnnnnnnnnnnnnnnnnnnnnnnnnnnnnnnnnnnnnnnnnnnnnnnnnnnnnnnnnnnnnnnnnnnnnnnnnnnnnnnnnnnnnnnnnnnnnnnnnnnnnnnnnnnnnnnnnnnnnnnnnnnnnnnnnnnnnnnnnnnnnnnnnnnnnnnnnnnnnnnnnnnnnnnnnnnnnnnnnnnnnnnnnnnnnnnnnnnnnnnnnnnnnnnnnnnnnnnnnnnnnnnnnnnnnnnnnnnnnnnnnnnnnnnnnnnnnnnnnnnnnnnnnnnnnnnnnnnnnnnnnnnnnnnnnnnnnnnnnnnnnnnnnnnnnnnnnnnnnnnnnnnnnnnnnnnnnnnnnnnnnnnnnnnnnnnnnnnnnnnnnnnnnnnnnnnnnnnnnnnnnnnnnnnnnnnnnnnnnnnnnnnnnnnnnnnnnnnnnnnnnnnnnnnnnnnnnnnnnnnnnnnnnnnnnnnnnnnnnnnnnnnnnnnnnnnnnnnnnnnnnnnnnnnnnnnnnnnnnnnnnnnnnnnnnnnnnnnnnnnnnnnnnnnnnnnnnnnnnnnnnnnnnnnnnnnnnnnnnnnnnnnnnnnnnnnnnnnnnnnnnnnnnnnnnnnnnnnnnnnnnnnnnnnnnnnnnnnnnnnnnnnnnnnnnnnnnnnnnnnnnnnnnnnnnnnnnnnnnnnnnnnnnnnnnnnnnnnnnnnnnnnnnnnnnnnnnnnnnnnnnnnnnnnnnnnnnnnnnnnnnnnnnnnnnnnnnnnnnnnnnnnnnnnnnnnnnnnnnnnnnnnnnnnnnnnnnnnnnnnnnnnnnnnnnnnnnnnnnnnnnnnnnnnnnnnnnnnnnnnnnnnnnnnnnnnnnnnnnnnnnnnnnnnnnnnnnnnnnnnnnnnnnnnnnnnnnnnnnnnnnnnnnnnnnnnnnnnnnnnnnnnnnnnnnnnnnnnnnnnnnnnnnnnnnnnnnnnnnnnnnnnnnnnnnnnnnnnnnnnnnnnnnnnnnnnnnnnnnnnnnnnnnnnnnnnnnnnnnnnnnnnnnnnnnnnnnnnnnnnnnnnnnnnnnnnnnnnnnnnnnnnnnnnnnnnnnnnnnnnnnnnnnnnnnnnnnnnnnnnnnnnnnnnnnnnnnnnnnnnnnnnnnnnnnnnnnnnnnnnnnnnccacccccgattttgcctctgcgtgaccttggaccgatgagttctcttgctcaaaccttgatttcctccgggttttttttcccccccacccactgctggaaactatggccaatgcagtgcgcagtggtcaatggacattccccggggatcggctcctttcgtaggataactcagttcaaaacccttgtagttccttcagccacagtctggcttcagattcacactgtcactcgcagcgacttcgaaccgccaaaactgttctaaactgcagataggatttggatttgaagattggatctggctttgtaattggaacccaactgacaggtctcgatcctgattttgtgtgtgtgtgtgtgtgtgtgtgtgtgtgtgtgtgtgtgcttgctttggtccttggacttttcgggtttgaagtcaaatatcagatgactttcctggtgtagcagtgttcaatagacagtcttaattaagccattgaacgtcagcggcttgcaacagatttttctcttcgtcttgtcatttggaagcagagactggttttaagtggtacggtggtaaccagtactggttatttcatggccctgggtcctacaggttaacaaatggaagataaggagaggcagaggcacttttaaaagagatgctttgtttgcaagccgcgtttatacaaactattatttggctaacgatgttgtgtgttccgcttccttcttttcttgcttgtgttccgttgattcatgtctaacttaaaacttcctcttgggatgcttgcttcttacttctccagggattggtccgtggtagaggcgggctgcctccccttgccaccccgatactgtcttgtccattttgtggtgttttggggccttttctattgtttcatattagaggtcttgaatgccaacatctagaaaggcttgagtcacttcctgttttgaatagaatgaagctaccttgaaggctgaggaacagctaggaataggtgctgccttttgtgcacagctcaggggaaaggttacctgtaggagtaggctcctttgaaatcctcatgctaaggccttctcagaagatgctcagacagacatttgactctcctggacgtttgcagaagatgggtgggggcacagatacttttgaagtccacttgtgttgttcctggagcctgattaaaaagtcctgcctttccgggcgtggtggcactcgcctttaatccaagcactcgggaggcagaggcaggcggatttctgagttcgaggccagcctggtctacaaagtgagttccaggacagccagggctatacagagaaaccctgtctcgaaaaaacaaaaaacaaacaaacaacaacaaaacaacaacaacaacaacaacaaagtcctgccttctagatgaactggaggggcttcacgcagcttcactcgtaaaagcttaagttttatgtgtcgtctgtattctttccatgggcttctgttccatggtgtttaagtgattaatggagaccattgtgtggtgcgcgttaaaatgttgtcatcctgtcatccttttcttgactagtttgccccaagagtactgtggacctctggtaataaaaagcaaagtcacgctttcagtctcaatattaataacttgctgcagaagcagagatgtcacacatctgcaagcaaagcctcctgtttcctacccttgctccttagaatggctgttagcacctatggtaaagctggctgaaaccctttctgttttgttttagaggagacgcttcactgtctgcctttgtgtgttggggatcaaagccaggccctgacaattgctaggagagccacaccctcagccctgatttcttgtttgtttctaatgaatctagttcattttaaatgcatcattcttgtgccaagatgacactctaattttgttctttacatcgtcccttctgtgagatagatacatcactattccagtttggtcctcagtgagaacactccaagacgcagcttgcctcagatgattgcacaagaggtggcacggcagggttgggattcaaaccatggactgtttgtctccataaccagccctcttaaccactgtacaccttgattgaaatcccgtaacttttcattaaatggtttgaaagggttggaataaacataaaagtggtaaagatgctctacatgcatttcagagatttttgtggacattgaagaattttaaactgaacccttaggccaggcagccggggtagcatctaatgccaccccacatgagtctgatgaaatggggtttctagggctcagtttactcacacagatccgtcctacccgcccagtgtgagttactcctgtctgcagttttgtgggattttaaaggaaaaaggtattgtactcaattaaaaataccatcatttttgttttccgtctgttcgtttgaagtaccttccttcagatccagcaggtggtcaaaaactgcagtgctagcatagagcattgtctctctgagcagaatgagccacccttgcttgcccggggcatgggggcctggacgcttctgcagttctcttctggcttctgttagcacctgggtctggactgcctgctctgggcagcaataagttcaccatttaccttagctactgttacgcactgtgtgtgtgtcaggatcacacagctctgttattctcaaaaagggactcgacgcggtcatccagatggaggtcagcatagagtgcttgcctagcccagacaaggcccctggctcagtctccagcactggaagcaaacagcggagcaaccacccctgctccctcaatctgctgctctaaccaacatcccctgagagcacgagtctgtggcgtgcacccacatccaggctgcagactggcctgcacaggaaggtgactgctgtgtgcagctgccaacctagttagcagagcggtcagtccgggtggggggatcatcagcctcctaggctgaggagcagataaaacaacaaaaatgtgctctgtttttcttaaaaaccaaacatcactcatcttttgccatcctgtacacagcagccaattggtgtccttgccactgaggggttgttctttttccagatccttcctgggcgtcagtaaataggggaactttcatatgtgacgaatgttgcagtgtccatcggagcctggggcgccatatctcccaagtgaggcatcttaaacacacagcatggcctccaaccctgctccaggtaaaccataggaagagttctcataattggaaaattatattttagtgattgttgcttaacaactaaaatactgcctactatacatcttaaatcttataaaagtttactctctatgtatagtataaagtgctgccctgtgttgaagtcattgtctgtcctttctttgtttacctaacataattgtgttccccacattcagttatacatagacagatatatcaatagattgtgtcgataaaagcttaaattctctagtgcgttttcattggtggctttctagagagattatcaccagaaattgttgtgttgtgctgtgttgtgttgtgttttgttttgaaacagagtctcgctatatagccctagctggccttgaactcacagacaatccacctgcctctgctaagtactaggattaaaggtaattgcaaccgtgcccaacttcagaaatcattttatttttttagatgtatttcatatatatgtctgtgtgtgtgtgtgtgtgtgtgtttgtgtgtgtgtgtatgcctgtgtgtgtgcatgtgtgtgtgtgtctgtgtgtgtttgtgtgtatgtttgtgtgtgtgtatgcctgtgtatgtgtctgtgtgtgtctgtgtgtgtttgtgtgtgtgtgtatgcctgtgtgtgtctgtgtgtgtttgtgtgtgtgctcacagaggccagaagagggcactggatttcctgacactggaattacagagcgttgtgaaccacaccggtgctgggactcaaatccgggtcttctaccagagcagcaagtgtttggtttaacactgagccatctctgcagcactcagacattttttaaagtctttctttcctataaattgtaatagatgatccagaaaattttcattaacaggcaaatttctgagtacctgcctatatttttagaacttttttttttcctgctttgatagcagcatagactgggattccgcagaaattgcttcaacatttgaagtttttaaaaagctcttgctgttaggcagagacttgagtgagcgtgttttgatcgcatgcctaacacttgtcaggggtctttgtcttatttgggatctgatgtcatgttcccggtacttctgtttgcgatacacagtcttcatgtctcctggaactcagggattaatcctgtgttttgcgatatttgtcttaatacacatcttactaaagctgtaacagctgcacagcagtacttaaactcccacaaacgaagggaccagagcaagtggttcgggttactgatgagaagccctgagagctgcactagcagccgggtagctctaggagtcctgattggaaaggaagttgagagagatttattaaaagttctacttaggggctgaagagatggctcagcctttaaatgctagctaacaaccataaatccccgagttctgttagaagtgttcaaaggccccttctcgtgaaagggttagctagcgccctccaccacattgtgagttctgttagaagtgtccaaaggccccttctcgtgaaagggtagctagcaccctccaccacattgtgagttctgttagaagtgtccaaaggccccttctcgtgaaagggtagctagcaccctccaccacactgtgagttctgttagaagtgtccaaaggccccttctcgtaaaagggttggctagcgccttccaccacactgtgtttgtttacagctttagaatttacagatggtccagagatgaatgattgaaaatgttagcagggcgtggtggcacacgcctttaatcccagcactcgggatgcagaggcggcggatttctgagttcgaggccaacctggtctgcagtgagttccaggacagccagggctacacagagaaaccctgtctcaaaacaaacaaacaaacaaaaaaaaaaccaaaaaacaaaaaaaaagaaaatgctagggttgactttaaggcagcagactctgaaatgtgtgtgtgtgtgtgggggggtcaggaccacagtggggtgtgagagagcttagcacgcagacgtgtgcttatagcattactttaatcatgtacaaagaaagtaacataattattaacaagatattttaaataggtgaatttaatgaaaagcattgagtgagtggtgtacacaatggtaaacggcgtgtgttcaggcaggtgtgtgccaaggagccgggattgggctatcctacacacaaagctggctcccatgtggagctccaaggtctcactgccagtcaggaacagtgacggcccggtccccagtctcactgtgcagtcagacgcagtggcgggaggtccccagatatggagtgtttttagtgcagcactgttttttcatttttgttactggttgtttttgactatttgtgggataaaatgtcctctcctactccttgttttcagatggttgagaccttgtacaacaatggtgctaactctatatgggaacactctctgctggaccctgcctctatcatgagtgggaggcggaaagctaacccacaggacaaagttcagtgagtggagtggttataacttctatttcttctcagcaagtggccctgtggaaaggagtgtggctattttgatcagcctccaaaggggctgtgggctatgcctgggcatttgctgtgaggaaggcagggggagggaggcagggggaccataactttggatgctcacccaattgaagttagtgatttctccagttggagtccagggcttggagcttgactccgggtgatgaggtagatgaaaccgagcgctctgtctgctggccgcagcgttctggcagtgccgggcctgtgacacagggttagatgctgcttcctcagggtgcccagttgagaaaggtaaagggaagagaggcgctgggaagttcaggcgttctcttatcagctcaggcctttgactctgctgcagtggagtccagctttgcccttcttactgtccagtgggggggggggggtgtcacttcctcttcttacagcacaaagaatgagaaatgtgtcagagctgttaagtgaactgtgttcttatttgtttccaaaccagccccaataaagcagaattcatcagagccaagtatcagatgttagcgttcgtccaccgattgccctgccgcgaggacgacagcgtgacggccaaagatctcagtaaggtgggcgcgctctgccttctgtggggccgtgagatgggccgcttcccttaaagccatgtcaggaggaagaagcagccttttgcaagtgcctttgactaactgacctttctcccttacacagcattcactcctctcagacacactggacaaaaggaaaacatgcttctaagaaactgtatttttttccccttttattttcattttcatttaattgattaattaatttgtactttttcggtacagttttcacatagattttgataagttctttacttgagaataatagccatttcaaagaaggttttctagagaacctagcatctgaaatagagcagaggaaggaggctgactgcttcagatgtccaggttcaaggctggagggcaaagtgcacctagagctgtagcacagccgtgtctgttacaccgagagcggtgccttcttgtgggccttggctgtttctacgagatgccgtaaaaatgcacatcacagttttttgagcggtgctttgaactagatgctcactcaagacagcgtgtgcacaattcagaatactaattctgcacagatgtaagtgattttcctagtgagtaaatagtttcctttttttaccaaataaaaaacatggccaggtgtggtggcacacatctttttttagtccccggtattcaggaggcagagacaggcagacagctgtgaattcaaggccagcttggtctatatagtgagttccaggtcagcctgggctacagtgagtccttgtgtaaagggtgtgtgtgtaaaaataagaagaagaataaaaagaagaagagagcgatgacttgggctggagaggtggatcagtgattgagcacacactgttcctgcagatggctcatgagatgactcacggcacatctaacgccagctccggggacctgacacccccttctggcctctgttggcacctgcactcagtgtacattgatgtacgcatacatacaattaaaaataaaattaaaaaaaaaaaacaaagactggttccgtaggactcatctgccctgtgagccagtcaggacagttgtagagtagccctgaaggagagagccatttgttctttgggagtttaaaagcgtttctgtgatgatacggatttagtgtgcacaggcccacttcccactgagcgcagcctggcagaatcgctgtgtggacaaacagcacagacttgagcaggtggccagcgtgtgccgcgggtggctggagccgctgggatccgcgctgtggcagcagctgaagactgatagatgctgtggcagcagctgagttttgaattatttcctgtctccttcagtacacaccataaccctcctggtagagggcaccgtagcacccaggttcctctgctcagagattttctcagaacacacagctggagggaggtagaccttgaaatccaaccacacacacacacacacacacacacacacacacacaccacctcctggtcaagtgcttcttgctgggtttatggttgtacctcttactggcaagtcctgcgtctgggcagattggccttggcagtccaagctccttgttgttaaactgacagacccacctgcagcctgaagccattgtaaacagcaaagaccccaccaacccacccacccacccatcccagccatcttcctgagccaaacaagacccgttactggtgtaaagtgtgttagagtgcgcggccagcagctcgggcacatctctcctgacacttctgacaagtactctgtttctgtttgtttttcagcaactccattcaagtgtgagaacagggaatcttgagacctgtctgagactgttgtctttaggagcccaagccaacttctttcatcctgtacgaaaatgtcaattattcagatattaaacggaagctgagttatgtttggatagtccaggtctgctcagtttgttctttttgtctacttcttattaataattcttaggaaaaaggaagcactccactccacgtcgcctccaaagcaggacagatcttacaggctgaattgctggccgtgtatggagctgacccaggcacacaagattctagtgggaagactcctgttgactatgcaaggtgagaggctgaggttctcactgcactgcgtgctgaacgtttctttttttccttgctaagcgactactctgggtatggcttgtgtttagcccctttaaagacttccattctattattttgttgatgaagatgtttcaaatgtgtgtcagctgagacagacaagatgaaaggactgccgagtcctagctggtgtggttaacacccggtcatcatagcacagtggttttcaggttatagcatacagatcagggatcaggaactgggagggggtggctagagagtgggctcagtggttcagattgccatctgctctgcagagaactggggttcagggttcagtttccagaaccacggtgcctcatctgtacctccaatttcaggagatccagcactctcttctgacctccaagggcaccaggcacacacacggtacacttatgagcagacaacattgtatacgtaaaagtcaatacatcttaatttttaaaattaaataattaaagaaggctagggaaatggcacactgagtggtgtgcttccctataagcatgaagaacagaactgggttggaaacggcacagggccgcagccctggcctgcctgctgtctgtgggcaaggttaagacaggcagatcttggacaagcctgttactgtgttctcctaagtatctggagctgcatgaggggacttcatggggcctaatcaatgttaaaacctgcagatttaactgatgaaagatggatagctttccttgttttccctgttattttattaactatgaaggatcacattctgtcataaagaatgcaatgggaaatgacaaaagtctgtcctagagtcctagaacttacttctctggaagagatgattaataaattcttgaaaagtttgaggcaagattatatatgatttgttgtcaaaatggacagccatgttttgttttgttttcctttggaagactgcgtgactctgtaactcaggccggccttgaattcagaacagtcttcctgctgtgctgcctgccctccccgtgctctgatcacacgtgtgaactaccatgcatggctgacagtgggtcttaaaaagcacatgtgcttcagtcgagaaaagccccgctgccttaagaaccttcgtgtggtcctcagagtccacaggaggagccaggtgtgggctcccacatctgtaagcccagctggatgagaggcagagaggggagtcataaagtgtgaagcagctctcatggcctgtgcagaccctgctgccatcaggatggacagcaaaagcccactccagaagtcgtctcccgagccacacacatgccatgatacacactcacagtcacacacataatcccttttaaagggcatctgttaggggcagtggggacttgctgtgcaaacatgaagatcagagtttagatcctcaaaacacacaaatgccgtagaggagtgggggtctactctgttccaatcataggaggcagagacagaggatggccatagctagctgacgagcaagactgctgtaccatcagattctagttcagtcaagaccctgcctcagtgatgggtagagagagattgctgacgtaagccttgagtctccatagacgtgtacacacacacacacacacacacacacacacacacacacacgtgcagaaaatgaacatgtgtcaggtggtttccttgtggtggccccagtgaatccattacttgagatggtctttgaggagctggttgaatatggacctgtgaaggaggagctaaagtatcctccagagagggaaggtggagtgttcatccccgtggcgatgggccaggagacgagcagcgcttcatcagcactgaggtcccaccatgctgcttcatttcaccccctgagagagagagctctgccaggtgcacggacgcaggctgagacgctgtctggtggacatgtgtgtgtgtcattggtcaggaagaattgtgtggagagagaacctggctaaagctagattgatgtttggagataagcagaatgcctccacttccttgagcactttgcatggaatagcctgtctgagtcacaatgtctcagcgtcagagtttacttctacactgaaggacccaggcagcttggctgagagttaagaaaggcagccctgtttcctgttgatgcagaggcaggagtagccgctggggagtagccgcggggacaagctctgcagtgggtcagtctgcctgaagcccttcagtgattttggatttctggactgatatgaggccagctgaccgcgtgcatcaggatcatgtgaaggaagggcttctccagggtgttgacgcctggggccgtcctgtcctgactgacccagaattcccaagggtctgtattctgggaacactccagctagctgttgagaacctcttccatcacctcgttaagtgaagtcagtttttgcccctctcctaagtttttaagtgcataaaatgcactctcctatgccataaggaaagaaactatcttgggtgggagccccagcttccagagggactgaaagtgatggtgatagtccgccatgcacagtattccagacagccgtgtttgataagctgctcaggtatctcagaacgctttgttcgctctgacctggctggtggatggtgagctgtgtcaatggtgctttgttctcttggtaggcaaggagggcaccatgagttggcagaacgcctcatagaaatacagtacgagctgacggatagactggccttctacctctgcggccggaaaccaggtgagtgagaggagagcagccttgctcgcctcttatctggagtgacaagttaggaccgcattgctacttggaaagacagaaagagaagatgattatcagtagggtttgtatttgggcagacagtgtaatggcagagttttttttttctttttaatatatattatttattgttatttctatgattgcacgtagctgtcttcagacacacaccagaagagtgcatcagatcccattacagatggttgtgagccaccatgtggttgctgggatttgaactcaggacctctggaagaacagttggtgctcctaaccactgagccatctctccagcccaacagcagagtttttatgtttgcatttgttttgcatttgctatcatctcatgatgtatctcagctttgcctgcaactttctgtgtaccttcaggtggttttaattttttttacaattttttttgagatactgtaattacatcatttcccccccacccttttcccctccaaaccctcctgcatactacacaccatgcagtagaagcgcagagctagagccttcatcactagaagagtgctgagaacaggctcggccttgttcactctctcttcgcctcacgaagtgagattaatctttatccctctcataagtctggaaatctgtaagtatcccacactaataatggaaagagggccattcaggtgtgacaccacctacaaagcgggactctacagtatttcggaacatttggttttataagctgctcagctgtctcagagcggcttgtcagagtgaggtggccctttacctggcctggtttgtggatctggaacaggagtcagtaaactgtagtctgagcacaatccagccctcgaccagtttcattaaataacatgttgctgaaaggtgaccacgcctgctgctatgtgtgtgtggctgtggctgctgccacagaacagaagtggagctgagtgcaatgcacagaatagcagataaacacaaagcctaaagcattgtctctacagccctatgcagagacattgccaaccccatttaaaaaacacgtctgtggaggagcacatactgtgggatgtgtgtgcacgcacacacgtgtatatgtgtatgatcacacacagggcagagttcaacgtgcaggagttctctcttaccgtgtggtttctggggaatcacacttaggttgtcagaagtggccgtgagtacttgtaatcctgagccacctcgttcctgtgtgcagattcctttctctgattgtgcagtagcattaggagtcatttgggggcaaggtggagcaagcatatgctagcccatctctccttctgaatggaactaaaaactatggacaaaatgcttagctttgaaaagcaattcttagctaagaataacaagacccaaagtcccatcaagcttgtagcatcttccttctttggatgcagtgacggcctgtgatatggagctgcaggtacaaagaggccttctctttctgatttcagaaatgagacctaaagcagacagacaagaagaaggttcctctgggttgttattttattttccctctctttctaaagggaatatgtgtgggtagccacagcaatggcacagatgtataaatgtctggcaccagcatgaaagaatatggattgtgtttctcttgctgcctgcttagtaggcaaatcccagcctgccctgttgcctgctaaaaacagaaataacacttgacatagatgttgaagaagcccagagtcttgcaatacaatgtttagaatatcccagattccgtccatagtgactcaggagagaaaaagctgggaaaaccaagggctgcatagagaaagcaggcactaggtgaacaggcgctaggcctggggccagatggtggtcagcaggtaaagagaatgggccacccagtgacctgagtgatcctgtgacgcacaggatagagagccagcttccatgagttgtcctgttggaattgtcagaagcattttaaccagctaataagagcgtggactgaagagcaatgaacattctttcaaaagaaaaaaaaagcacataagacagaataacctagtaaggatgttagaaatgaaaattacagtggggcagtggtgatatacagctttaattatggaggcagaggcagaccctgagttcgaggccaacctggtctatgacagccagagctacatagagaccatatgtcgaaaaaccaaaatataaaataaattacagtacttaaaatattaactctagattaataggtttaatagaaggctagaaatattcaaaacataaattgaaaataggcggctaggaagtgatgtagctcatggtagagtggttagctggcatgtggaaggcccagtccccagcacaagagaaagagccagtggcagcctgcctccgggcctgtggggaagcactagaagaatgaggcaggcacgctgcagggataaaggacttgctctgcaagcctaagacctgtgcttgttccagcatccatataagaaaccaggtgagccgggcatggtggcgcatgcctttaatcccagcacttgggaggcagaggcaggcggatttctgagttcgaggccagcctggtctacaaagtgagttccaggacagccagggctacacagagaaaccctgtctcgaaaaacaaaaaacaaacaaacaaaaaaaaccaggtgggacacatgcctgtaagttccaccactgggaaagcagagacactgggatcactggggcttgctggccagtgagtctcaccagtcaaccagtcccaggtaagaggccctgtctcagaaagcagtgttggtatatatatctgggttaaacagcaattaatgataaaaagaggctatgaatttgaaagagcaaggagggatgtctgagggcttgccagggagaaagaaatgaaaaatgatgtaattataatctcaaaattaatttttttaaagcagtggaagtgagtttcctacctttagatctcagcacttggaagcagaggcagaagggcagagggtagagggactggagagctggctcagcagtgaagggcactggatgcctgtgtagaagatctagggttggttttcctctcccacacggtggctcacaaccatctgtaactcaagttctaggagattcgaagccctcttctgccttccgcagccaccaactacaattggtgcttgcatgtatgtgcaggcaaaacatagatgtgcacataatagaatgcatactttatgaaaataagagtaacggtagaaaggggactcgttctgatgcggaatctgaagcacctggtgcttctcagaagtcactgagaggaaaaggaaattaaatggaatttaatttaaattaaaagaatgataagaaaaaaaagaaaagagttgctggcccagggctccatatccagcaaagcctttttagcatgaagacaaattaaacacattgctaaatgaggaaaatgataagacttcattgctctagcagcagaagtagagaaggttcctcaggtcagcgtgggcctgaggacagcgcagaaggatggaagagcagcccagcaagaagtgcatggaagcagagcagcccgggctgcaggcgtgtggccgctgacagcagaggctctcgtgtgggtgcacagaagactcagtgtgcagggcagtgcagaggaaggggaaagagtgggcagagcaggacagtgacctttctaagtagtcaaggtatgcgtagttcctgtaacccatagccattgaaagacagagacaacaatgtgagatcaaaaaacctagagataaaaacgaaacaaaacgcattgtgaagcagtacttaaataatcgaaagctctttattgaaaatattcaaaaacagaacaaaaagggaaaaagcctgacacttaaacagaaaatagtaaaatgtcataaatgccaaacacataaatccaaaactgtgtttgcagtaactgttaatgtctaaagagacatttaaagcagtggtgtcgttacagagcaaaagctgcgctgtacagtatgcgcaagtctataccacgacgaggtcagcaccaaacgatgtccatgcagacatcgaggctagcatggctgtgatggcatcaggatgtggctgtggctgcaccaccctgaatgaagcagatgtgacctgcctgggtcagagcagacctcagcaaagacagagagggtggagagacagtgacaaagtgcctgcataggcactggcagcactccaggtcacataccccggtgtccacagacccaaaggcgagcctccaaggaggcggcaggcagagacacctgccaccctgagttccagcctcaggtcccacctggtggaaggggaggactgactcttgatgtcttccaccctgcacgtgcatgccttgacgcacatgcgtccacatgcatccgcatgcacaaagtacatgaaccctgcctggggagctgaaaggaaggtgagaatgcagtacttaaacgcagactccacacacggctctgtaagttcaccttcagcaaggtgagccatgttctgaatgataaaccttagcaactccaaagaatttaaacttcctcaaagtttattctctgactaataaaactaagctagaaatttatgaaaatcaaaattttcaatcacctagaagcttagcaacacatttttaagtcatccatgggtctcaaaagaaaatctcaagggaaattagtgtcatacatattatgtatctggggctggatagttgttttgaaaggatagcatgtggtagcccaagctagcctcagacttaccacagtccttcctcagtcttccaagtgctggaattacatgtgtgtattaccatgcctggatcaaaggtattttcaactaaatgaaaatgaaaatacagtatcaaaagctgcagtattaactaggcctggtggtacataccatcaatcccatcacttgggatgcctgtgaattcagagccagtctagtgcacatagtgtgtgccaggccaaccagggctacatagtgagaccgtctcagaaacagaaaggggatgggggaaactttatggagtttatttaacacagtcttttgcaggaagtttatagcattaaatacttggatatgaaaaaagtataactctcaaatcaatcttcagtagaaacaatgcgaagataataatacaaccatgtttaaagatgtatttatttcatgtatgagtgctctttctgtacgtacacccacatgccagaaaagggcatcagatcccattacagatggttgtgagccaccatttggttgctagaaattgaactcaggacctctggaagagcaactagtgctcttaaccactgagtcatctttccagccccatatatgagtttatatgtatattcctttgcatacttaaacacacttcctccccagccctgtaaaattgtatttttcaagaatttcaatttgtacctcaacacatcccattaatgaaaatgtcaggttcaagaaataggaagaagggctagagagatggctcagcagttaagagcactgactgctcttccagaggacctgggttcaattctcagcaaccacatggcagattacagctgtgtgtaactccagttccaggagacagacaccctcacacagacatgcatgcagacagaacaccaatgctcatgaaataaaaatgaataaattaaaaaaaataggaagaggggctggagagatggcttagcaccagcatccacatggcagccagtttctgaggagtatgcctgcttttctgccctctgtgggggcatcaggcacataagagtgcacagatgtgtacaagcaaaagacaacaaaataaatctcttcaggagagagaataagaacagagagagtgctgtggttttgtgtaagtgggttagtggggtaccaaacccagcaagagggaagaggaaaggtgggtatgggggggttccccatacacagaaaagtcctcagcgaacagtaaatccagcaatatgtaaaatggagaaatgcgccataaccagtggaacacaactaactgaagtcagtcactgtgactggggcgaaggcgcgggcgtcagagacctgctgctctcacagaggacccaggttcagttcccagcacccacaagttggctcacagccatctgtaattccagtttcaggggatgtggcaccatcttgggcaccaggtacatatgtggtccgcatacatacaggcaaacactcatatacataaactttttaaaaatttttaaaagaaaatcagttaatgtagttcagggcattagtgaactaaaaggcagcatactcagataataatttcaagaagataattacaaacgctaaagctataaactaaggaggggctgtgatcttggaataagttcttagatacgtgttgttagattaattctgtttctgtttctgtgagcagctcactcgcctataccctgctgacttcagactcatgctgccctctttgccccacccgcaagtcctggattagaggtgtgcagcatcaccccagcttcagaaccccaagctcctgctctaaagaactgaccaggttggaaagagaagtagggaggaagtatttgcctttaatctcagcacttgggaggcagagccaggaggaccaggacagccagagctacacagagaaacctgtctaaacaggatggtgtgtggggtctgaggagctggcttggtagtccagagcatttgctgctctcggagaggacctggattctgttcccagcacccacatgctggctcaggactgcttacaactccagttcctagagagccgttgcccttaggcctctgtgggcacaaagcacacatgtggtgtgcagacatacatgcagggaaaaccggcatatacataaacaaattttaagaagaagaaatgaaacaggatctcatgcaacctaggctggtctctaaagttgctgtgattgtagatgaccttgaccttagatcatccacctaagggctagggttattggtatgcaataccatgcctgtgcgtgtgtttacactcgaagtagcatagcatactcaagtcaattctctccattttcttgagcttgaatcttgtctctgcactgtactccagcctagctgacccatgacaggcagtctcctgtctccacttcccatctccccgagggagtgctgggatgcaggtgtttgccaccgcagctgactttagcagccggagggtttgcctattgagccgtctccaggctctggtacatttcctctgccctagagttcaagaccatctcaaaaaaaaaaaaaagcaaaacctgaacctgaagatggtaataaatagcaacaaaacagacaaacaggcaagtaacaataacacccgggcacacatccttccttcagaaacacacattaaaagcacacacactgtaatgctgcccagaaccaggagtatagcttgggagaggcatggaacaactgagtctcacactgttgtacacagaacactgggggcggtgggcagggctgcttttagtgtttgtgtcaggagacaaggtcttcctttgtagctcagtccctctacccgagcttccccagtgcagtgaactctgcgctctgcttgctgttcagaatatagaacagcagaggtgctgaagaaatggcagcttcctaccaagtaagatgcatgcgcgcgctcacaaacacacacacacacaccacacacacacacacacacacacacacacacacacacacacacggaccctgcgctcctactctcaggcattgcctcggagggtaaaccgattacacacagaaacccgaaaaggtgcttggagtggttttgtcattgggatggacatccgtattctgaaagctagggaaggacacagaactcagcagatggccaggccgggtccctccagagccgcacacagagcaggcctgctcagccctggctgccttcctctcccaggctcagggcagctctgccatctgccaccaggagctgacagtgacagagcttggactgagctcctcagcagtttttactgagcgatgcctggaacagggcgggtttcagggaactcgcagccaatctcgagacttttctgttgtcccacgtggcacatgtttatggaaaatggctaatgggaaaacttaaactggaaaaaaatggtgatttcaaggttgatgtgagcatatctggtttctgtttcagatcataaaagcggacagcactttctaattcctcagagggcagacaggtaaggaccagtttggtttatgtgcccactatcgccttggtctacagtattcaagtgcattgtatgttgtgtttaacagagctcatacatttttctcttttatggctactcactttggaaataagacggctgtaagtaaattaccgtgtgaaacttaacttggaaagagcccagagctcagttgcactgatgcagagtcgtagccagggatacctccactgtttgtccagttgtcctgctgttttgtgtttataggttatagtcacaggtgtttctgtgtcaggagacagtctgctttgcctttgacaggccctggtgcatttcacattaatctgtgggctatcagcatgtcacggctgctcagcatgggttacaggctggatgaatttgtacattttgagaaatgaatgttctttttccttctctactcaaaatgtttaaaaacataaaagccacccttagttcatgagctgagctaaaaagtccttagccgtgtccccagcctgtannnnnnnnnnnnnnnnnnnnttgtagctgtgagcttgtctttctgccttttctgtttcctctccgttttgtcttgacttttgttttcctttgtgccatggggggaatgcagtggctcacgcgttggacacaggctttcctactgagccacaccccgaggcctagagaggaactgaagaacggtagcttccaccaccctgcggtggggcagtttgctcttacctgactattgggtctctaagagtcctgaccaaagtgtctaagtcttcaatgactgcggctacagaatcgttccataagcagggctatctcctccctcgggtgtcttagtcttctagtgaggtcacggcagcttctgtgcacttgcttaatggttttgtgctttttcttagcagcctggatttgtctgagttggcaaaagctgcgaagaagaaacttcaatctgtgagtatctcttccctaggaaccccagtatggaacccttgttggtccctgttgtcagtcagagttacctattgcatcatagtagctaaattagacacatgctgtctggtctgaatgcagtaaccaagaccaaaagcactttagtatatccaggcggctgactacttcaaacaacccgtgatcttttctgttaaaaatgcagcccttgcctgtgatggtagagaaccaaagttgtgggtgtgtcttggggtcctggggtgtgtggggcaccccttcttggcatttgttacgttactcacatgggataccgaggactaatagtagctgctggtagggcagtgagtctagacatccgtccactgcagtgctgtgactcctgcccatcaatcatatgccgttcctagagcttggtaaatttatgctgcggagagcttgtggcctggacccattgtgtgtgctcagggtttacccagccctgcaggtcacaagatcactttactctttgtcttcccggcaagaggccctttgtctgtctttcccatgatgcctcaccaggtgcttcctgctcaccttgtgagatttcactccttacctgttctcagtggtccctgcatcagaaccaagagccttgacttctctctgtgacctttaaagacccttaggcaccagcttacttcccctctggttaggtgtacgtgcattgttggagcagctctgtgaatcagctctcttgagggcaaaagccactgccttggagccctgcttcaggacgtgtgcctgcatgtttgccttgtctggttctggctcctcttagacttagaacttggtgcttccatgtgtgagcaaagcccggtttcctgccctgtggtttccctccttccctttcacagagatttttagagcctcatacgatatcactatcacataaagtggacttatccttcctagtacttaattatactgtgaaataaatgttttatgcaatttgtttggtgtctctgtgttctgtatctatagttgtgtgtttgagtgtattatgcctttcttaaggaagccacctagtagataaataagatgtcacgctttcgaggcagcgcaagagtgtgtgctttccttgtccttactgtagtttgtaagcaaacttgtacctggcatcagactcctccttgctctgtctgttggctgggctggataccacatgaagcctgaggttatggggtgggcattaaatacataccttgggtatagtttcctatgcccttaagaccttgggctgtctgtgtgtcaggcttgcccagctcacggcagcccccaaagcacagccttccaagaggagcgctgggaaggggacactgtcgggcatccctgttgggcatcccggccctcctccgggtaggtgttgctcttagcagcgcagggcagcactcaaacccccactccacccttttccatccttctctttcttcctccttcccttcctgagtctgtctcatactctctccttcctccctagtgaaaaactgagagaaatataacagaaaaaaaaaaaaaaacaatgtattcttgggttatgaaaatgtctgttcctcgatgtccttgtctgtaaagtaagacagtagtgaactctgtcctgtcctcgctgctggctttggatggtgtccttagcactgtgtctaagatgccactggccctgagcagttctgccatgtggccacgagtgacaacaaaacagctttcaatccaaacccctgcagggtcctcagtgagcgccttctgtggggtttattttgaatgatcagttaatccgagggcactagggaacttaaagaaagatgggaccatcctcagtcacctcgctctctgccagcgcatgctcagcgcttggcatatcccctcagcctttatttcctacgcataccatttttttctttctcgaaactgtagtagcagaatttcatactctgcttttttacacggggcacgaggcagtcagtaaagacacaggatgcaaagcaataaagaggccatagtcctcgagttgcaggatgacagaggagccagaccccaaggctggggcttcagcctgcctccgtggggagacctggatagtcctccagttcctggctgctgtatgaaagtttggtctgtggggctgtgctatgaactgcaccccaagcggcactggggtggggtggcggccacgctgtgctttgcttgataggaagcctctctgcgacgcgtgttgttacacagtggcacccttccccaccccagcagtgcagccatccaatccatagccttgcacaacctgggcagacatcctgacgctgagccccgtcgccatccccttcctgttgtagagcagacataagttctccggacagcagacttctggggtgctggctgacacagggagcaggggggacttgtgtatgagagggtttgtaacaagttactcttgccttctttgtgacagtagcctgtgtgtcaaagagcagggcctgagaaatgctgttctagagctggctttgagtaggaacacccccacccccaccccacccgcccggagatgaagggtgaggccggcacaggcatgctcccatgttaactgctgtccctgtgtccctgatgtgtttattttcagctgagtaatcatttgtttgaagaacttgccatggatgtgtacgacgaagttgacaggcgagagactgacgcaggtgacgtagcatgcggcctacctactcccggtgggcggcggccagctgctggcctgggtttcttcttgtccagatgcccctgtcctcatagcccatgtgcagagacgtgctttcgcgcgcgttggcttccaagtgggcttccccgggtctcccgcccggtgcatgagccgtgccaccgcgggggtgctgagattctctctcggctcctttcttccggctagtctggcttgccacgcagaaccacagtaccttggtaaccgagacgaccgtcgtccctttccttccggtcaaccctgagtactcctccacacgaaaccaggcaagtggctctgtatgaagagttactaatagtattatttggggagtgactgatggcgtgatatttggtgtccttgtggacatacacggaaacagacggtgtgagaattggtaagagaagtacaaacgacacacaaacgtgaggagaaaggataaaagatcgtaaaggagactccaagttgtcggggagcatgggggtcccatgccactgcctagcttgtgggtggcttgttggcttctggtggggtcctgttgctcaggaagctggaacagggggacctcaagctggcagctagcctgggctacataccagggccatgacagagatggtggagagaacgaaatggggtaatttgttttccagttgatccaaagcctcagatgtacaaaggagtcctcagttaaggctatttccaataaaatcaaagcagacacatacatgtggtttccacccttgtgctgtctataaccacagaacactgaagggagcctcagcctctgacaggagggagagaaggaggagaggggttggtgctgaataatggctgactgtaagagcagacccactttatccctaaagtcagagatgtccctccagattcacttctcacgcactgcaaattaaatcactggtactagaagttttctattctggtagctctgaagatcaaagtcagggcctgatccttgcttgtcaattgtcccagcagtgagctatacagccagaaccattttataattcattacagtaatctctgctgtagaaatggagatgttaagtcctctgccacaggaaatattagtgttgactagagagtgatggtggctgagattccatgattgagctgggagacccttgcgtcagctgcagtcctgggcactcgttgtcgcccttcgcgcttacattcttacactgggtaatatttcccattctcttctctcccttagggcagacagaaattagctcggtttaacgcccacgagtttgctacgctggtcatcgacatcctcagtgatgccaagaggagacaacagggcagtcctctgtccaggtcaaaaggcaagtgtccagcccagccccagccgagagcacctgggccttctgggatgcactgtggagtcccgagctggaggtgatggggcagtcataagaacagccatcctgagagtctcctcactaatagactatgacagagaagtacctgttggaaccctgaagaataaggcgtacctcaaagttactacgtataattcacatttattttatatgtattttttcataatcacttattttccccaaaaattggcatgttgaaattaacccaaaagcctaactcttaaatttattaaggacataaagtgaggcgatggagactcttgatggcagctgtcacttaactcagaacccctgcctctgaataagtactgtttactgctataattttaaatgtctgtagcgagaagccttgggatgtccgctgagcatctatttcagaatggctcttacaggccctatctccagacgtagggcccgcttcctcctagccagcccttaagtttgttcttgttttttttatagatacaggaactatgcctttttattttgaggtacttgaacaagatgtttgtaccataaaaattaaggttcctgtcaatatcacactcccctaaggcaggaattattaagtaacagtaatttatgtttcttcttgattgttgaggaatttggtcctatcaatccagccagcagtaaagatgctctgagaagtggcattaaattggtgaggttgcagtctggagaggttttgtataaacttgaaacctcaaaatatgcccactctaaaagagaaataatgagagattccatattgtgtataatgtcaaaaacattagaaacaactaaataataaattctagagaaacagtcacatgattaatgtacagacatctcctggaaatacttcatggtgtggagtaaaacaatacagtctttaaaggtttgctatagtctctgttttgtaaggtgtgtgtattaatataagtaactgtacagggaaaggtgccttccccagatgaatatgcacatgtggttgctcctcgacagcagatttgatgcttgtctggatgtctggctgaggctgaggctggtaccctcctgcaggtttcagtttcataccctgtcactggcctcgcgtagactgctcagtgccatgtttgcctgtgttctcatactttttgttggtgatttcactgctctaacaaaggctctgagcacaatgggaagatgttgaacagtgtgcctgcatgcaagagggctaaggagaggttcgtgggaagctgtgtgtgcacagtgagcatcttcctggtgtgaatggagtggcctcagactgtggtcatgaatccacggtatgtgtcacacagggtgtccttaaacagaagcgtgtgtggactggctcatgataaggctgtgactggcggctctcaggaactgtagtcctttgtctcagtgagtgacaagcttttagcctgtattcactgaggacaagcctgtatgtgtgcatatatgcttagaacagtaactagaagaagcaggccagcgtgtctcagcctgggtgatcgccactgtccctcacgagtggttacagcctctgtattcagtctttgtaccgtatctctgtattggcatgctggtgggttttgttttgtttgttttggtttttgttttttttttttaagacagggtttctctgtatatctctggctgtcctggaactcactctgtagatcaggctggccttgaactcagaaatccacctgcctctgcctcccaagtgctgggattaaaggcgtgcgccgccaccacccggccatgctggtgaatcttaaagattcattgtaaaagttaaaataggaccgctatatcttaagaaatcagaattcactgtccagatgaagctgtctgtaaaacatctttggaaattggagcttaacttgagttgcctcaaataaaccaaaaatgtttggggatttctgaacacttattctaaatgtgcaagagtgtgtaagtcactgctccccgtctgtggaatggacactactgataatgtagacacgtgtgtgtctacttggtccagtgtccccttgtctgtctcacagcctggatgtatatgagtgaccactgctgttcttgtctttgcacctgacttctaggctgggtgttttctctctttttttttttttttttttttggattttttgagacagggtttctctgtgtagctctggccgtcctggaactcactgtgtagaccaggctggccttgaactcagaaatccacctgcctctgcctcctgagtgctgggattaaaggcgtgcgccaccactgcctggctcaccttatgttcttatggctgaagcagtgccctgtgcatgcaaacctgtgacttcccccctcagtctggcagccaccccaaggggtgtggctgagctctgtggtgagtgggaagcattggaactgctctgtgtgactgtcccttaagcctctgcgggcgttgctctttctgtcattttcttcaccctttaatggctaaaccagaaagtcaccttagtagttttttagaaggaaaaatatattttaactctgaagtagtttttctccttctgtgaacagacaatgtggagctcatattgagaacagtcagtacccagcacagcactgagagccaagacaacgaccagccagactatgacagtgtggcctccgatgaagacacagacgtggagacgagggcaagcaaggcaaaccggcagaaggtgagaggacacacctcccacaggacagacgtgctcctcctaaaatgtgttcttgccctggggctgtagctgaatggtggagtgctcgccagtatatacagggccctgagtttatttcccagtgccaccagaagacacatacacatggcagaaaaagtaaaactggcagaagggttaggccttggaaggtgctgtgagagggctcaagttaggctcactgctaactcaagccaagcaaagattaaataaatgctcttaaaataaggccctgtcactgagcaagtgaaggatcagcgttgactctaggctgaggtcaggactggaggcttctctgtgtcccagtgtgcttagctcctcccctcatgacctcactgatggggaagcaggggacaggagactatgcactgcacaggtggtgcgcatcgcaagagcagacaagctggaggttaggagtttggaagagagagcatcaagggaggagctcttgacagtacagggctctgaaacaaggcctcatagatgtgctgtcctgcacccgcgtagaaggcagaacaagaaagcctgggctggaacagcctagaagagccccacactgtgcagagactctggacagcacagtgaggacctcagctctaaagggcattgcagcacggcctcagggctcaggccagtggggcccagggagagagacagggcactgttgagtgaacaggggacagggccaaggggtctgcaggctgaaccctcaggacagactcagataggcactccacagacactgagtaacaaataaacaagaagctaggctgccgaggtctgcaggtttgaagcagggagataagcttagatttgtccagcatttgctgtttgatattggcagaagggacgcccctacctggactgccccgtgccagtccactcagttacaggcagggtcattaccagtccctcagggacggaccatccattgattggctgggctcctgctgccctttcagcctctcgctgagcactgctgctggactctcaggagccctggcctcctcaggcacgccttccagctcccccagctcctccccaggcagcccagccagctgctgcgtcccacccgctccattgtctgtgtccccagcactcagtccctctgtcctgccttggaacaccttagccatcccctttcctgtgctgctggagtgtgagcgccatggatgtagcagcctgtcctctctgtcacagcgcactggagactgactgatgctcactaggtcatgtggagcgagtgaatccatagagtaagctctttaagttagcaaggacagtgtgtgcagggcagcgcagagccttggcagccagtgtccacagaggtttgcagcgctctgcctgctcctgcaggaagctctgcagagtgtcatgagtcctggagtgcccctgcctttcatatggtccacctttgcagtccagcgggcgtggtggagatggacattctttagctgttagtctttaacatcatcatcgcggattgtgaacattttcccggtttatttttagagcctagattcagatttgtcagatggaccagtcactgtgcaggaatttatggaggtcaaaagcgccctagtggcttctgaggccaagagacagcagctaatgaaggtgaataacaacttgagtgacgagctgagaattatgcagaaaaaggtaacatgttaataaatgccaggatggttgactcgttgatcccggtcaccatgcttatggtcagagggaagaaaacatttactataacagacatagacatactgtcctcttgaaagcaggctgtgtgtgtatgtttgaaatgcagcgctctgatgagaaacgtgttcagtgtagcacagagactatagcccagtggtgggtggtgcatctgcctagcatgagcaaggcctgggccagggcctgtgcttggctgggattctaattcagtgtatgtatggacacaaagccttgggtttgcacctaaaaatgcattcagagtaaactcccctaggagagacctagcagcccactattggtgtgagatagcataactttgccctgtcctgggctttctgggaatctggaagctactgcttgggtgtgattttccacacctattgctgattcttaaaattaatctcaccatgcagacagagcaggcagaagcacgtgcttctcagcgtaagccctggcacgtaccatgtgccgtgctttctctgctggcactggctctgactgctaccctggcaaccctcgccagcatctcagcctgctgtcaccacctcgagcagggcttgacacacagaagactgccacatgtctgcctgtactaacaaggagaggcaacccgtgtacgctgcactatcctagtcattcccccagggcagccgttctcaacctttaggggacgtcaagcaatcctttcacaggggtcgcctaagtccattggaaaatgcagaattacagataggaagtagtaacgaaataattttatggttaggggtcagcacagcatgaggaactgtgttaaggggacacagcgtcaggaaggttgagaacccctgcttcagggactgggaactgcctgtaggagaggtcagtggggaaggcagtgcttgggatgatgatggagagcgacagatgggaaagccagctgtgccctagactctgggcaccgtaagcatcgctgactgtcgtgagaaaaagctcgctatgcaccccacgcagaaaaaaataggctggctttggggtttatactattgttgaggaacgcgatctcagactcagagtattgtaaggcctggtcacaaggtacatcttctcaaggaaagccaaagggctctcccactggctagggagcactcccactggctagggagcactcccactggctagggagcactcccacgggctagggagcactcccacgggctagggagcaaggttgtgagagctctgcagtcagtcagtggctcttgtgctgtagtgcagaggctgagagactgagctctcgtggcctagcgccccgacctgccttgcagccccttctaggctagtgcacagctgcgaccaagagcctgagaggcctctgccgcagcagaggcctgacatctcctcggccttttctgagcagggtcacacagatgtggtagttaatgcagtcaccatcttaccagcttcttgggtgatttgtttttctgaaacttgcctttgattgttggtctgcggggcttcacctttttacccatagttctcctttagtgttcataaaggttacatgtgctggggagatggcccaggtcaaacattgaaagacaagaagaggactgaagtccagacccccagagcccatgtgaaagaccagttgggcacagtggtccacctacagtgccgtgcagcaagagcagtgacagggagtccccagagcaagcttccagccagaccagctaacctgtgtgctcaggctcacagggagagtgattgtgggagataccagtgctccactcgagcctcccatcacatgtgtgtatgcacgtgtatgcttaagattaataaagaaaactcagtgttggctgaagagatggctcagcaggtaaaggaacttgacagctgcagaagctgacagcttgagttcaagtcccagagcccacagaaagccggagaagaagcctcagagttgtcctctgacaccacacgcagacaccaggcacatgcagacacagtcagacttcatttttattgtaattgctagagacagctcgaatctcttgaaagcaagtgtctagagtttctctagagcaagaattggggagagacttagtgggtaagagacgagtacccagcctgatggcctgagttcaagtccctagactccctgacctccacatgtgtaccgtggtgtgcactcaccctgacacacatgcacatacactcagacaagccaagtgttgacgagcagagccattgtccattattatcatacagatgcctgtgatttttaaactagtgaattatctgtaactttttatttcctgccatactttttccagagtacagcctggatcttttttttttttttttttttttttaaagatttatttattggttatatgtaagtacactgtagctgtctgtcttcagacactccagaagagggaggcagatctcattacggatggttgtgagccaccatgtggttgctgggatttgaactcgggacctttggaagagcagccgggtgctcttacccactgagccatctcaccagccccagcctggatcttataaacattattaaaatctgtcttaggacatttttataaatgcagagtaatgaatttggacacagccctgtaatcccagctactttggaggctgagatacaagaatcacaagttccttcttgggctaagaactagttcaaggcccgcctgagtaacttggactctgtctcagctcctgggcatgatgtaccagggggaggctctggtagaccatgtgcctctgtgcttgaggccctgggttaaattccgtgtgtaggggagaggctgaggcgactgaaaccagggtctgtgctcatctcagaaggcagctggccagagtccagactgggtgtttcagaggtagcatcagtgttcagggcgtttatactttcacagcctgctcagaatagcacagagagcttttagctcaggcagacatatgagccctgcatctagggatatagtttcttgtattattccctctctctggaccccacccagtttccattcatatcccgacagcccacacacttgtctgtcctggaatgcaagaatttctagaggctctccctctttgcaaaggaggttacatatataggcggggaagccatgcttgtgtagaggtaggcactacagatagagcatggggcttgttcacaaagcaagggtgtactgtttttattttaaagtttgtaatagagttggcaaagtagtgtgatttatatctgatctttcacatttaacatttgtttggaaacgatgcaaattaatgaagagggtcagccactagtgatgtatttcccacagattggtgctttctaaataaaacttgaaagttaactcccaatactgcatgaccttgctattggacagtgaggaccccctggtgcagacatggttgcttacggacttaaaccttggcactggatgacagcatggtcaaagtgtacgttctctcagagaaggcagttggactcataccatccccagcttatgctacacaaatgcggggctgaggcagcacagacacggtcacttgtatttaagatgccagcctcataattccttgctgatctctgatctcatgaagcagctcacgtgtgaaaattgcaaagaatactcagggtctctgtgtgtcagtgtctaaccaaagtgagctggcaccaggtagcccagcccactcaaggccagcatcactaactgcatgggtcaaaggagagcgaggtcaggtcacagccctgcagcaaaacactgatcaccaagggaagccagtggacctcgggagtgcccttctcgtgaggacactaacctagttcaagaggttgccggtttcttgtgatacgttaaattagcaaacttaccatggtttggtcccttatattttttttaaagatgtgcttgaattgtttagaatatcaaaaatgctacataataaagacatttttatcctaatttttcttgttggcgttttggaaagcaatgggtgctggaatttcccctgggctgacctcaccttttcttgctttgcactttgggctgcttccatggcatctcctgtcacttccccatttgcagatggctcagggccgtgtgaagagtcagagtcaatgttctgaatctcttcctcgagacagctttagaatgacccagagtactgctggtctgcacatgttttctggccccaccatgacaactctctaggcgggtagacttgaatttctcatgagcctgtaggttattccggaaggaggaggagttgtcatggcttcgccttgcagccccgctagctttatgtcctcacaaggtcgtgttacgttggtgtacttgactttgctttgtctgcctggtgtgcaaaaacacagacccactgccaaatgtttctttcagcttcaaactctccagagtgagaactcaagcctcaggagacaggccacagccagtgcctgtcaggtgcagactggctctgaccacaaggacactgcaagccactcgtccctaaagcgacggccatctgcccggggcagtagacccatgtccatgtacgagactggatcaggccagaagccatacctcccaatgggagaagccagccaccctgaggagagccggacgagacttcaacccttccccacgcatgtgagtagcactgctgtgtgtcccatttctgctgtgcagtctgactgtgtgttccctcctggtcaagccgggcttgaggactgaaggggcttggctaaagttgggcgttctggctctcgctcagcccctccccttcagttcctctgtttctatgatgtcattcccaggcagcctctgttggcatgtgttgtgtagagcttccttcctgagctctacaaacagaagccagttgtaaaggtcactggcagaagtgtctgtcttcatcataggcggaggctggggctggagacatggcccagtggtaaccacactggctgctgtcacagaggccacccaggcggcacatagcccactcccaaccagcttaactcttgctttaggggatttgacatttcctctggcctcccagggctctgcatgcacacggcacacagacaagcaggcagaacactcatacgtaaaatgatctttttaaaaacaacagagtaggcagaggcatgccctccttatgagctggaactcccctgtgactggatacatagagttgagagagtctgggcttcggcagcctggttactgacctcacctaggctagtagcatgacttggacatttcataaagatgcagtgtaagcagccattataccagcacactcaggaagctgaagcaggaggattgcctggaccacataagatcttatctccaaaaaaaggaaaaagaaggaaatatgtaaataattgaaaatgtccatctgcccacagtgtctgctctgtggtaggctctcgccgaccacagtggtgcacgtgttgggaagccaagttttcaaacattaaactagtctgtcatttggactgatctattgtaaagataccggtttccacagagtgctccaggcataaactgccttacgtagttcttccttcagagtgtggtattcatcctttggaatgtcaaaattatttcttcaaagtacatagagttcttcaataagcttcttagggtaatgtgaagcagatgataagatctaatacatttggagactttagcagtgtaagactgcagtaccgtatgtatccaggaatccattgtctcagcttctctttatgtgggtttaatgcttgaagaccggtcactgacctgactgatgttctcagtgaaaggagcctcgttttcatagagctgagaacaaaacttaggcaacctcaccttggtagcttacacagtgcacttgatcctagagggagtgggtgtgaggctgtggctgtaccgcccagtctgacctgaggaccagggtgatgtgcacacctgttcagagtcgtccatagcgctgtgtggttttgtccctcccaaccgagagcaagcagcactgtaggtgctaacagtgagtgccaagtgtagctacgatggcggtaggatctcttccttaagcacaagtggcctcttcagtgcagagtggtttccagcaggccacttgcctaattagggatcattgccacagctgtcaccgagctgagggacatgtgtgagctgtgcagtgggaggtggggacgtgtttgttttatgttttcccaagcgtgtttctctctccacttccagattgggaggagtgcacttgtgacctcctcttcgtctctgccctccttcccctccacactttcctggtccagggacgaaagcgcccgaagggttaagtacactctgactggtctgccctggaggagggccagcaccccttggctttgtgcccccgccccttcctaactgccctctgtcctgcatgaagcagctttgctcctgggttctcatagcagcaggcacatgcagccgtgcacatccggcctggagagagctggccttcctctgggcctccacgctgtgcgccttccacgctgcctctctcacctgtctaaccacctcccagatcacctagagcacatcttccgagcactgtcgtgttaagctaactgaacttgagctggctactggtcacagagagcagggcagtccacccagggtttttgagatacagttatgaaattaaaagtatatttgggttagcgcaaaagtatcttagcttttttcttctaactgctgacttactttttattagcaccattaccgctgacaagccccacctcagttggtactgtcatgcagaggagaggtggctacaggcttaaagctgtccacttggaatggtaggccggacccttctgctggtgtgtgactcacgccagtggactccctcacacccacctttaagaaaggcagctaaagggtgcaaaagatttaagtgacatcgtccctgttcccaaacagacattgtgtaagaagaaaactcttttcatgtgcacagagagcatgctgctttcctcttgtgggagactggggcaagccctagtgttagaggcctgcccttcggctcctagctcggtctgtctgtagcaagggtgaaaaaaagtagggaactgcaagcaagacaccaccttccccagcaagcccccgtgtggggaagaggaccctgtgcactgccaggaccctgtgcactgccggggccactggctcaccaggtcactctgagtttccttacagcccttgtgaagtcagaggacttcttgaagcttggcacttctggtgttctgagcagccctggaagggcactgtagtctttgttccaaatggtagttacggaagagcaaagaaataaggaaatcccgcagtttgataataatgatgttgagagtcaggtaggccggtcttatcatacaattttgtagtttttttgatttgtagtgtggtagctttgaaagggaccagtcactgaagtgattctgtcacagtgagcagtgacgtcatccagggtcctctgagctcctcctgggggctttgtcctggcttaggtttctggggtttgtctgtgcagagaagtaagagcagctacaaggtaacactcgtgttaacagctttaacactcctggctctgcatgctcactgtaacttccataaacttaaatgccggctcattgaagtgctgtgcactttgacggaggaggacttagtccgtcagtacttgtgcgctgtacttgaggagcgtttcctgaacgctgttagtggaggtgtgtcactcttctgagatcctcaaacagaccctggcacttctgatcactctgggtaatgtattcaatctccaactgtcaccgtgacatcaggggaggcagcagcatcccttagagagatacaggattccaggaggcaaaagattgcaaatttaagataaacctggcctacattagcaacactgtctcaaaacccaaaatgtaagctatggagggtgttagcactgtcttctagatttctctccccactggagcagtttcaatgaatgaactgtccagcataattaaaattcagtttgtgtgtgtgtgtgtgtgtgtgtgcgcgcgcgcgtgtatatgtctgaaatcagggtttttttgttttttttgtttttttaagtaaagattagtcagacattcctttacaggtaggaaaggtcttaggggggcagatttctgagctcaggaccaccagaccctgctctctgcccctgcacaaatactgtgtcccctctctctagtgtcagttacccgctgacttagccacagagcaggaagttacaaacttcttcgcttgataacctcataaagccgggcgtggtggcgcacgcctttaatcccctgctgggtgaagtgcagtgtgtggaaagggtcatggtggaacttaggaagccagccccagtgctcagtatcgtccatagagtgggaaagaggatgtccaggggacaatgtgagggccttgggaggagggggagcaaagcggagcaggtctcaagacgccactcctcagccggctgaaccccaggctcgtgcagactgccccaccgacttcctctagcagccatttttctggataaggctgcacatctcatgtgacttagcaaagcctctacagtcgcagcctttgccacctttccctgcatcagttaaactacctacccgtgtactttaataaccatggcttgaatgctggctacacggctggaaatagctaatcagtaatcagtttagattgctcatcggcttatgctgccatccaggtgagggattgtcacaccgtaagatgaacaacgagagaggtttcttcacacgctccagaccaggctcctccagaggatgccatccgcgccacaccccctcacactgacagaccccacctctagtgctgctgccagtcccgataaagctcattgtaacctccacagttagacctaatctctgtattttcagagatcaatattttggaaaacgagtaaagtggtttggaactaaggctcttccagggttaatccgtgtggttcacaggcagcagcatgggggctcacaggcagcaaggcttccttgagagctcatgaaaaccctcccttgggtcaggttttagcaggagcagtgcaggcttcccaaacatgtagtaatggagggacccgcagagggctcctgtcctctcctttcgcagactgtgcctgaaggtgggcagctagcttatcctggtcctgctctcttctgctgtgaaaccaggcaattagagcctgctaagtccagctctgaagtgtgtgttcagataagtgtgtttgttactgactgcacggcacgggtgtgcatgtgtgtgcgcgtgtggctgtcagactgtgggaggcaccggggtctgtttaggacttgttagtgaattaagaagacatggcgcagaagtcgaaaaggcacttttggacctactactcactcctctttactagatttccagtaaagggctggttcctgtaccaaatgcgctctgggtatgaaggtgacagagcctggcgggcggagggatgctcaacactaatgggccccttctccttttaggcctccagactggagaagcagaacagcaccccggagagtgattatgacaacactgcctgtgaccctgagccagacgacacggggtacgtgtgtgaggcagagggagcagggacacggcaggcctcagcacccgcggccctgtgtctgtggtcataaactatgtcttctgttgctcacactgcgaccttcgggctgtttgcccttgtgctgacatgcaggatccgctgtgccacacgaacgtgagccactgtccacctaagtctcccaagacactgcgcctgcagggatggctgtgtgtagctgtgcccctctgtcagccatcccctccacctccttcaccctgtccacagcagccctaacctcccacccaggagaaaggggaaagctcctaggatggctgtaggtgccgggtaataagcagagcccatgagcctcccactgaacaggagaaagcagaccacaggcacagcctgcttgagtgccagcggtgtgagtcacagacgcaggaaccgccagtgcatgcttgtcatgccgtctacatgcagctcttacctgttcgcaggtcaacccggaagggacggcagcggagcatgctctggcaaggtgatggcttattgccagatacagcagaaccccactcggtccccagccccaccctccccagcacagaagacgtcatccggaagaccgagcagatcaccaaaaacatccaggagctcctgcgagcagcccaggagaacaagcatgacaggtacgggccgccgctgcgctctgggagggggttcccaaacctaagcatcatattagtgtggtcctgtactgctttcatcatgttacaaagaaatctgggggctggagagatggctcagtggttaagagcactgactgctcttccagaggtcctgagttcaattcccagcaatgacatggtgactcacaaccatctgtaatgggatttgacgccctattctggagtgtctgaagacagctacagggtacttatgtataataaataaataaataaatatttataagtaaataaataaagtaatctgaaagtaaatatatctagaaacaaaactgactgcagtgtaccaggggcaggagagaaaccgcctcacagctggcaagcaggccggtcttctagccactgctgcgccaagattccctgggccaaagcttgcagagctgtcctgagtggagctacccgagagctgtctgctcccttgtgcacatagagttgagcatgttaacatggtataaggtgactgtaccttcctgtacagagcagagtgcccacagcctctaccgtgcacagcacagcctgagctcagtaaagaagtcttaaacaagagccacgcctcgagggctcccatctgacggggctctgtgcttgactccttacacagttagaaacactgctgggctacaagccgcacttcactgatcgctctctgatgctgtcagaactataaatgggtaccctgtggccatttctgcctccaaagattacaatatggcatttgcttcgatttggggagactttttatttagaaattctgtcagcaccttttatgatttgctcgcctttgctttgaaggccaggagaaagcggtgatctcagaaccatcggcttatgctcctgaagctggagccagccggcctagagaactcactctctattaacgtcatgggttctgtacctcccctgggacgcgtgctgagctggggcagcctcacccctctgcctcggtatcacacgtgtctgtgtcgtgtcactcacggttgctgaggtgcaggcttgccagggcccacctgcacctccatctgggttctagctagccgagtccaggaagttcccctcactgcccgtcatcgctcctgcagcctcacttgccagggtcatgtgtctgtcatctcaccaacacacacacacacacacacacacacacacacacgccagagtaatataaaattacaaatagagatggcttttaatggattttatcagaagttaattttataatctaaaaaaacagggaaagaatgaaagaatgttacttgagactttgggtctgtgacagttaggaacagctttgccaggccaaacctgccacagccttggctgtgtttccttgcagaaagtgcccccagaagtgctttgctctccctgtgcccatgtccttcccaggcattgggcagtcctgcacacggagccatggctaggtggcagtgttgccttaggaactggccctcggacctgttggtttgtgtcctctagcacacagtcagtcctcaggcttcaaacctgcacgataggctacagtgagtcagccacctgctgctctgtcagtgcagacggtcagagtccttgcagagccctctcagcacacggcagccaccatgcctgtggaaagagacagaggtgagacaaggtcgcctccttgctgctgagatcagattgtctgtgggaacagaattggggggaggggggctcagtggccagcggcaggacggtggcatataggtgccaactgggatttaaggaagtgtcctcagccctttagttgtcatctttatagaccgtaacatggacccttgctcctcattctagacatctggatggcaggcaccaggcgtaaaagagccatggctctctcacctctgtcgccccagtcacagactgcagatttcaggcctagaactgtttgtttcggggtgaatgtgtgttcgtgacaggatggggagcctgccgtccagcgtgcacatagggcaggcacagcctccatcccttcattaaccaagtagaggtggggcctgtccagcctctgaggactctacctctcaagtgtttgagctgcattttaacagcttctccgatatcttacagctatattccctgctcagagaggatacacgttgctgtaaccgagatggcagccctgttccccaaagtaagtctcttcctgtttatcttcaaatgagctgctagatgctgcttccaggtgctctgggccctgtgtcatctagggaggagcccagagcccgtgcacaccgggctagcgcagcaccgcagagcttcagcccctaaccttcttctcacgttcctgttccacattgttttcaagtatgccgtctcaaggggctttgagatgttttcactgtgcaggaacatgggtttaataagacatcaatatttaagtcaggcactgcaaggcaacgcaatggagtttaggatatagcacctaagcttctcttcgtaggccacgagttgcaaagctgataatgtttaaaatgccaactagctgggtggtaatggggcatgccttgggaagccgaggcaagaggctaacctgatctacagagcgagttccaagatagccggggctacacagagaaaccctgtctcgaaaaaaaaaaacaataaaatacccagctgaaagcaatcagactttctggggcagctcaggttgctcttgggaactggctcactccatgttgctgcctccacaccctgcagcccccagcagacggctctgctttcatttcagaaacccaagtctgacacggtgaggacttccctccgcctactcacgtccagtgcctaccggctccagtcggagtgcagaaaggctctcccaggagactccagcttacccacagatgtgcagctggtcacacagcaggtcatccagtgtgcctatgacatcgccaaggccgccaaacagctggtcacaatcaccaccaaagagaacagcagctgagctcgggtgctgtctgcctgcccatagactatacacgaactcttcagatttttacaaaacatttaatgatgatttcagactttttaaaagaaagctcagtattattttttgcatgttttctaacagatttttgactgtaatttaacccttgccttatttgtgcctatttgcaacttagttctgtcctgtcagattgtcaccaagtgcttaggtcatgaccccatgtgttcaaaagtcattgttccaagtgtgttacaactttcctgtcctttacaatctctacccatgcctaaagctataattgatatttttagtaaaacattttcttaagagataagaaagttggatttaaaaacaaaaacaaaaaccccagcagcagcagcagcatccgtcccttccaagcatcgtgcagtcaatcaggaagcttcccttccatcctgtggggtctctccatgtgcacgaggagcagagcttcccacttcctagagagagcgcatctcttgggagtgacaaggagcggatccatttctaactcttgtatcatgttaagtgttgtcttatttaatatttttatcttgattttctatctataaagattttaccatcatgctgatgtctccataatgtccaaaaaagtagttagaaatccaccctttacatcagcttccagtcggccacattcagagcaggagcaccgcccactgtcaggggcctgcttccccgccaagccagacagtttacttagaaccctgagtcagtttcacaggccgtgctgctgacatcctccacacggctcctctggaaggatgtcttcccaggtaagacgcagggcctccgtgtccccatcccctcacgggtagttcatgattagaactcctgtggcgctgcacgaagagttccccgtgtgccctagctggtggcagctcccccacagctccccaagggcagaggttgacacccaggccaccgcagcactggcgctcgctgtgctgaaggcactttgtcgatcgcttctgcctgggtggagctctggccctgacctgagggagcaggcagtggctatgttgccagccaggtgcacagacagccaagggcggctagggaccccacccagcctgtgaggacagcagcttgtcccactcatacccctcatgcagctgtagaaaagtagcctgtggctgccagtgctttggtttttcaaggaaccagaagtttgagttatttcatgacatttttcttttcttttctttttttttttttttggtttttcgagacaaggtttctctgtgtagccctggctgtcgtggaactcactttgtagaccaggctgtcctggaactcagaaatccacctgcctctgcctcctgagtgctgggattaaaggcgtacgccaccaccgccaggcttcatgacatttttctaatcagaaatgtggacagtcaatccagacatgcccactgaacaggctgcccatctcagcctccgctggggtctgtaacctgcacatgagtgaacctgtcagccagccctggaaggcagcatcagtctcccatagaacgaccaaagtgaggtgacctcagtatgctgagcctgcctcatagtccctcttacaacatggccaatgcatcctggagacagcatcacctcaacgtgaggctcacagctcggaggaaaggctcagcgctccaggggcctgcccactcatcgatacacacaagcctaagtgctggaggatgtccagcagggccttttagaaaggggccggccagtgtgagctcaggcatcctctctgacaagcttttctgcgtgctccaaggatgactgctcttcctggcaggctccctggagctggttccagcctgagctggttcccaccatccccagagagagcaggcctctgttggaagcttccgggaagagaactgttagaggtggagtggtgcagtcccgttaagtcacgaagaagaatgctgtccttgagaaatcaaagaacacggggccagtacagcatttccagacgctctcaagaacaccagtcagtcccatgtcctcctcaggctgaaggccctgtgtggaggcctgaggagacagcaggaggggccccacacagtccctcctgagacctggctggggttagagcatactgttcctgtgggcaaatgcgttttgtctcaaagctcgccctggccgtttttgggttttttgcacgtgggtctcatcgcctcgcaggagtgagctctgcatccaatctggctgctctctcccctctctgggattctgccttcccacctgtgtaccccactttctaagatggagaggatgaagacacaattaatggagcaggccctgcctcaagctccgttcccggaaggcactgtggcctcagcaccacggtctttacttgccaaagacgaagtccagtgttgcgtgcactcgggactcttaacggcacagcgcaggggctctgccctgacctcagtgacttccatcatggaatgcagcctgaaagccgcgtgttttcatcctccacagcttcggtgggctcgcagtgcagtttcctttccttctttgtcctagctggctatcacccacgctcttacaaagcaaagtgcagcatagagaaaagagcattgcatacctggtgttaagccccctcgctcctcctcctctggtggcttctcagcatcctgaagttactgtccctgcctgtaaaatccttctggaatctgtgccccactggttatgcaataaatcgtctctttaagtgtgtggtcatgtgccccctctagttggtggatatttccagactaggtgggctggggggttgagatttggtcttttgttatctattgtaaagctaagtgcgggctcccaaaacctggttgtcccagagacaagagagtccccactgaagacattaggtgaccctgtccccatgttaactctgattggaaaatagagattccaataacggggcagaagagacataggtgaagtttgggtttcgagggcttggggttggaggaggaccatgaggaaaagaaggcagcaggagggggaatgagagcagccatgggttaggaggaaaaaaaaatggctccgtgggctggccaattggagttaagagcagcccagatagccgggcagtggtggcgcatgcctttgaccccagcacttgagaggcaggggcaggtagatttctgagttggaggccagcctggtctatagagtgagttccaggacagccagggctacacagagaaaccctgtctcgaaaacaaacaaacaaaaataacagcccagatgaaatatagtaataacttggggttgtcagtaggaaatagatcctaacagcatagatgggtagacaacggcctgactttcatactgtttaaggttatggtgaatatgagggttgtttgtgtctttcatccaggaacctaaacaacaaagtcagggtagaaacctcagaccaagattaaatactttctgcaacagtgggggcaagctcccatgtggctgatctgtaaggagacatggtttaaggagacatggtcttggctcagtctccttcctatgttctctgtagcctgttttgttttgtatttgaggcagggtctcatgtagcttaggcgcaccttgagctgtcatccccctgcctctgcttcctgaacactgggattacaagcatgtgccaccatgcccagctcttcacccatgtatccatctaacccggtaagcttaccccagtcatttttaggtcggcccaggctggccccgcacatgcgccctccttcccaacaggcagtcgggtgataaaactaggcccacagtggggccaaccttagccccaccagcatgttttgagaagtgacttggtacttcagatgaaaggaggaggagacaaaagaaccattcctgggcctctccaagtgaagtctgagcaagatgaagtgttacatataccctgtgtggcccagcttgccaggagagagggcctacaaccctcaggttggagccaacagctcacacccagagtgctcctgagccaggttcccaagaccgcctgcagagctgctgagcctatcccacacacaccctgatctgactgcatgatgtgggcgctagagctgttgccaccaccgccgctgccgccactgcagatcaataccatgccagaaggcattgtgctgctgcaggcagactctgtgaggtccatgcaccacacagcacttccccagctctcggttagccatcgtaattccagctgcagttggctgtgtcaggcgttgctctgttctttcggtgggtgacttcttgggagtaccggggagataccttagccagtaaaggtgcttgcctcgcggcctgacaacctgagtttgactcccaggtcccacttggtagagaaaatcaacttctgtgaattaccctctaaccccacgagtgcactgtggcatgtgtacatccacggacacacacaaaataaccctctacagtcttctcggtaactcacagaggaaggtgcatctccatttgacaggagaagaagccagcacacaaggaggcaaactcgcccagcctggggaaggtgaggaatgttgacagttgatatacctgaggcagagaagccactgcgggggcaccactaaggctgctcaaacaaatggctctcagctgtcagcctggggcctccctaacagggtctgggctgcaagctctcaggccggtgcacccagactgcctggtgtcagccaaggctaacagaaaggactgctgagcctacccactgggtcagcactgtgcaagcatgccctccatctgtagggtgagcacagtccatctcacacagagggacccaagggtcctgcctgctacccagcaagccaagggtgtgaggttgttcaggaacgacctctgccctctgaccttcaaccagactgcaggtcctcacattcactcgctttctgtatacaggcatcagtcatgaagcagggctccaagaggtaggtatgatcccagcagcacccctacatccaaccccctgtgcacacctggcccttgctccccattctgaatactctacagccccctcttttctttcttcttcttttttttttttttttagaaaaaaaatgttttaagaattatttattttggggctggagagttagctcagcggttgagagcactgactattcttccaaaggtcctgagttctattcccagcacctacatggtggctcacaactgtctataataagatctgatgccctcacaactgattcttcagccccaattaaccagaaccacataatcttttttgttgttgctttgttttttgagacagggtttctctgtgtagccctggctgtcctggaactcactctgtagaccaggctggcctcaaactcagaaatctacctgcctctgcctcccaagtgctgggattaaaggcgtgtgccactacgcccagctccgaaccacataatcttaaaacagcaaacagccctgatagagtctttaatgttccctctaatatgtcacaagccaggcctcatctgcactgctctcaacattcttatcttccaggctcctgcagaacatcccagagccctcaacactcaatggctcttctagcccaaagttccaaagtccttccacagtccttcctcaaaacacatggttcccaaaacacatggtctggtaaggtctgtcacagcgacaccccactcctggtatcaatttgttttagttagggtttctattgctataatgaagcaccatgaccaaaatacgtgtcttggggaaagggcttatctggctcacacttcctgatcctagtccatcattggaggaaatcaggacaggaacctggaggcaggacctgatgcagaggccatgggaggggtgctgcttattggcttgctcctcatggcttgctcagcctgctttcttatagaatccaggaccagcagcccagggatggctctgcgcacaacgggcggggccctcccttattggtcactgcaggtttgagtgtgtaaaggggatgacgacaggctgaggaaaagatggggttggggagtaagtccacatctccttcatcaatatgggtgaggcgggagaaacttgaactctgggttggtgtcaggacagatggcatcgacttagctaagaacacagagagcagacagaattctgggttgtgatgggagtctggactcacctgatgactgcctggcaccggacagaggctccacggtgagggcatgagagttgcagaaagcctgcggccccgtgaagtaccaatgtggaggttactgaaaaccaaagcctgcctcatgtcaccctgaaaggcctgggaagtgtcaggatctgaaccttcagggctgcactcctgacatgatggaagaagccagcgacgctgcaggtaagccagaggtgctcgcttgctctgtgggcctgtgtgtacagtgataattctggaattctggtttctttaaaacacacaggaatatcctaagaatgtgctttcattttacccacaggggtagggggtggggccgcttctgtttccccagcccactgatttgcctcctgctctagcagaggtatggtttcgccagctgcagatagtttccacgattgtgtgatgagtttttcagagggttgataaatgctaggggccctgagaagtatggtcagtggttggtgtcatttagggaggttgttatggtttgttagttgtgcccaaagaagaaatgtaagaaattagattcagggatcttctcttctttctttccttcctacttagtggtgggggagaaatgggggcaggagggataaattgggaaaaagaacccacaaagtagcaaagaccagctgtgtgtgtgtgtgtgtgtgtgtgtgtgtgtgtatacacgtgcgtgcatactcgtgtacttatttacaagtgtctttgtactccttctactgtgagtctcaagtactaaactcatcaggctttgcaacaaatgcatccaacccttaagccatcttgcgaaactaatttctattcacagcccagaaaggttcagaaataactctgagctggcagctagaagcaggtggtgtggccagttaggtctaagtgctcagtgcggtcttgggagtcatggctcgggtggcatgaacggtggcgaggactcttacgcacaccctgcctacggtgcctagggaaacggagcgctgggcgtttggggaaaggaacacaggggagctgcggagtgcaaggtagggcattgtagcaactgctcacagagcgcacaactgtgtcctggtgaccataaaggtccccatcctcaaatcaagatgagatgtcagactccacatggctgaccccaagccaggtcatggagagcgtcgcagtcctgaaagcaactgctttagttcatgaacagaaagctcctaaaacccgtaagacccaggtggcgggaaagctttctgtccataaaggaacagagctatgttgacttcctgtggcaccacggtctgtctcaggctgtgctgtccgtgtgtccgtggcgcagtgcagtatctgattcctgccagagacttcctaaggcccggctcccctagggagactgaagagagcagcctagaggacaggctgtctgcacagagcttccattagtccatgcccttagctgcatcccatctctatacagaatgatcgttagaggaacggactcaagagatcttggaccactttaagtcaaacagggtcctgtgctacatgatgacatgccagtaacacccagcgcccaccagcctaacacactagaaagcagcagtgacagcctgaggtgatactgagatagagctttacttcagttagtgagcatttgacgagggcgagtgctcacaaatgtgtagtggaaacagagctgggggccacatccaaggacctcagcaggaaatgaaacaggctgagaaccggttccgtgatggaagggaagtgatacagccctcagagcccaggcaaactctcggttcccataaccaggaacaacaccgtatattcagctagagtgggcagaatctggaatataggggtgaaagccaactcgaggaaggctacggaaagatacaagccataacaacccgactgtcgccatgaggacccatggccacttgtattgggatctaacagtggggacaagctcatctgtgattccgagtctcatgccatttctccagggtcacatgtctctctgggcacttaattcccatggggctgcacactgggcttccacagacacaggaggtccctagtcaagcctctgcctttgtcggctagccaaccaagtgaccttgaggactctttcggggtggcacatgttgggctcaagtgctctgtaggattcttttcttcttggtggtgtggagctgggcagaggaccacacaagtggaaggttaagtactccacgctgagaacccccaacccctaggggtagccctcacaacacttccaaacaagggcgcctttgtcaccggctctccagactgccagctcttccacagtacacacatgggccttggggctacacagctcataactggcaataactgcaccaagacctatgagccctcaatagaataacttctgaacagcaatttgaaaacctaaacagctccctcctctctgtggctggtcctccctgagctgacagctacaggtgagatgagaggaacctacgtattcctgtcatggtactcctgtctgtcagggaacatgacttcttcttagactaactctaacatgtacttataaagcattcctgatctctggcggcactgaagccaaggcctgtcggggtgagaagggctctcaggggacgctgcacacccatggcatcctgacatctatggcccatgatgtgcctgacaggtatggctcaactagctagcagcaccctgagcaatggccagcaccaacaccgtacaactgtctggagcggtagtgagtcggtttgcttctctgtgctcaacgtcagtcccaagcaattctgaggtgtccgtgaagctgaggagagaaagcacataacattccctcaggtcagcagtctggaacactgggaaccgactcccttttctttaggagcacacaagtgggttttcatgtaccgctgagaaagccttgactctgggccataaataaggctctttatgacctgccctgagacacttgcgtgtgctctgtgaagcgcatcctgacacactgatgcatgctcgggtgactttggaaatgctgttccctgtgcttagagccctctgtctatagggctttgaggctctacagcaaatggaagacccactctagccttacgcctcccaggccccgggttctctgacagggaaacaatgaatgctctctgcagcacacacccctcagaatgccaggggccaggcggccctagttccagagagcctagtcagcaggtccctcacaacagacatgacagcctttgctcctacatgctccatggtgccctgctcagggctcacacataaggatgctcagaaagagacaaagaacagaggaaaagggggagacaggtgtagatctcttggtcacctggcttcactggcagctgggacctgatccggctgtcacctctcaccagttatggccagggctcttctagattgcactctgccccccaaccagcagtcagcctctgggtctttgcaaaggctgaagccaaggggatcagagaagaacccttggactatctgaagtcaagtcaaggaatgacagcctttgaacagaggctataaccagtcgggacagacagacacagggaggagacaagaagagctgaggatggcaccatgggggctcgacacctggcaggtacccaccttgggctgatagcccttctctgccatggtcttcgcctcctgctgcagcaaagcattggagtgctcttccgcctgcctggcctcctcctcttc

SEQ ID NO: 1517 - DNA, 2127 bp, Mus musculus
atgtcgaagcggctccggagcagcgacgtgtgcgccgactgcaacgggcctgatccttcctgggcgtcagtaaataggggaactttcatatgtgacgaatgttgcagtgtccatcggagcctggggcgccatatctcccaagtgaggcatcttaaacacacagcatggcctccaaccctgctccagatggttgagaccttgtacaacaatggtgctaactctatatgggaacactctctgctggaccctgcctctatcatgagtgggaggcggaaagctaacccacaggacaaagttcaccccaataaagcagaattcatcagagccaagtatcagatgttagcgttcgtccaccgattgccctgccgcgaggacgacagcgtgacggccaaagatctcagtaagcaactccattcaagtgtgagaacagggaatcttgaaacctgtctgagactgttgtctttaggagcccaagccaacttctttcatcctgaaaaaggaagcactccactccacgtcgcctccaaagcaggacagatcttacaggctgaattgctggccgagtatggagctgacccaggcacacaagattctagtgggaagactcctgttgactatgcaaggcaaggagggcaccatgagttggcagaacgcctcatagaaatacagtacgagctgacggatagactggccttctacctctgcggccggaaaccagatcataaaagcggacagcactttctaattcctcagagggcagacagcctggatttgtctgagttggcaaaagctgcgaagaagaaacttcaatctctgagtaatcatttgtttgaagaacttgccatggatgtgtacgacgaagttgacaggcgagagactgacgcagtctggcttgccacgcagaaccacagtaccttggtaaccgagacgaccgtcgtccctttccttccggtcaaccctgagtactcctccacacgaaaccagggcagacagaaattagctcggtttaacgcccacgagtttgctacgctggtcatcgacatcctcagtgatgccaagaggagacaacagggcagtcctctgtccaggtcaaaagacaatgtggagctcatattgagaacagtcagtacccagcacagcactgagagccaagacaacgaccagccagactatgacagtgtggcctccgatgaagacacagacgtggagacgagggcaagcaaggcaaaccggcagaagcttcaaactctccagagtgagaactcaagcctcaggagacaggccacagccagtgcctgtcaggtgcagactggctctgaccacaaggacactgcaagccactcgtccctaaagcgacggccatctgcccggggcagtagacccatgtccatgtacgagactggatcaggccagaagccatacctcccaatgggagaagccagccaccctgaggagagccggacgagacttcaacccttccccacgcatattgggaggagtgcacttgtgacctcctcttcgtctctgccctccttcccctccacactttcctggtccagggacgaaagcgcccgaagggcctccagactggagaagcagaacagcaccccggagagtgattatgacaacactgcctgtgaccctgagccagacgacacggggtcaacccggaagggacggcagcggagcatgctctggcaaggtgatggcttattgccagatacagcagaaccccactcggtccccagccccaccctccccagcacagaagacgtcatccggaagaccgagcagatcaccaaaaacatccaggagctcctgcgagcagcccaggagaacaagcatgacagctatattccctgctcagagaggatacacgttgctgtaaccgagatggcagccctgttccccaaaaaacccaagtctgacacggtgaggacttccctccgcctactcacgtccagtgcctaccggctccagtcggagtgcagaaaggctctcccaggagactccagcttacccacagatgtgcagctggtcacacagcaggtcatccagtgtgcctatgacatcgccaaggccgccaaacagctggtcacaatcaccaccaaagagaacagcagctga

SEQ ID NO: 1518 - DNA, 2127 bp, Mus musculus; identical to SEQ ID NO: 1517

SEQ ID NO: 1519 - DNA, 67783 bp, Homo sapiens
  misc_feature (34024)..(34043): n = a, g, c, or t.
  misc_feature (39350)..(39564): n = a, g, c, or t.
  misc_feature (50784)..(50917): n = a, g, c, or t.
acaaaacaacagataataccaagtgttgacaaggatgtgaagaaactggaatctcatacactgctggtggaaatgtaaaatagtgcagccacttcgaaaaattgctggcagttccgcaaaaagttaaaacatagagtaactacatgacccagcaattcctctccaaggtatatacccaagataaatgaaaacatatacccatacaaaaacttatacatggggctgggtgcagtggctcatgcctgtaatcccagaactttgggaggccaaggtgggctgatcacttgaggtcaggagttcaagaccagcctggccaacatggtgaaaccccatctctactaaaaatacaaaaattagccaggcgtggtggtgcacacctgtaatcccagctactagggaggctgagacaggagaatcgcttaaacccaggaggcagaggttgcagagagctgagatcatgccactgcactccagcctgggcaacaaagcaagctgtctcaaaaaaaaggaaacccacaaaaacatatacacaaatacacacagcagcgttactcataatagccaaaaagtggcgacaacccaaatgtccatcaactgacaaacggagaaacattttcgtctaacaaacaaaacatagtacatccatgcaatggaatatattcagtgataaaaaggaattaagcacctgaaacatgccacaacgtagatgaacctccaaaacattatgctaagtaaaagaagaaacaaaaggccacatatgattctatttatatgaaatgtccagaataggcaaatctagagacaggaagtaggttagcaggttgcctgggctggaggggttggggagaaatgaggagtgactactacaggtatggggtttctttttcgggtgaggaaaatattacagggtgggtgcagtggctaacacctgtaatcttagcactttggcaggccaaggcaggaggactgcttgagcccagtctgggcaacatagggacacattttctctacaaaaaaatctttaaaaattagccaagcgtggtagtgcttgcttgcagtcctagctatttgggaggctgaggtgggaggattgcttaagccgagaaggtcaagggtgcagtgagctgtgatggtgccagcctaggcaagagagtgagaccctgtctcaaaaacaacaaaaaaacaaaaaagaaagaaaaagaaaaaaatttctgaaatttgacagtagtgatagttgcataactcagcagatatactaaaaaccattgaataacctttaaatgtagattatataagtgaactatatcgcaataaaaatcttttgaaaaaatcaatctgtatatgtttatacataatacataaaacgaatctctcatgtactgtttgacaagttgcttaattcctcctgagcttcagtttgctcgcttgtaaaactgaacaataaaaaaaacctaccttacagttcttacaaggggaaagtccttaacttagcacggtgcttgacaccacagtaagtgctgagaagagttacctgttattatcatacgcccacactatgtagtttcatatagctgtcactttctccctaaaagggatttgctcaaattgcattacagttattagtggggcttagaatcttcaactaataatatgagttcagagaacaaggagtttcagaatttagctggaattcactttttcttttgagacagagtctccctcttgttgcccaggctggagtgcaatggtgcaatcttagctcaccgagatcttggctcactgcaacctctgcctcccaggttcaagcaattctcctgcctcagcctcccgggtagctgggattacaggcatgcaccaccacgcctggctaattttgtatttttagtagagacggggtttctctgtgttggtcaggttggtctcgaactcccgacctcaggtgatccgcccacctcggcctcccaaagtgctgggattacaggcctgagccaccacgcccggctggaattcactttcgaaactgatcatttaggttttccttttaagtttctttagccatgagctatacccaaataaaaatacccatcctcctttaactaggagtttccttcctatttgctcatttcagctcatccacttttcttgctcaaaagccttaaaaaaaatttattttttttttgagatggagtctcatactgttgccgggcctagagtgcaatggtgcgattttggctcactgcaacctccgcctcccaggttcaagcgattctcccgcctcagcctcccaagtagctgggattacaagcacccgccaccatgcccagctaatttttcatatttttagcaaagatggggtttcactatgttggccaggctagtcttgaactcctgacctcatgatccacctgccttggcctcccaaagagctgggagtacaggcgtgagccaccgtgcccagccaaaaaaaatttttttttaaggagacggagtcttactatattggccaggctggtcttgaactcctgtcctcaagcactgaccccacctcagcctcctcaatcaaaagccctctttactatcttgccatcctcctgccgagctctgaggccaggctgcagaaccagacaactggacaccccttccagcttgcccactagcctcaggtgaattatcagttcccctgtgccttggtacctggcatgcaggaagtgcttcataaactcactgtcacctttagggggactccagcaagaggctgctggctagtcctcctctctctcaacacagacaaccaccctcactcctcttcactctcagaccatcctggtcctgtgtggcccccacgctgagtcagtggaaacaggaatcttgaggccagtttcctaaggtgagcttgaacccccgatgaccaagggggcacatgaggagagcaggctctaggctcttcatcttggatgcctagcccatggctcagcgatttgaatctgtgcccggggcctcacctggcctgccccaggctggagtgagaaccccaggaatgtcctcctcttacctaggtgctatacttttcacctgctggcttcctaaacagggagcctggctctagagtcaggcctcatttgccaccctccacctcacacaacccaggttttccaaccctgtctaaggtacactgactcacctttgcatctgtccccttaagtgttcatgtctcaccatcagtaagaaggccaaagaagtttaacagacttctttagctaagcggccaacgacataagcagaacacaaacagtttcaacttcagcaaccaacttcaaggccccactgaatattaatgagctgatgggttaagaggcactttattaaatgcctctgctgatcaaatgaaggcctgaaacaatctggtagttggcatagttacacaactgcctgctattagtgagacagtgggattggggctggctcacacacacagaaacacgtgcttatcctcttcatctggataaacttgattctttcttgtgttgctgttcctggaacaggaacaaaaaacctggaaaaaaattcttacagctatcagtatacatgctccaagtctcaatcaggtgatagacggaatgaggaaactgacagcagaaactcaccagcaaacaaaacattaagggaaacagccactttattgctggggtgataagaattttttgggttttttttgttttttgagtcggagcctcgctctgtctcccagcctggagtgcagtggcacgatcttggctcactgcaacctcagcctcctggattcaagcgattctcctgcctcaacctcctgagtagctgggattacaagcacgtgccaccacatccagctatttttgtatttttagtagagacggggtttcaccgtgttggtcaggctggtctccaactcctgacctcaggcgatctgcctgcctcagcctcccaaagtgctgagattccaggcatgagccaccgtgcccggacttaagaattttttgtttttaattatgcaatcaatacatcttccttgcagaaaaactggaatatagagcaaaaaagctcaatccccaggtttacaaatgatgattataatagcagcagctactagtaaatattgtttccaattaccatatgcctgcactttcaggtccattatcttccttatttattctccataatcttgaaatgaagtcatttttactgaaagaagtatagtaggggttaagaatacaggatttgggcaaggcacagtggctcatgcctgtaatcccagcactttgggaggctgaggcgggcagatcacttgagtacaagagttcaagaccagcctgggcaccaaaagaagtagattcctaaaaaccaaaactggtcatttttaaagtgtcctagctgagtcttacagtttttacctctgtaccatgtctagtaatagaaaaggaattaaatgatcagtatactaaaatgcctaatggtgaatcatttagtctgagggcatgtgtcatatctccttaactcttaaatagttggtctgtcatctaattaagaacgatgactctcacaaaagtttatcgtatctggaattctttttaaatgaaaaaaggccggcaacagtggctcatgcctgtaatcccagcactttgggaggtagaggtgggcggattgcttgaggccaggggttgaaaccagcatggccaacatgacaaaataccacctccactaaaaatacaaaaattagcctgtaatcccagctactgaggaggctgaggcaggagaatcgctggaacccgggaggcgaaggttgcagtgacctgagatcgcgccactgcactcaagtctgaatgacagagcgagactccatctcaaaaagaaaaaaaaaaaaaaagaaacagaaaagaaaagagggtaattttggacttcggtgagggctcaaccaccttaaatatggcaggttgcaagcacacagcttgcagcacccattcaccaaatggagtaatgctaaccttctcaatttttgtcaaccataagacaaacaatcctcctcttcctctacaatttcttgacaattatagcaccaattttgagccattcaaaaaccaggtctgtaagacactggataaaatgtatgaagtcaacaagaacaaccatactagatttcaggggtaatcacaaatcctcatcctaactgctaagtttgttagcttgaaacttgagggcaccaatacctcccagaattgttgggagactttaaaagcagagtttctcagccaggcgtggtggctcacacctgtaatcccagcactttgggaggctgaggcgggcggatcacctgaggtcgggagtttgagaccagcctgaccaacatggagaaaccccatctctactaaaaatacaaaattagccgggcgtggtggtgcatccctgtaatctcagttacttggggggctgaggcagaagaatcgcttgaacccaggaggcggaggttgcagtgagccgagatcgcaccattgcactccagcccgggcaacaagagcgaaactcagtctcaaaaaaaaaaaaaaaaaaagaaggaaagaaagaaaagcagagtttctcaaccaagacgctgtcggctttgggggccggagaagtcttagttgcggggggctgtcttggccattgtaggatgttgagcagcataaccggcctctacccactaccagaagcacccactccccactttcaacaaccaaaaatgtcccatacattgccaaatgtccccggggggtcgtgggtgcaaaatcacctccaactgagagcactactgctttaaagagatagcaataatgaaaagattaaagcatcaaagcactttagaacaggaagggattttaaggagcctgagaacccgtgattctcaaactttgctaggtatcagcctccctggggagtttgttaaaaatgcggcacctggacctcaccccagacctatcaatagagtcaagtgttgggttctgccccagcaccaacatcctcattctacagctaagttaacgtcggccagagagggaaaatgccttgcccaaggtcacagggcgagttagaacctggactccaaaaccaaccaagcccttccttacaacaaggagagtgtgctattcttacgtctttgaggcagcagaacctaaaaatggttaagacggtgcattccggagccagccggcccgagttaaaatcccgacttggcatttatcagcggggcggcctcgcacaaggcacgtagcgtctgaggacctgtttccttctctgtccagtggaaaagtaacagtacctacccaccagcgttattggaaaggtgaagagagaagatatttaaaaagcccgtcgcacggtaagcactcgatacgtgtcctattattaggactgtcccacacctgcaaagtggaaggggtctggggatcccggggacagagggctggaaatgggctcagggaggcgaaacgacccccgattccccgaagtccccaccgggagacggacccccgccccgcccctcacctggccctgcagctccttctcgagctgccggtagtcgtttttccagactaggaggtgcagggggtagtggtcgcccgcgtcgcaggccgaggacatggcgaggaggccgtaacctggtcctcgtcgcccgccccaagtctcggccccggcggggtctcccgcgcccgcctgcctgccctgaggccggcgagcaagcgagcgtagggcgtgttacgctgccggccggctgagccggtcgggtgcggggcgcgcgggaggtccggggtcgccggccggctcagggaccaggtcggccgcgcccaccccgcgccccgcggcgttcccgcccgcgctgacagctcgcggacagacttctgcggacctaactgccccaaacagggaagtgcggagagcgaaccaccgcatgccgcggcggggataggcgaccttgggcaccgggtccggggtccgcgccattgcacccacctccagctcacaccgagaaactcagtgcagcccacagaacagagctgaggctcattctcttggccaaagatctccacgcggaaagttccgtctacctgtccccagcttctttccccctgctccagtagccccatgtggttcggtccacaactgggcctcttccattggctctgaagtcagggggtgacaactgagccccggaccaaaccattccagctgccgacacccttgcagcctttttggagcaggacagatgcttccacgacgggtcaaaagccattttggaagtgggcaacaccggacaatttttgaaggaggaacgctaaaccctggcgaagtggcttcaaatacagtatttgcataaaaggggatatttctacttcatgatttctcaacctcggcacatattgaactgggcagtttttgtgtgggggttgtccggtccttgtaggatgctgagcagttgccctggtctttctccccactcaatgccagtagcactccccaaaacatgtctctccagatattgccaaatgtcgtctcggggagaaaaatcgtcctcagttgagaaccgcttctatttgaactccgaaccgggttatgattcaatagctaactatggtggtgatttagtccatgtatgaatgtcatttttaagctagctttttggatttgaggttatggctgaaaggactgataaataatatacatatttgaccacagtctgcgaatatgaagtttattctttgagtttcaggcactatgcctccttgactcaatgaagaaccaaatcaacttacagctagctactcatgggcttgaactttctgctgctgcttcagctcagctgtctacaactagaccacatagctggatgaagctatttaatgcattgtgaaaacattccctctgccctctgagtgtatgcacatccagctcttcagatgcctgcaacaacagctgttcaagaatcccaacctaatccattctccacagatgtggagcccagaagatttgtgagttgttaaaccaaaacaggatgcaggagcaccaggatggcacccggagactctaaccatggaatgcgtgggaattctgtgattatttctccatcacacatttatcacactgtagagatggactcaagaccagtgcttctgaggccttttccagcacttctcattctttcagatgccttttgcaacttaacgttctccttcttcttcatcatgccgtgtttattgaaaatctccctatctcattaatcagaaaaccccataatgacaggaaccacatcgttttgcttaccagagtatctaaaaccaaaatagtacctggctaacaacaggcattcaatatttgctgaatggagatcatagctgtgtttatatgtaagacagacaataagtagtcattggtattagggtcacatctcctttctccttcacactgatttacctcatttcattgtgtttatctcacaccattttgtaaattatcccatgttagctattgttattctcaaattccacgcatatgaagaaaaacagtaattagaaaataatagcaatatccataattatgggagctactatttactgaggggttactatccagcaggtgtatcacatttttcccataatttattccatctgtccttagccaaaatgaatgtttaactttgctggtcacatacaagttttgtcgcatattcttcttcctctttttctttatttccctctctctcttcttcattttcatctcgcaaccctttaaaaatgtaaaaatcattcttaagtagcaagccatacaaaaacaaatcgtggactagaagtaaacaatgcattatcttaattttgaacatgagattaaaactgaagcctaaggaatcatctaatatattcttttttgttatttttgttgttgttgttgaagttgtttttgagacagtctcgctctgtcccccaggctggagtgcagtgacgcgatctctgctcactgcaacgtccacctcccaggctcaagcgattctcatgcctcagcctcctgagtatctaggattacaggcatgcgccaccacgcccggctaatttttttttttttttttttttttttgagacggagtctcactctgtcgcccatgctggagtgcaatggcgtgatctcagctcactgcaacctccaccccctgggttcaagctcctgcctcagcctcccaagtaactgagattacaggctcctgccactgtgcccggctaatttttgtatttttagtagagacggggtttcaccatgttggccaggctggtcttgaactcctgacctcgtgatccacccgcctcggcctcccaaagtgctgggattacaggcgtgagccaccgcgcccggccaatttttgtatttttagtagagatggggtttcaccatgttgcccaggctggtctcgaactcctgcctcaagtgatcctcctgcctcagccttccaaagagttgagattacaagagtgagccaccacgcccagcctggaatcatataatatattcttattttactttaccccagtaaaatgcaagcttcataaggactagaaattcagtctttgctcactgctgtttctccagtggctgggacagtatataaagcatggtaagtgcttgataaacatttgttgaatcaaggaatgaatgaatgaacttgaccattgattgcctcaggaaggttgtggctgcagggttctcatcacaagatattgctacttcccctggtattaatcagttgggacgaggggaatctctgccagagaagaagacccaaattcaatatttaaaggtaggacagatgatactcgggcagtctcctgccctcactcaagatggcgacaaggcagagtgccctttccggtcacatgacctgacactcgccgaagggcacctccccgcgcgtgcgtgctgtgccaaggctgcaaggcgctgaggggagaggcgccgccgtcagcgccgccgcagctgggacccgttagagcggaagcgccgccgccaccgccgcctttgctgtcccccggcctctagttccccgcaggtgggaggtgggagccatgtcgaaacggctccggagcagcgaggtgtgcgctgactgcagcgggccgggtgagtcgcaccggccgggcccgctcccctctgctttcctggcccggacccctaccccggggccgccccctcaggtcaggctgcatcccgcggctagggtcgcaacgaagaggtccctgggcggccttggggtgggaaccgtcccgggcctgtcagagccgggcgggcagggggccgccgccctccccgtccctcgcggccctcccttccctctcgttccctcccgttccctccgtcctaggccaactggggaggtgacgggggccagggctgctcccccaacaggaaggggcttgggcaatccacaggaaagccaattacagaagtaaaatgtgagcgtcctcccggctgcagcctccagaggctgcaggtgtcacctcccactagaccctttctccgcctgggtgtcctgcccggggaggatgacactccctgagactcgccagagggtccccgtagatgacttccccgctgctgacatccgacagctactctgcccgggagaattgccaggagatcggggtcttccaaacacaaccagcacttaggaggcagtgcttgtctcaagtttgaggatctgaacggcctgggttcaaactagattttgcttctggctgaccttgggctggtgacttcacttggtcacttgcttgatttcctcatttttttcaatgaggataatcgggagtatcacgcttagtggtgaggaagattcaatgaatactcgtagaatcatatcatctaaggcttttcttttttgcattatgctgtctacagtagaactcttgtagtcccttaaagctatatttgactatctaaatcatacgttgattacaacggaaacaaacgcaaaatcaccagcaatataggggcattgaaacgctaaagccattccttcataatgatgcataactgttcatacataatattcacatttagagatcaagtgtgtcttagcaattgcaactgaattgtcaggtctctggatagattattacatgctgttttaggtgcttggatgtattggctttgagttaattcgaaggtaacatggctttcttggcacaatagtgtccgataaacaatcttaattaaatcattgaacaccactggctttgcaactgttctgatcttaagcttgtcatttggaagtggagaccaattgtaaatagaactgtgataactcaaacctcatgtggttgttttatggcccgtacagtgcaggtgttaccagtttcctttgaagatagggagggggtatggaggagtttaaaaagaagtgttttctaaaccaagttagtgtgagttatacaaactccatcattttctctaaaaatgttatttgttccacttccttattttcttgcctattttcagttgaacttaccgtgatgtatttgattcacatgtgtctagcttctaacttcctcttggaatgcatattgttttgcttcttgatagggtacagggcaaagcaaaattgttcctccattgccatcctaaatatacttttgcagcattttgtgcatttcagaacattttctcttccattgtatcgctttagttgttgtctcatacgcctaatctgcagagacttgagtcacttccttcctgttttgaatataattaggctaccttgaaatattctgtgaaattgagcagctgggaatttgtgctgccttttctgcacagccctactgagagaattacctgtagggttagggacccctttgagattctgttgaatgctaaggccttctcccctaaaatgcacgtgaacgaatttacctaagatttgtctgggggagtcacaaacatttttgaagttcatttgtggtgtccctggagccctggctccagatgaacttaaagggttttacccaatctcattcatacaaacatttttattttactatgttaacattctaatattctttccatgggattctgatccaggatgctaaagtggttagtcgaatacttgtcttaattaatatgtgttaaatacttgctaaaaaaagaatactgcaaatcctctgaataagtgaaaaccaaagctatgcttcaaaacagtcttttttttttttttttttttttgccattagtgtcagtactatactgcaggaagcagtgttgttaatgcatctttgtagagctccttcatctggacatttccaatctctgctttttaggatgatacagtaatagcgacagagttatactaaattgaattattttgattctgttttattttatgcaaacatttaaccatgatcacatcttcttaaatattctacttttttttttttaatgaatctggttcatttcaaatacatcacactctgagttcaattacttgaaaactccatggagattttcagtacagtagtagagtggtcacatgaaatgttcaatgttttaagtatttcccatcaaaaactttgtccagtgatcatgaatttcacgtctagaaaatatctgaatactgagaaaataatttagaaaagatataacaactaacattactactttactatgtgtgaggtacttcacttattctctatatccttactatcccgagatttgtcattgttctcatttgaaccatggtgaaaacactcaagtaacttgtctgagatcattgtgcaagaagtggcagagttggggttcaaaccctgaactccttgtctctagagccaaccctcttaaccaccatactcactggctcccaggattcgtctttgattgaaagcccataacttttcattatatggtttgaaagggtttgaataaactcttaaaaaatggtaaagatggtgtacatgcattttagagatttttgtggacattgaagaatttttaaatgtaaccctttgaccaggcagcttaagtggcacctattgtcaccccattgtgagtctgacgaagtatagctctttctttatttgaggtttctaggtattcagtttacttacccagatccatcctgcttgccaagtatgaaattattccttgtttcaaaggacagctaatgaagctctatgactttaaagggaaaaaagtattatacacacactaaaaatattattcatttttattttacatctttgcctctgtgaagctgctgttattgcaacttcttttttttttttcagatcagttgcaggattggacttggtagtttatgtaaaacaattaattggctgggcacagtggctcaagcctgtaatcccagcactttaggaggtcgaggtgagtggatcacctgaggtcaggagtttgagaccagtctggccaacatggtgaaacctcgtctgtactaaaaataacaaaaattagccgagctggtggcacacacatgtaattccagctactcgggaggctgaggcaggagaatcgcttgaaccctggaggcagaagttgcagtgagccgagattgcgccactgcactccatcctaggggacagagtgagactctgtctcaaaacaaacaaacagacaaacaaaccaattcatggacatcatagaacatttcctaatggaagaggccaggtttccctgtcctcagaaccatagcagctgagtgattttatgattctgtaactcgcagctttctgctaagcatattgacatgttgattcatagcagtgaattaggacagcagtctacaacatttactgcagaaaatgctatctgcataattcactgtcaaaattatattatcttggccgggcacagtggctcacgcctgtaatctcagcactttgggaggccgaggtgggcggatcacctgaggtcaggagtttgagaccaacctgaccaacatgatgaatccccgtctcagctaaaaatacaaaaattagccgggcgtggtggtgcatgcctgtaatcccagctactcgggaggctgaagcaggagaattgcttgaatctgggagatagaggttgcagtgagccaagattgtgcctctgtactccagcctgggtgacagagtgagactccatctcaaaaaaaaaaaaaaaaaaaaaaaagtattatcttgatttttatggagatggatccaaaatcattcgtctgtaccctctcaatttgctttcttagcttgaatgaaaaagcatgcatctgaaatggtagatccacattagggctacaaactgtggccctgaaccagaaagaagataactgtttacccaaggctcccactggtgtttttagtctcaattaacattgtacctaatcagccaaggtaggtcataccatccaacaagatgaccagcctgatgcattgatgagcatactgaaacaaaaatgtctcctttttctgacaaaccaaacttcagtcatcttttgccatctggcggtatagcaacctgctggtatccctgccactgagatttcactctctttccagatccttcctgggcatcagtaaataggggaacgtttttatgtgatgagtgctgcagtgtccatcggagtctagggcgccatatctcccaagtgaggcatctgaaacacacaccgtggcctccaacactgcttcaggtaaaggataagaattctcctgacagttggtaatttacattttagggctcatcatgttaataacttaaatttctcctggtgtacttcttccataagacaaaactgtttcataattgaatagagatggcatgcccatcaatgctatttacaaatattatctgtattgaattcagtaaagacttttcttcctacttgacataaatcttgttcaacaagctcaattataggtagatagatgaatagtcattaaaatatcttggtactgttgctctgttgactttctagactgtcatcggaaatgttttttttttttttttgagacggactctcactctgtcatccaggctggagtgcagtggcgtgatctcagctcactgtaacctccgcctcccgggttcaagcaattctcctgcctcagcctcccaagtagctgggattacaggcacccgccatcatgcccggctaatttttgtatttttagtagagaaggggtttcaccatgttggccaggctggtctcgaactcctgaactcaagtgatccacacctcaacctctctcgaagtgctgggattgcaggcgtgagccaccgcgcccggccagtagtccatcttttctatgcatgataatgaatgtttctgaaggctactgcctgagaatcttttctttaatgtacttattcctgagtacctgctaatatttttagaacatgtttttctgctttgatagcagcatgggctgggattcctcagaaacttctgaaacattttaagttttcttaaagctcttgttactagtcagagagaccaaattaaattaatatgttttgattgcatgtagaataccctgttaaatgagttctttgttttatctggagtccaatgtcatgtcacctttacttctatcttggggtacacattcttcaagttctcttggaactcaaggttaagtgtgtgttttgccttcatttgtcttgattacacatttcactgaatctgtgacagctgcacatatcccttaaacttggctgtgtgaaccaaggagccaaaacaagtgggtttgtatctctgatgtgaaaataactacactgctgtaaaaaacagatggggctgttttaggagtcatgccttgaaatgaaatttggagatatgatttattactaacttttgcttagaagtttctaaccgctcacgctcatgtgaaaggggctgtttactgctctcaggtctgtctgtgtttgcaaagccagattgtagtacagagtctcagtaaagtccagagatgagttgtttagaatgccagggttgaccctaaagcaacaattccccaaatgtggaaccaccagtggtattcaagacagatgtaggtaatacatgttttttttaatggttacattattttactgtgtatgggaaagctataactagcacatcaaactgtagttgtttttacaagtaagtggctttaaagacaaatattaagtgaataatatagacagtacatgggtcattaagaatgttgaaaatagtgtttaattaggtttgggaaaccctgctctaaggtgtcagagtacttttttttctttcatacagaataagaacagttcagtcacactttaggtatttaactatcctactagtcaaagctgaatcctgcatatagattgatcatctttctcattctcaaatcagaaaacaatgatatgaatgatattcctaacaaatgagtgtttataacaggactttgtttactctgttcagtcactgatccccattgaatatttgtgaaaagaaattaaagtcttatgtcatcctgcttggttttagatggttgagaccttgtataataacggtgctaactctatatgggagcattctttgctggaccctgcgtctattatgagtggaagacgtaaagctaatccacaggataaagtacagtgagtggaatgtttataaatacttttatttcttcataacaaatggggcccactgaaaggagtgcagctatttttggtcagtctccgcaagggcagcagaggagggggttaccctagttgtgcatcaggttctttgctattagaaatgcagaatggggtggggcaggaccatctgtttagcatggccacccagcaggagtaagtggcttcctcagttggaaaccatggcttggagtctgtaaatgtaatcagatttaaacttatactcaaataagaggcgatcagaccagaaatctaggtctgggcacccgtctgcctgttgcctcacttataagatgggactaaatgctgctttctcccaaagttgctaaatcagttcagacaattacacagagaagagggctactataaaaagcaggtactctggagtcccagccattataataactaatgtatgttttcaaactgcaggtcttaaaccttgctgaaacttacttgagcattgttcattttattctcaagtgggggatgtgggtcacttcctcttctttttacagtacaaagaatggggattgttgtatctgaacgagtgaactgttttcttttttgtttttgaaccagtcccaataaagcggaattcatcagagccaagtatcagatgttagcgttcgtccatcgcttgccctgccgggatgacgatagtgtgactgccaaagatcttagcaaggtgggtcacaccttttaaaatccctaaaagagcgggctgagacagcatattgttttatttgaaaaaacgaaaaaaaagtctggttgtgggctttttttttttttttttttttttgagacagagtctctgttacccaggcgggagtacagtggcgcgatcttggctccctgcagcctctgcctcccgggttccagcgattctcctgcctcagcctcctaggtagctgggattacaggcgcatgccaccatgcccagctaatttttgtatttttagtagagacggggtttcaccatgttggccaggctggtttcgaactcctgagctcaggtgatccgtctgcctcggcctcctagtgttgggattgcaagcgtgagccactgcacccggccagggtttttttgtttttcgtttgttttttttgagacagggtcttgctctgttgcccaggctggagtgcagtggtgcaatcacggttcactgcagccttgaccatccaggctctagcaatccttccacctcagcctcccgagtagctggaactacaggcgcattaccatacccagctaatattttttattttttgtagagacgggttcttgctatgttgcccaggctgaaaaaagtttttaaagaaagaaaaacaaaaactcatttctgcacattcattaattaatagcttttttgtcagtcggtttcgtctttaatctgaattcaaatggcagccattcatatagtggaggttcagggcaaagaggaaaagtaagtctctggaaggctgtttgtgtttttccaatatggcttttaaattatattttgataagttttttgtttgtttaactttgaaataggaaccatctcagagttgtttctagaagggactagaaagattataggacaattgtttctttttaataaggactagaaaaagtactaaaggaaggggacttcttcaggtttccaggttgaacagtaagtatgatcttcagaaagcaatgtgtgactcaaagctatagtacacagaatggtttatgatacttgtaaaacgagtgaggtggttttctttatgtgggccttcgcatgtttttgagagatgctgtaagaaatgtgcatattttcaaagcgctgccttggataaatgcttactcacacagagcatgagaacttacttattcagaactttttttattactttttggccgggtgcgatggctcactcctgtaatcccagcactttgggagactgagactggcagatcacttgggctcagaagttcaagaccagcctgggcaacatggcgaaaccccgtctctacaaagaatataacaattttagccgggtatggtggccgtgcctgtagtaccagctacctgggaggctgaggttggaggatgacttgagcccaggaggtggaggttgcagtgagctgagattacaccatggcactccagcttggacaacagagcaagaccctgtctcaaaaaaagaaaacattttctgcatctattgagatgatcatgtggtttttgcttttgcttctatttatttatttatttatttatttatttttatttatttttgagatagagtcttgctcagtcgcccaagctggagtgcagtggtgcgatctcagctcactgcaagttctgcctcccagttcatgccattctcctgcctcagcctcccaagtagctgggactacaggtgcccaccaccacacccggctaattttttttgtatttttagtagagacagggtttcaccatgttagccaggatggtctcgatctcctgacctcgtgatcctcccgcctcggcctcccaaagtactgggattacaggcaggagccaccgcgcctggcctgcttttacttctattgatgtggcaaattacatttattgatttgtgtatgttgagccagccttgaatctcagcaaaaaagcctacttgatcatgatgggttaatttttttatttttatttttattttttattttttatttttttgagacagagtctcgctctgtagtccaggctgtagtgcaatggcatgatcttggctcactacaacctccgcctcccaggttcaagtgattctcctgcctcagcctcccaagtagctgggattacaggcacgtgccaccaggcccagctaatcttttggtttttttttgtttgtttgtttgtttgtttgtttttgagacggagtcttgctctgtggcccaggctggagtgcagtggcgcaatcttggctcacttcaagctccgcctcccgggttcatgccattctcctgcctcagcctcctgagtagctgggactacaggcgtccgccaccacacccggctaatttttttgtatttttagtagagacgaggttttactgtgttaaccaggatggtcccgatttcctgacctcgtgatccgcccacctcggcctcccaaagtgctgggattacaggcgtaagccaccacgcccggccattttttgtatctttagtagagacggggtttcaccacgttggccaggctggtctcgaactcctaacctcatgatccgcctgtttcagcttcccaaagtgccgggactacaggcctgagccactgcgcccagccatggtggattaacttttgatgtgctactggatttggtttgctaatattttgttaagagttttttaaaaaatctgtgttcatcatggattttggcctgaagttttccttttttgttgtgtctttgccagattttggtatcaggctgatgttggcttcacagaatgagttaaggaggagtctctcctctttgattgtttggaataattttagtaggatgttcttctttgtatgtctggtagaattcagctgtgaatctcttgaactggggagacgaaggttgcagtgagctgagatcatgccacggcactccagcctaaacgacagagtctcactctgttgcccaggctggagtgtcgtggcacaatcatggctgactgcaccctcaacctccctagtctcaaatgattctcccacctcagcctctcaagtggctgagatctcaggcatgtgccaccaagcctggctagtgtgtgtgtgtgtgtgttttgtttttgttttttttagatagagtctctgttacccaggctggagtgcagtggcacgatctcggctcactgcaacttccacctcctgggtttaagcgattcacccgcctcagcctcctgagtagcttggattacaggtgcccaccaccatgcccggctaattttttttgtatttttagtagagacagggtttcaccatgttggccaggctggtcttgaactcctgacctcaagtgatctgcctgcctcggcctcccaaagtactgggattacaggcatgagccaccgcgcctggccagtttttgactttttggagagatggggtttcaccatgttgtccatactggtctcaaattcttgggcttaagcagtctgcctgccttggcctcccaaagtgctgggattacaggcgtgagccaccacatctggccttttttccccccccttttttaatccccagcagaatctggctgaagaattcagaatttgaaattttgcatagaaatgcatatactagctacttccattgattaataagacttggtatgtgttgggttttttgttttttgtttttttttccttgccagagttttaaaaaattaggcacagtggcacatccctgtaatactagctacttgggaggctgaggtggaagggttgcttgagccaaggagttcagtcctgcctgggcaacataacgagaccctgtgtttaaaaaacaaaaaaactatttaaaaaattaaacttagatgttagagtagatttcttcattcctgtgataagggttactgcatcttggacaattctaggttagatttgaaggaaggcagctcatcttctgactgtataagagcttttctgcagtagtacagaattcggtatatcacgggccttttcctaccctgaaagactttattaaagcatattatacaggccaagaataatgtggtagagagggtattgtataaggcaggatcctgtagcttacacagtgtagaatttgaagtcctaaagccctaattacagtaacaactaataataataactgttattatagcatttgtattctttgagcactttattatatcactaaatccttataataaccctgtgaatagggccaggcacggtagctcatgcctgtaatcccaacactttgggaggccgaggtgggaggatcacttcagctcgtaagttcgagatcagcctgggcaacatagtgagacctcatctgtattgaaaaataaaaagttagcagggcatggtggccggcgcctgtagtcccagctgtttgggaggctgaggtggaaggattgcttgagcccaggatactgatggctgcagtgagccatgatcactccactgcactccagcctggatgacagagcaagcgagaccctttctaaaaagaaaaatgccacctatttaaaattttttttattttttattttttttgagacagggtctcgctctgtcaccaaggctggagtgcagtggcatgatcacagctcactgcagcctccactgcccaggctcaggtgatcttcccacctcagcctccttagtagctgggactacaggtgcgcatgccaccacacccaactaatttttgtattttttgtagagccagagtcttgctatgtggcccaggctggtctcaaacccctgggctcaagtgatcctccaacctcagccccccaaagtgctgggattacaggcatgagccactgcatctggccattgttgacatttttgagatgaggaaagtgaggttcagattgcttaaagccctttctccaggccacacagcttgaagtgggtatagtttgaaattcaggtctgtcgtatgtcagagccacgcatagtcacctcttcacacagtcctgcctctcactcaggttctggttgtgccacttcttagataagtcatgcatttgggcaagtcagccttcacagccctagtttccttatcagtaaagtggcctcactccaccttacagcccagggacagttgtgactggcaaaggagagactggtccatgcactttaccgagacaaataaagattatgcgttactgatgtaacatatattaaaatggtctatcagctgccctaggacatcattctttacacctctaaccacgattccttttttgtttctgcgtttttcagcaactccattcgagcgtgagaacagggaatcttgaaacctgtttgagactgttatctttaggagcacaagccaacttctttcatcctgtaagaaaacatgaattgcttcagatattgaaactaagtgagttgtgttcatgtagcctttatttaatgtgctcttttgcctactttttattaatgattcttaggaaaaaggaaacaccccactccatgttgcctccaaagcagggcagattttacaggctgaattattggcagtatatggagcagacccaggcacacaggattctagtgggaaaactcccgttgattatgcaaggtaagagacctagattctcgctacttctctctgggatttttttgttgggtgtgattccttgttaagtagctaagttgtatatgttgatattgaacccctttaaagatgtacgttattttattttacagatgaagacatttcaaatgcatataagctcagcctggcaaagttgaggaaggctagaatcatgaaccagtgtgctaagcttccagtcttttacttgatcctttataacacagtgatgtttgagctgtagtcagattccaaatcaagtatcaagaattacagaatgtactcttctgttttttaatactcttagttatttcttgaacttaaaagcaaatatatacatagatatgtgattaaacaagtatagtaaaaagttaattgtaaggtttgggtagtagacatctaagtgctcactctaggccaggcatggtggctcacacctgtaatcccagcactttgagggtccaaggcgggtgggttacttgaggccagaagttcgagatcagcctggccagcatgctgaaaccctgtctctactaaaaatacaaaaaaaaaaattggctgggcatggtggcaggcacctgtaatcccgctacccgggaggctgaggcaggagaatcacttaaacctgggaggcagaggttgctgtgagccgagaccatgccactgcactccaatctgggtaacagggcaagactctgtctcaaaaaaaaaaaaaaaaaaaagtgctcactgtaaaattatttaaatttttctttattaataaagtccttgaaaaataaatctataggttagtcttgaatatcatttaaatggccaaagatcagtcatctttccttctttttccaaagtacttttattaactgtgaagcacaatactctgttccacagaggataaaatgggtgaataacaaaactctgccttcccagaatttactctcttggaaaagatgattcataaatgcctgaaagagttcaaggaggcaagaccatatgggattcattgccaaaatagataattggtcttaaaaagcatatatagggtttcttcattgtggtccaaatcatttaagaaatttcttcagctggtcttgaagaatgggttggatttgaatgtgtgaagggagagctgaagcattccaggtaagaggaaaggcaggagtcaagatcaggaggcagggagggacaaagtgtgttcagcacagcaggagacctgactggaaagaacagagtgggtctgggaataacagcaggagtacagtattgcatggtgcttcattatttcacagagcactaaaaaagaaaagagttcagccaattaaattatggtgtatcatcaattgtaggacatttcctgatttcacagatactaaaaaatgaaaataagatgtgcctctcacaaatcaaagctgtgtggtaggttgaagggtgttgtgagtgccttgaatggtggggagagaagctggctgaaactatcaggttggtgcaaaagtaattgcagtttttgccattacttttaaggacaaaaaccacaaaatatacttgatcttggacgagagccctgggtaaatgatacttattatcacttaccttggaattttcgcacttgtaccttgcatataataatctcaatataatttgtatccttgttgctgaaaggattctaagcagcctaagtatttatttcatggatgttgaaaggtaaacttaatattttctgttgtgcaaattgaagataaggaggcagaagtagctgcaggcgtgagctgtgcgttaggttggcgtgtctctcactgatttgaagcctttgaagtggttactagactcttatccagagtcagactggctgcatcagcatcacctaggggaaggaccttcttcaacatattggcccctggccccatcctgtccccattgattcagaatttccaagggtggggcctgcacatggtatatttctagaaatgcgctagttaatttttgagaacttctaccgtaaaccattgattaatttcatttttttacctcattaaattaagtcattctgtatccttccctctcataagtctttgaatttcttattaaatattctattttggccttaataaaggaaaggcgatagttcagatggtgaaaacagtttataaaagtgggatgcaaagtagacttcagaaatctacctaccacaagaaggttgatgattctcaaaagtcttgtgtgataaactgctcaggtgtctcaggagacgtctttgtactccattttaaagtcagtgaatagtgagcaatataaatggtactttgttttctcttggtaggcaaggagggcaccatgagctggcagagcgcctcgtggaaatacagtatgagctaacggacagactagccttctatctctgtggcaggaaaccaggtgagtggatggagaatgaccgtttcacatctccagttgggaaggttctagaaaaacaagttgggacactatttgttattacctcctctgctgtaacatatcactgagaaagctatacatacggcttttaatttgaaaggataactacagaattgtcagttacatgtaaaagatataaagttggacaaaactccttagatttttcatttttaatagctctagagaaatgactatttcaagaatcagactgaataatcaaagcaaaattgaatgggtaccacagttcttgaacatggtgggactaggaatgtaggagcaaagcaataacctttgtagttatttgaaaaattcttcttaaggaatggaaaaaaagtccagaagtaaactttgccaaagccaacttggctatttgtgatagggaacaggggtcagcaaaccatggtttgtagcccaaatctagccagttacttgttttattaaacaaagttttgtatcgtgccactgcacttcagcctaggtgacagagtcagactctgtctcaaaataaataaataaaaataaataaataaataaataaagcttctgccgggtgcaacgggtcatgtctgtaatcctagcactttgggaggccgaggcagaaagactgcttgcacctaggaattcgaaagtagcctgggcaagaggggtgagactccgtctccacaaaaaagttttttaaaaaatcagccaggcatggtggtgtgcgcctgtagtcccacgtacttgggagactgggacttgagcccaggaattcagggtggcagtgagctatgattgtgccactgcactccagcctgggtgcagtgacaaagcaagacccccaactctctaaaaaataaatgaataaagttttattgcaagaaagccgcgcccaattatttataccttgtgtatggctgctttcacataacaacagcagagttgaataggttaagtcgttgcaacaggccagatggccacaaagcctaaaatatttactatttggccctttaaagaaaatattggccaacccctgatgtacaacattcacatacatgtatgcagtgattctccatcctggttgtatgatagagttaagagcctctggtatagtttcagttctgggtgagatggagtaagcacaccccaccgtgtctcctgcaaaatagaactaacagacctggaccaaatgcttggagtagctagctaaagactctgaaaagtaaatcctggttggtagattagggaactcaaaagtgtcatcagctggtggtgagtgtcctgtttgtcttacttctgataggacttcaatgacagcctgaaacctggaggtacataatgagtgcaaaaaagcctttttctgcggggtgcggtggctcacgcctgtaatcccagcactttgggaggctgaggtgggcggatcatgaggtcaggagatccagatcatcctggccaacatggtgaaaccctgtctctactaaaaatacaaaaaaattagctgggcatggtggcaggcgcctatagtcccagctactcgggaggctgaggcagaattgcttgaacccaggaggcagaggttgcagtgagccaagattgcgccactgcactccagcctgggtgacagaatgagactccatctcaaaaaaaaaaaaaaaaaaaagcctttttctggttaaagagcaggaaatgggacttctacaggacagagaggaaggggattcccctggggttttttcctcctcctccttcctttttctgatctctcccatccagcccctaggcaagcctgtggctgcaatagcagcagcagcagtggcagcacaggttcctaaatctctgagcaaggggatgaggggggatcctgattgcttgtctttttctctctattctctcaccatctgcccaggaggcagaacctcacctggtcagttgcctgctaagacaaaaatatgaacatttttgcataaagtttaaagaaggcccagagtctcataacaaaacattcacagtgtctaggatatcatccataatgacttgacatctgagtaattctcatgtacttgccagggaaggcagccaacagatgccaaccccaagatgacacaaatgttggcgttatcagacaaagattttaaagcagctagtaagaccatgctataagaagtaaaagcaaacattcttgaaacaaacaggaatatagaaagtcccatcagagaaatagaagatacagaagagaaccaaataggaatattagaactgaaaaatacaaacactaaaaatttaaaacttactggatgggcttaatagaagaatagagatgacaaagaaagtcaatgaattgaaaacagatcactagaaattatctggtttaagcaacagagaggaaaaaagagtaggaagaaaagactgaacagagtctcagggacctgtgggaaaatactaaaatgtctgacatttatgtcgttggattcccaataagagatgagaaagagtggtgtgtgcagaaaacgtatttgaagaaatattggccaaaaaaaccctctaaatttgggacaggctcaatggctcacacctgtaatcccagcactttgggaggctgaggcgggcagatcatttgaggttgggagtttgagaccagcctggccaacatggtgaaaccccatctctactaaagatacaaaaagtagccgggcatgttggtgcgcacctgtaatcccagctactcaggtagctgaggcacaagaatcacttgaacctgggaggtagaggttgcagtgagtccagattgagccactgcactccaacctgggcaacagagcgaaactccgtttcaaaaaaaaaaaaaaaaaaaaaaacctctaaatttggtgaaagacataaacttacagattcaagaaacttagaaaattccaaagaagataaactcaaatccacagttgagacacatcaaaatcaaactgttgaaaactaaagttgaagaaaacatcttgaaagcagccaggaaaaagtgacacataacatatatagaaaaacagtgatttgaatgattgtggatttcttatcagaaaccatagagatgagaaggaaatgaaataatactttgtttgtttgagatggagtatctctctgttgcccaggctggagtgcagtggtgcaatcttggctcactgaaacctccgcctcccaggttcaagcgattctcttgcctcagcctcctgagtagctgggattacacgtgcctgccaccatgcccggctaatttttgcatatttagtagagatggggtttcaccatgttggccaggttggtctcgaactcccgacctcgtgatccgcccacctcggcttcccaaagggctgggactgcaggcatgagccacctcacccagccagaataatacttttattattattattattttgagacagggtctcactccatcgcctaggctggagtgcagtggcgtgatctcgactcactgaaacctcaacctcttgagctcaagtgatcctcccacctcagcatccacagtagctgggactacaggtgtgtgccactgtgcccagataacttttgtattttttgtagagatggggtttcaccatgttgcccaggctggtcttgaattcctgagctcaagtaatccacccacctgggcctcccgattacaggcatgagccactgctccttttttattattattattttttctcatcttctttgtgatggtagaaacaatacttttaaagtgctaaaagaaaagagctgtgaacccagaactctatatccaatgaaaataactttggaatgaaggcaaaataaggacattctaacaggaaaaaaaagaattattctttactttaacagaaatgctagagaaagttctttgggtggaagggaaatgatgccagagggaatcttggaactttaggaatgaaagaaaaacaacagaaatgttaaagatgtggcagagtaagaccctgtctcaagaaacaaacaaaaagttgaaattgtcatacatatcttaaagctgtaacattgtcagccaggtgcagtagctcaagcctgtaatcccagcactttggcaggccgaggcaggcggatcacctgacatcaggagtttgagaccagcctgaccaacatggtgaaaccctgtctctactaaaactacaaaaattaaccgggcatggtggtacatgcctgtaaacccagctactcaggaggctgaggcaggagaaccacttgaacctaggaggcaaaggttacagtgagccgagatcgtgccactgcactcctgcctgggcgacagggagactccatctcaaaaaaaaaaaaaaagaaaagaaaacgccaggcgcggtggctcacgcccgtaatcccagcactttgggaggccgaggtgggcagatcacgaggtcaggagatcaaaaccatcctggctaacacgatgaaaccccgtctctactacaaatacaaaaaattagccgggcgtggtggtgggcgcctgtagtcccagctactcgggaggctgaggcaggaggatggcgtgaacccgggaggcggagcttgtagtgagctgagattgcaccactgcactccaacctgggcgacagagtgagactccgtctcaaaaaaaaaaaaaaaaaaattatctagtagggttttcagcatatatcagtgtaatatatttgacaactataatataaaaggggatagggtaaaaaatataatggtaagatttctaccttctactggaaatgtaaaataggatttctaagtagactgtgaaaagttgtgtgtgtgtgtgtttgtgtgtgtgtgtgtgtatagtaatttctaccataaccactgaaagaagactacaagccaggcacggtgtagtgcctgtaatcccagcactttgggaggctgaggtgggcagatcatgaggtcaagagattgagaccatcctggccaacatggtgaaaccctgtctcttctaaaaatacaaaaattagctaggcatggtggtacgtgcctgtagtcctagctacttgggagggtgaggcaggagaattgcttgaacccgggaggcagaggttgcagtgagccgagatcatgccactgcactccagcctgggtgatagagtgagactccatctaaaaaaaaaaaaaaaaaaagactacaaagatatgtgatcaaaaatgctagaggtaaatgaaaatggagtattaaaaattactcaaatcatcaaaagatattttgattcaaaatattcaaaagaggagggggagaacaaaaaactaaggaccaaatagaaaataaataataacattatagacttaagtccgtacatatcaatagttacattaaatgttaatgacccaaacacatcaatgaaaagcagagattctcagaatggattaaaaaacaaaaggggctgggagctatggctcacacctgtaatcccaacacttcagggagcctgaagcaattctcctaatcgcttaagcataggagtttgagaccagcccaagcaacagagcaagatcctttcactacaaaaaattttatagaaagcagccaggcatggtggtgcatgcccatagtctcagctactcaggaggggctgaggtgggaggatcacttgagctcaggaggtcaagtctgcagtgagtgctgatcatgccactgctctccagcctgggcaacagagcaagaccctgcctcaagaaataaacaaaaaaccataaggcctaatatatactgtctacaagaaacccattttaaatataacaatataggtaataagttaaaaaccaaaagtataaaaagatataccatgtaaaggctcaggaaaagaaagctagggtggctatattaatatcagacaaagtagacttcagaggagggaatattagcacggatagagagggacataatattatcataaatgagtcaattcatcaagaaggcataatagttctaaatgtgtacacatccagcaacagaccttcaaaatacatgaagcaaactttgatagaactaaaaggagagaaggtcaaatctacaattattgttggagactctacactcatcttttagtaatagatagaactagtagatagaaaatcagtaaggatatagaactaaaccagaccaaaacccaactagatctagttgatgtttatagactcttctacctgacaacattagaatacacattcttttcaagtacatattgaacatacacccagatagaccatatcctgggtcataagacaaaccttagctaatctaaaagaattaaaattctataaagtatattttcagaccataatagtattaagctacagataggtaatacaaataaaactggagaatacccaagtgcttggaagttgaacaacatgctgcttttttttggaaacagagcctcgcgctgttgcccaggctggagtgcagtggcgcaatcttggctcgctgcaacctctgcctcctgggttcaagcaattctcctgtctcagcctccctagtactgggattacaggcacgtgctaccacacccagctaatttttgtatttttagtagagatggggtttcaccatgttgaccaggctggtctccaactcctggcctcaggtgatccacccaccttagcctcccacagtgctgagattacaggtgtgagccaccgtgcccggccctgaacaacacacttctaactaatccatcgatctaagaggaagtcttaagggaaaaaatattttccactgaatgaaaatgaaaatgcagcatatcagaatttctgggatgcagccaaagcaatgcttagaggaaactttatagtattaaattcttaccttagaaaagaagaaaggtctcaaatcattctcatcattattttttgagatggtgtcttgctctgtcacccaggctggagtgcagtgatgtgatcttggctcactgcaacctccccctcccaggttcaagtgattctcctgcctcagcctcctgaggaactgggattataggcatgcagcaccatgcctggcacatttttgtatttttagtagagatggagttttaccatgttggccaggctggtctctaactccccacctcaaatgatctgcctgcctcagcctcccaaagtgctgggattacaggcgtgagacaccgcgcctagcctcaaattattaatataagctcctcccttaagaaactttaaaaaaaaaaagagcaaaataaacctgaaccaaacagaaggcagcaaatagtaaagagcagaaatcaatgaaactgaaagaaggaaacagtagcgaaaaatcaatgaaactgaaagaaggaaacagtagcgaaaaatcaatgaaaccaaagctggtttttcagaaggattagtaaaactcataaatgtctggcaatactgacaaaaaggagagtgtacagatggagttgtcactataaaccccacagacatggaaggataattaaaaaaaaatacaaagcagaccgggcgcgatggctcatgccatgtaatcccagcactttgggaggctgaggcagatagatcatttgaggtggggagttagagaccagcctggccaacatggtgaaactccgtctctactaaaaatacaaaaattagctgggcatgatggtgggcgcctgttatcccagctacttgggaggctgaggcaggaaaatcgcttaaacctgggaggcagaggttgcagtgagctgagattgtgcaactgcactccagcctgggtgacagagtcagactccatctctaataataacaataataataatagtaatacagaccaggcatagtggctcacagtggtaatcacaacactttgaaaggccgaagtaggaggattgtttgaggccaagagtttgcgaccagcctgggcaacatagcaagaccccatctacaaaactgcaacaacaaaaaaatcagcctagcctgatggcacgtgcctgtagtcccagttactctggaggctgaggtgagaggattgcttgagcccaggaggtcaaggctacagtgagctgtgttcgcaccactgtactctagtctgggtgacagagtgagaccctgtctcaaaaaaaaatagagaaaaatgcaacataaccaagtgggatttccagataggcaagactgatttaatatttgaaaatcaggccaggtgcagtggctcacgcctgtaatcccaacactttgggaggccaaggtgggtggatcacctgaggtcgggagtttgagaccagcctggccaacatggtgaaaccccgtctctactaaaaatacaaaattaactgggcatggtggtgcatgcatgtagctacttgggaggctgaggcaggagaatcacttagaacccgggaagcagaggttgcagtgagctgagattgcgccattgctcacctgcctgggcgacagagcgagactgtgtctcaaaaaaaaaaaaaaatcagttaatgtaatctatcaagttaacagtaaaaacgaaaaactatgtaatcatatcagttgatgcagaagaagcattcaacaaacttcaacatccattcatgttttaaaaaaactcttagcaaactaggaatagatgagacttccttgatctgataannnnnnnnnnnnnnnnnnnnctagcctgatggcacgtgcctgtagtcccagttactctggaggctgaggtgagaggattgcttgagcccaggaggtcaaggctacagtgagctgtgttcgcaccactgtactctagtctgggtgacagagtgagaccctgtctcaaaaaaaaatagagaaaaatgcaacataaccaagtgggatttccagataggcaagactgatttaatatttgaaaatcaggccaggtgcagtggctcacgcctgtaatcccagcactttgggaggcagaagggggtgggtcacctgaggtcgagttcgataccagcctggttaacatggggaagccctgtctctactaaaaatacaaaaattagctgggcatggtggtgggcgcctgtagtcccagctattcgggaggctgagttaggagaatcgcttgaacctgtgaggtagaggttgcagtgagcctgagatcttgccactgcactccagcctgagcgacagagtgggactctgtctcaaaaaaattaaaaagctccaaattaaatacttaggtataaatctaatgaaatacacaatacatgtagtatctatatgccaaaaactgctgatgaaagaaatcaatgaagacctgaataagtggagagatgtactgtgcttatggatatgaagactcaataacatgtcaattctccacaagttaataaatgtataaatttacttcaattgaggattttttattagacatagacatgctgattttaaaattcaaatggaggccaggtatagtggcttacgcctgtaatcccagcactttgggaggccacggcgggaggactacttgagcccaggagtttgagactatcctgggcagcatggtgagacctcatctctacaaataataaattagccatgtgtgatggtgcatgcctgtggtctcacctactcaggaggctgatgtgggaagatcacctgagcccaggaggttgaggctgcagtgagccatgatcgtgccactgcactctagccttggcaacagagtgagacctcatttccaaaaataataataataatttaaaaattcaaatggaagggtgaaggaactagagtagcccagacaattttgcagaagaataatgtggaaggaagtacagcacccaatttttcagaattgctatgaagctgtacagttctcaagactgtgatatctatgaagagatagacatatagaccattgaaacagtatagagaatccagagatagatccacacaaatatgttcaattgatttttgtcaaaagtgcaaaggtaatcagttcagtggtggaggaaggatagttttttgttgttgttgttgttttctgtttttttaagacggagtcttgctctgtcacccaggctggagtgcagtggtgggatcttggctcactgcaacctcggcctcccgggttcaagtgattcttctgcctcagcctcccgagcagctgggactacaggcgcactctaccacacccaggtaattttttgtatttttagtagagatggggtttcaccgtgttagtcaggatggtgttggtcgcctgacctcgtgaactgcccgcatcggcctcccaaagtgctgggattacaggcatgagccactgcacccgccccaggatattctttttaatgcattgggacaaccggacatccatgtgcaggaaagtgaacttcaacctaaacctcacaccttaccccgaaactagaaaggatcatagatctaaatgtaaaacctgacactgtaaaacttctagaagaaaatgtaagaggtccgggcacggtggctcatgcctgtaatgccagcactctgggaggtcaaggcgggtggatcacctgaggtcaggagtttgaggctagcctggccaacatagtgaaaccccgtctctactaaaaatacaaaaattagccaggcatggtggtgaatgcctgtagtcccagctactcaggaggctaaggcaggagaatcgcttgaatccaggaagcggaggttatagcgaaccgagatcacaccactgcactccagcctgggcgacagagtgagaccgcgtctcaaaaaaaaaaagaaaacataagagaaaatctttgtgatcttggatgaaagcttttagctatcagctgagtatggtggctcacgcctgtaatcctagtactttgggaggccgaagtaggaggatcacttgagcccaggaagtcgaggctgcagtgagctatgactatgccactgtactccagcctgggtgacagagcaagacattgcctctgcaagggggaaaaagaaacctcttaaatataacaccaaaactcaatgcataaaagaaaatattgataaattatacttcatcaaaattgaaaatttttggccaggtgcagtggctcacacctgtaatcccagcactttgggaggccaaggcaggtggatcaccagaggtctgaagttcaagaccaacctgactaacatggtgaaactgcatctctactaaatacaaaaagttagccaggcatggtggtgcatgcctgtaatcccagctacttgggaggctgaggcaggagaattgcttgaacccgggaggcagaggttgcaatgagccaatattgcaccattgcactctagcctgggcaacaagaacaaaactccatctcaaaaaaaaaaaaaaaaaaaaaaggaaaagttttgttctgagaaaactagttaagaaagtgaaaagaccagcaacagactgggagaaaaatacaggtatttggaaatcacatatccagcaaattactcatatttagaatattcaaagaattttaaaaactcaggccgagcacggtggctcacgcctgtaatctcagcacgttgggaggcttaggcaggtggattacctgagcccaggagtttgagaccagcctaggcaatgtggcgaaaccctgtttctactaaaaatataaaaaaattagccgggtgtagcagtgcacgcctgtagtcctggctactcaggtggctgaggcatgagaatcgcttgaacccaggaggtggaggttgccagtgagccgagatccacgccactgcactccagccatggggggcagagtgagaccctgactcaaaataaataaataagctgggcacagtggctcacacctgtaatcccagcactttgggaggccgacgcaggcagatcacctgaggtcaggagttcaagaccagcctgaccaacgtggagaaaccccatctttactgaaaaaacaaaattagttgggcgtggtggcgcatgcctgtaatcccagctactcaggaagctgaggcagaagaatcgcttgaacccaggaggcggaggttgcggtgagccgagattgcgccattgcactccagcctgggcaacaagagtgaaactctgtctcaaataaataaataagttaattaattaaaattaaaactcaacagtaagaaaacaacccaataaaaactgggcaaagacaagatatgggatggcaaaaaaaaaaatcacatgaagacaagcgtggcatgattagtcattagcacaatgagatgccacagcatacctattagaatgattaaacttttaaaaacaaaaactgaaagtacaggtgctgggaaagacaggaagcaactgtaactctcacattgctgtttggaaaacaaagtgatagcgctactcaagggaaaaggtctggcagtttcttaccaagttaaacatacatttaccatataacccagcatttctactcctgggtctttacccagaagaaagatagacttatgttaaagaaaaacctacataggagtgctgatagtggcgttattcattggcacatggatcagtgttctccaggagctagattagggctgagtcagtaagcttccttgcagatggagtccctgtctggatctgcaaaggccacctgtcccagccctagctgttttatactaatagattcatttgagcaagacctagagctcatccactgtcccacaccgtgggctgatggacacctgctgtgagctgattcagctccctcagcacactttccatggccaaagatcgtcagttacactgagggcaaactaatcgtcgtgattggggtgagcataggtttctgctaaatgatgcctggacctttgtaccagaaaaaaacaaggctatgagccttactactagctgggtcttcaggaatttttagctagtctagcaacatgactcgtcattatgcacaaatactaatcgcaaaacttagtttgaggaaataatggtgatgttcctttacagatcttatcaacatttctatgaacaaaactttgacttggtttctgtttcagatcacaaaaatggacagcactttataatacctcaaatggcagacaggtaagctcattgaaataccagttagttttgtctatcgctaatatttccttggttgtattatgtttaagtatattatattttgtgtttaacaaagcccatacatttttctcttttatggctataccatttggaaataagacggctgtaagtaaaccactatataaaacttaagtttcaaagagcacaagtagcaattttactaataggaaaattgaaaccagtgatattgtcactgttttagccagttgtgacagtattttgtatttatttatttacagaatacttctgtattataggagattacattatctatgacaggggttggcagacttttcttctcaagggccaattaataaatattttagactttgtgggtaatatggccgctttcgcaacagcttaactctactgttgtagatgaaagcatctgtggacactctataaatgaatgggtgtgtctattccagtgaaattttatttctggacactgaaatttgaatttcaaatagttttcacgttatgaaatattgttttttctttttgcccccaaacattttaaaacgtaaaaaccattcctagctcaactgaacaaaaagaaggccataatttttctgacccctggtctataagagcagatgagttcattgctacaggaatgatccttaaacccttgttttgcaagttacctttgcacggaaactgtcaagagtttatgaaatgactaactgctattccagatataatcttgccatcctgatcttttacatcttccctttttgttttgttttgttttgtttttttttgctttggtagagacagggtcttgctctgttacccaggctggttgcaaactccgggactcaagcaatccacctgccctggcctccctatgagcaactatatctggccttgtattttnnnnnnnnnnnnnnnnnnnnnnnnnnnnnnnnnnnnnnnnnnnnnnnnnnnnnnnnnnnnnnnnnnnnnnnnnnnnnnnnnnnnnnnnnnnnnnnnnnnnnnnnnnnnnnnnnnnnnnnnnnnnnnnnnnnnnnnnnnnnnnnnnnnnnnnnnnnnnnnnnnnnnnnnnnnnnnnnnnnnnnnnnnnnnnnnnnnnnnnnnnnnnnnnnnnnnnnctggccaagatggtgaaaccctgtctctactaaaaatacaaaaattagccaggcacagtggcgtgtgcctgtaatcccagctactctggaggctgaggcaggagaattgcttaaaccctggtggcagagattgcagtgagctgagattgcgccactgcactccagcctgggtgacagagtgagactccatctcaaaaaaaaaaaaaaaaaaacaaccctgaccttgtgatcctcccacctcggcctcccaacgtgctgggattataggcgggagccatcgagcccgacatattttcttatatcatgctttttttttaatacttcaaaaattgtgactcctcacataagggcctggaaggtaacctggcaatagcttttgtcgtttagttggtggacgatttttttttcctctttaacacttacatgattgtggtatttcagaaggagttactttcaccagattgttctgtttagagctcctcactgactctactgggctgtagaatgcttggttctaacatggtccatgaactgtaattaatatttttatctcttgggtgtcttaaactttacagagttcacaagtctggctttatttatttgcttattagctttgtatgttttcttagcagcctggatttgtctgaattggcaaaagctgctaagaagaaacttcaatctgtgagtatttctctgtactggttttctctagtatgagaatcagtgcaccctgctgatacctactctgaatgcaggttacctattgcgtctgatgactttatttcatacttttatttgttaaactagaagcagactgttgagtatacagcagtgatgaccacaaggactattaagttcagtatattcagttcattggttctgcttcagataatctcatttttctctatcatgtaacaagtgcagatggcacctttggcattaggcagttgttctcctcaggagagttccctagttcctctcagtgtcatgagtaagtagggcacgcgttcttggggtgacttagccatgtagggttctagagctggtaaatgctgatgctgaaatggtggcgagtcccatagattcactggctgccatttggatccagccatattgtaaacctctttcccatcccatgccattcatcagtgctttttaaatttctgctgttaaaagctggtggtcttggcccatgtgcgtgctcagagtttgccggctctgtgccacaacctccctttagcctgtgtctttcttccagactgcccacctcagccttaggaaaggcctaagggcccaaggcctcaaggccctgggaaatctacttctctgggattgacttctctttgtctagttctctcacatgaagcctcaccggggcacttctctccactttaaccaccaaagtatactcctcagctgttcccattgctctttggatcagaaccaagattcttaacttctttttgtaacctgtaagggcatcattcagctctcacctttcagagattgccctgcttcccatctggttccgtgtgtgtgtgtgtgtgtgtgtgtgtgtgtgtgtgtgtgtgtgtgtgtgtgtctttagattaacaccctctgaggccatgagctgcacattcaagtcctcttccaggaatcctcctttgcctacagcgtttgcctttcccagcttccatctctctgattcaaggacctgaaatctgaccagtgtaggtagcggctttcccaaagcctgactctgacattgcagcttccctcatttatgactttctcctcatttctgttttcacagaagaccctttactaaaacttcatataatactcagtattaaatattacattaaatgaatttatccttactagtatttaactgtattatgaaataaatgtgttttatgcaatttgtttggtgtctctgtgttctgtatctacagttttgtgtgtctgtgtgttttattgccttaaggaagttgtaaactaagatgatcaagatgataagctttggagtcagatagcactaaatattgtgtgatttccttttaattactcacaatctgtaagtaaattttattataaataattcaaacctagataaaaacccacgttttcttagactatcctacatttgcttcactggaagctgcatgaaagctgagattatgcttgtaatatctctagcacgtggcaggcatgaagtaaagacctggaacagagtctagtatagctctccagagctgcagctctgagtcagactggtcagtacatatctcagccctgccaagcttcctagcctccctgtgccttggcatcctctcatagaagagggagataaggatcctgcaggggctgccggccagaactgctcagagtgggctgccccattacttgttgaccctcaccctgtggtctccttctcataggtgaccatcttatcagcgccaggtcagtgtttatcctccagtatcttcctcctgtcctccctctcttcctcccttcatcctttctttcctttctcttttccttccctccctcctgatgaagaactgagagaaatataacaaaggctaatgtattccttgaatgagtaaatgttagcattttcaaagatgtaaacttggatctcaggtctgtcactagctttgtgactttaggcaagctactatcttctctgcctcagttttcttgtcttaaaaatgggacaatagtagttcctgttttcatagaggtgttataagtgaaatatgatactgttagcacagtgcctgggatataagcccataatcagcgttggccattgtagttgttgctagtaataataacattagcttgtagtcccatggaggaagaaactagatatttatgaagcaaagtcaagctcccaatccttcaacatcttgtctagcaacaggctctctgggtttgtttttaattatagtgcgaccacatttgggaagatttggaaaatagagaaaggggaccatcctcattgctatactcttaatggagtcaggctcaatattttggtacatttctttcagttcttgttttatatgcatatctttttttaaaactggaacttaatcataattgtagacgtttataacctgcttttttcactcagtaatatatggtacccattttaacatgttcctatgaggtctctgtaaccagcacttgttttttctttttttttcgagacaaggtctcactccgtcacccaggctggcgtgcagtggtgccatcgtggctcactgcagccttgaactcccaggctcaagtgagtgatcttcctgcctctgcctcccaaagtgttgggattataggcatgagccaccacacccagcctgtagccagcattttaaattgctgcattaaatcccttctggccagccagtgcctcttttctggccacttttaaagtgtgaggtaccatgtgtggatgtaaggaacccaatagggaatataacagattcagcatctgccctcccaaagcagatgtcagacagtttaagagtcacaactaccacgtgtcaaggtgttgcatgaggcagaaagtgcagagagaggcggagccaccccagaagaggcttaacctcatctgggccaggaagacctcaattatcctccatgtgcccagggaggcactgcaggctgtgaggtggttgttgtgtgctgaagagtcaggctgtgctttggtaggaagcttccttctggagactgaagcagtaggactgctactgagaaagagagcaaagaaactcagctgaggtctgagtcacgtttttgtgcaagggcacattttatcctctcaaaacagcatgtcttttgcttttcttttttcttttttgagatagggtctcactctgtcacccagcctggagtgcagtggtgtgatcttggctcactgcagccttgatatcctgggctgaagtgatcctcctgcctcagcctcctgagtagttggcactacaagtgtgcaccaccacgcccagctagtttttgtattttctgtagaggcagggtttcaccatgttgcccaggctggtctcgaactcctgggcttaagcaatccacctgcctcagtctcccaaagtgctgggattataggtgtgcaccactgagcctggctgtttttgcaaggttataggttcccttatactttggggaactgataagcacttttaagtgcagaaaaggaggcttacaggatgatatcacaagaagagtagagaactggaacctacttctgagatgatgcactttagatgcctcttagctccttaatagcagcagctctgtctgtgtcataaagtagtgaaattgctgtggttggcagacatttctagaggccctgtacgattttgaaaatgttatgtctgtttaacagtgggtatgtaccaagcactggcattggataagacgtaggcaataaaagggtgactaagtcgcagttccctcttgtcctcctggcattaatcattgtcccttgtgttcctgatattttttattttcagctaagtaatcatttgtttgaagaacttgccatggatgtgtacgatgaagttgacaggcgagagacggatgcaggtgacttgacgtggctttatctaataagcttctgttatcagtgggcagtgaaaagctgccaggctcagtgttttactagtccaatttctgctgtcctgatggtgcgagtgtcgacgtttgcctttgcgtgtgttggcttcagagtgtgtttcccctcgtagtgcgtgagctgtgcctcccaggagcagtggcacacaggcgtgatgaggtttgtctctggctctttcctctgactagtctggcttgccacgcaaaaccacagcgccctggtaaccgagacaacggtcgtcccctttcttccggtcaatcctgagtactcatcaacacgaaatcaggcaagtggctcagtttggaaaggaatagtagttggggaatggctgatgtcatgtttcatttttcccaggaaaactattctaaatgttttgattgattaaaatttaatatcctttatacatatatacacacacaacccccaaattgataagaaaaacaatagactataaataaatgactgggaaagaatatgaaacaattcacagaagaaatataaatggcttacaaatgtgaagaaatgtttaaccttgtcagtaatctaagaaagcaacttaaaagcattagtgcaagttttatcagtcaaattaataaaatatataataaaggatactccaaactggtaaggatgtggtaagctgagctttctcttgcaacagatagaactttaaattgctgtagatgttagaaaagcaatttgtttaccagtttcagaagcctcaaaattaagtacatccttttacatgggaatttctcatttgagaatatgctctaataaaataaaaatagatttatgcacgtgattttcatcaaagcaccattgtatacaatagagcattaaaaacagctaacacatccatcaagaggagaaatgttgaatgaattatgaaggtgttttagtctttataattagcagctatatataaggatagggaatatctagactatgattttgtttaacttaaattttttttttcttttgagacggagtcttgctctgttgtccaggctagagtgcagtggcaccatctcagctcactgcaacctccacctcccggacccaagcgattctcttgcctcagcctccccaagtagctaggattacaggcacccgccaccatgcctggctaatttttgtacaaagtcctgacctcaagtgatcctcccgcctcagcctcccaaggttctgggattacaggcgtgagccactgcacccggccttaacttaaaatttaaaaattcccctcaaaattaatttattattactgggtctacttccaaactgaagcattaatagaagaaaagcattcagtagacccattttatttttgcttaccaaaatagacctgcattgtgagaacaatgcatatgtgagaaatgccataacatttgttatgaaattctcttatataaatggttttaaactgttcatatggaaaacaagcattaacttggtttgattatggctgggattaattgtactttgatcatgccagaagaaagtatttgcagaagtctgtcaatagtctgactagttttatgtgactatttatgtatatatttttacactgggaaatatttccaattattttcccacctttagggcagacagaagttagctcggttcaacgcccatgagtttgccacgctggtcattgacattctcagtgacgccaagaggagacagcagggcagttctctctcgggttcaaaaggtaactgctcaaacctccaaacacttgcattttttggccctctaaatttgactcaggtgttaaagttataaactaattaaagcagtcatcaacatgacagttctataggtttttggttttttgtttgtttttttactttaagttccgggatacctgtgcagaatgtgcaggcttgttacgtaggtatacgtgtgccatggtggtttgctgcacctattgacctgtcctctaggttccctcccctcagccccacccactgtaagttttattggtagtatattgtgataaatagtttacctgtctgagccctggtgaattaacaatatttcagagttattaactgctacacatatttatcttatatatgatttctgttttgttttgggacacttaacctaccctgtaaaattgcatcctgaaattaacccaaaactctggcttagatcttgttaaaggacataagaaaataaactcttcttggccgggcgtggtggctcacacctgtaataccagcactttgggaggccgaggcaggtggatcacctaacgtcaggagttcgagaccagcctggccaacatggtgaaaccacctctctactaaaaatacaaaaattagcaaggcatggtggcgggcgcctgtaatcccagctacccaggaggctgaggcaggagaatcacttgaacctgggaggcggaggttgcagtgagccgagattgcaccactgcactccagcctgagtgacagagcaagactctgtttcaaaaaaaaaaaaaaacggaaaagaaaaactcttcctgattgaaactgcataatatctgctgttgcttacctacaaaactgagttcaacataattaaaatttgttgccataaactttaaatgtcttcagtgagaattactgtgatatacaattataaggagagctctgagcatctgtttcaccagtgccctgttgagtctagttcagtagcccaggtcctgtctgcatgcttaggaatgtccttcctctccagccctattactgtatccatattggttttttctaattatagaaattagacgtttttcattgtaagtcatttaagcaaaagaaatatgtaccataaaaattaagttttcagtcagtatcacattccccaaagacagtaatcattaactgacaacaactcattcattcttctttcctgttcaggaatttgattttatctgttcaaccaggaataaggaagttctgaaaaggtttattaaattttggtgaaggcacagtgacaagagtctttggataagtttaaagtcttaaaatggcctgggcgtggtgccttacgcctgtaatcccagcactttgagaggctgaggcggacagatcatttgaggtcaggagtttgagatcagcctggccaacatggtgaaacccatctctactaaaaatacaaaaaaattagctgggcgtggtggtacgcgcgtataatcccagctactcaggagactgaggcaggagaattgcgtgaacctgggagacagaggttgtagtgagccgagatcacaccactgcactctaacctgagcaacagagtgagactctgtctcaaaaaaaaaaattgggggccaggcacggtggctcacacctgtaatcccagcactttgggaggctgaggtgggcagatcacgaggtcaggagattgagaccatcttggctaacatggtgaaaccccgtctctactaaaactacaaaaaattagccaggcatggtggtgggtacctatagtcccagctactcaggaggctgaggcaggagaatggcgtgaacctgggaggcagagcttgcagtgagccaagattgtgccactgcactccagcctgagtgacagagcaatactccttttcaaaaaaaaaaaaatttttaacttaaaaaacaaagtcttaaaaaatacctgctctttgatttgataattccactcttaggtattaactgaagggaaatcatcagagatgttatatgtagaacaacacaaacattagaagcaactaagtaataaagaggaacaattagtcacattttaaaatagtacatgctgcactttgggaggccaaggcaggcggatcacgagttcaggagatcgagaccatcctggctaacacggtgaaatcctgtctctactaaaaatataaaaaattagctgggcatggtggcagacgcctgtggtcccagctactcgggaggctgaggcaggagaatggcgtgaacccgggaggtggagcttgcagtgagccaagatcgcaccactgcactctagcctgggcgacagagcaagactccgtctcaaaaaaaaaaaaaaatacatacttatctttttttaaaagaatatgtaattgtcttagtcccttttgtgtggctataaaagaatacctgagactgggtagttcgtaaagaaaaaaggtttatttggctaatgattctgctgactggaggattgggcatctggtgagaacctcaggctgcttccactcatggaaggtgaaggggtgctacatgtgcagagatcacacggtgagagaggaagcaagagagcgaggagggaggtgccaggctcttttcaataaccaggtcctagcaggaactaatagagcgagaactcactacaaagggagggcattgatcagttcataaaggatccacccccatgacccaaacacctccctttagtcctcccctccaacactgaggatcacatttcaacatgagatttggagggaagaaacatttatactatagtagtaattatatgagacaaagtaataaagtttgattttgttttgtttttttttttttgagacgagtctcactctgtcgcccaggctggagtgcagtggcgcgatcttggctcactgcaacctctgccacccaggctcaagtgattcttgtgccttagcctcctgagtagctgggattacaggtgtgcaccaccacacccagctaatttttgtattttttagtagagacggggtttctccatgttggccaggctattctcgaattcccagccttaagcgatctgcccacctcagcctcccaaagtgctgggattacaggcatgagcccccatacctggccaaataataaagtttttaaaaggttttgtataaccccagttttgtaaggaaaacatatttatgtaaatatgtgtgtacaagtgagtataccacatgtaaatataaatacacaattgatcctcatgtgcacatcccatatttacaaattcatctacttgctaaaatttgtgacctcaaaattaatacagcattttcaaggtcattgtaagaaatgtacagagcagagaaaaaaattgagtcaccaaaagcacatgtttccagctgagattgaacagggaggagactccttgacttcttgtttctgcactcatgctataaacaagtgtctgtggtctatttagtgccatgttagtcatatttgtgtgcttttcattggtcatttcactgttttaaaatggccccctaccgcccaggatcaattgagtgcccaggagattgaggctgcagtgagccatgatcacgtctgcaccctagcatgggtgaccctatctcaaaagtgtctccttggccagacgcagtggctcacgcctgtaatcctagcactttgggaggctgaggtgggctgatcacgaggtcaggagttcgagaccagcctgaccaacatggtgaaactctgtctctactaaaaatacaagaaaaattagccaggcatggtgacgcgtgcctgtaatcccagttactcaggaggctgaggcaggagaatcacttgaacccaggaggtggaggatgcagtgagctgagatcgtgccactgcactccagcctggatgacagagtgagactccatctcaaaaaaaaaaaaagtgcacacctgaacaacatagcaaggccccatctttaccaaaaaatttaaaaattttctaggtgtgttggcatgtgtctgtagtcctacatactcaggaggctgaggcaggaggatcacttgagcccaagagttagaagctatagtgagctatgattatgccagtgcactccagcctgggtgacatagcgagaccctgtctcaataaaaaaagaaaaaaagtggcccccaagcatagtcctgaagtgctgtctagtgtttctaagtgcaagaaggctgtgatgtgccctacggagaaatgtgtgttaaataagcatcattcaggcatgatttatagtgccgttggccatgagttcaatgttaatgaatcaatactatgtattaaataaggtatctttaaacagaaacacacgtagaacaaggttatatattgattggttgataaccccagaagcactgatctaatattggccaagtcacagcaactttttagaacataactaccaagaggctgggtgcggtggctcacacctgtaatcccagcactttgggaggccgaggtgggcagatcacgaggtcagaagatcgagaccttcctggctaacacggtgaaaccccgtctctactaaaaaaatacaaaaaaattagctgggtgtggtggcgggcgcttgtagtcttagctactcaggaggctgaggcaggagaatggcgtgaaaccgggaggcggagtttgcagtgagccaagatcgcgccactgcactccagcctgggcaacagagtgagactctgtctcaaaaaaagaaaagaacataactaccaagcataacaagaattgactgtgtgtggctataagtgctcggagaaaaacctagaaatagatcaacaaataacaatggctataagtgattatcttacttgttcattagtttctaaattgaatatattgactatnnnnnnnnnnnnnnnnnnnnnnnnnnnnnnnnnnnnnnnnnnnnnnnnnnnnnnnnnnnnnnnnnnnnnnnnnnnnnnnnnnnnnnnnnnnnnnnnnnnnnnnnnnnnnnnnnnnnnnnnnnnnnnnnnnnnnncctttattattattattattttttttttttttgagacagagtctcgctgtcatccatgctggagtgcagtggcatagtcttggctcactgcaacctccaccttctaggttcaagcgattctcctgcctcagcctcccaagtagctgggattacaggatgtgcaccaccacgcccagctaatttttgtatttttagtagggatggggttttgccatgttggccaggctggtctcgaactcgtgacctcaagtgatccatctgcctcagcctcccaaagtgctgggattacggatgtgagcccctgcgcccagctaggacctagtctttttaaataaccaccattcatcacccagatatcatccatccattgtttcctcaacatctctgggaaacaatattagaagtcagagtttgagttgcctgaaagaaatcagagagacttgggtagtttgtgaaatcttttgttcaaagtgtattagatcctctagaataatccctgctccctatgggatagacactccctgtaacatgcacatgtgtatttgtttgattcattctcctttatctctttctctcgctgagatgcaggtaattgactaaatgccaatgtttctattcttttttttttttttgagacggagtcttgctctgtcgcccaggttggagtgcagtggcatgatcttggctcactgcaagcgggttcatgccattctcctgcctcagcctcccgagtagctggggctataggcgcccgccaccacacccggctaactttttgtatttttagtagaggcggggtttcaccatgttaaccaggatggtttcgatctcctgacctcgtgatccgcccgcctcggcctcccaaagtgctgggattacaggcgtgagccaccgcgcccggcccagtgcttctattgtttgagtgcctaggttctggctccagtttaacaatttgctttctgttttgagtgacattaccttgtaaatatgttataggtattcatagaattacagtttatcttccattacctacagccttatcttcatgacctggagctaggctctatctctagaaacttgggaacctgccttctttatctgagcagttccttcctaagccatctgtttaatttgcccatatttggcaggtagatgagaggaatgctggagtctcttatgtagctgtccacctggttgaaaactttttctgttatctctgtattggtgtgaatataacgttgccatttctgtcattttttttcagtccttgttcattttgtttttgtctttgtttttgctcttagagacagggcctcactctgatgcccaggctggagtacagtggtgcagtcatggttcactgcagcctcaatctcctgggctcaagcaatcctcctgtcttagcctcctgagtagctagtagctgggactacaggcctgtgacaccaggcctggataatttttaaattattgtgtagggatggagtctcattgtgttgcctaggtaggtctcaaactcctggcctcaagcagttctcctccttggcctcctagaatgctgggattacaggcaagagcacagcattcagccctttaagtcctttaaatggctaaaccaaaaaatcctctccgtagttttttggaagaaaagcaatgttttaagcctgaagtaaagttgtttgcttttattgatagacaatgtggagctcatactgaaaaccatcaataaccagcacagcgttgagagtcaagacaacgatcagcccgactatgacagcgtggcatcagacgaagacacagatttggaaaccactgcaagcaaaacaaaccggcagaaggtgagaggccatgcgtcccatggaagggcaagcacgcatcagctgagggctagccctgccaaagctgctgtgcagtgaggttgggtttgttactagctcaggccaagcaaaggtgaaacaaggttaaatggttttaaaatagggatccttgtccctgcatcacagccctgctgcagttgagactttataaaacttgtgaggagtgattggtgtgttttattcattcaacaagtgtttactgagtgacttctctggatattactctcctgaatgaggcctcgtccctttcctgtgaggctctcattgcctaggagagagagaactgcggagaaggcacaaagtgatgtgtgtcatacgaagcacacacaggctgagggagtgagcagagagagaatctatggctgggagcatcaggtggggctgtgtcataggacagctcttaagatgcgcctcaagggacgcttgggattggggcatgtggaggagtcagaaagaaagtgaaaccagggcatctaaggggaagctggtcatgcatagggacagcctaaaaaggttgggactcgaagctgcagcaggaggggtatgacacccgacggaagagagtgggcctcacaggcagtgcagagcccaggatgccatgtctggggaggactcttctggtgggttagagagtggagggagagatccatactggagctgatgcaggccacctaaggacccatgctaggatggtgcgggtgggagagacctcggcaccagagtgtgagctgggggagagggcagcaggaccccaggctgtgcaccctctgctgacccccaggacacacccacagaggggcttggcaatcatttgagaatggatgaataggaaggtagaatagaaaagtcttggcaataagtcggaaggttgaagtggggagacagatttatagaagatttgtttggagttcttcggcccacatgactgtgagaaagatggcgtcattagcagatgcaggggacacccctgcgcagacttcccggaagccacctggttcactcagtgagagccgaggtcattccaagaccctctgtgaccaggccctctgtcaaccgcctggcctcctgcccagtccatcccacacacctgctccctctagctgagctccactgcaggctggaatgttcttcctccagattcatgtgactcatcccctcacctcctggggctctgctcacctctcacccactcacaggcttaccccagctccccgcttaacatgcagccccctaccctgctctgtcttatcttttcccacagcactcatcaccctcaatcatgcaatatatatactctctcatgctgttggaatataaacaccatggaagcaggaatctttgtctcttttctaatatatcccaagcacctagaacactgcctaatgttcaatgaaaatgttggaatgaatgaattaatgaaagaatgaataaaaacaaaacaagagtgaacgagagaaaggcttacaagacaggacagacctccttagacagtcattgtcagcatagatgtgtagcctcactgcctgttctattagaaaatactgactttcaaattttttaaatagtatagtgaccctacttttatgttttagttttgcattactctcagaggccttgatttggtttgactaactttgcaattcagctggcttggtcagaatttgaaattcttgagctgttagtctttaatgttctcgtcatctcagattgtgaacgttttcccaatttatttttagagcctagattcagatttatcagatggaccagtcactgtacaggaatttatggaggtcaaaaacgctctagtggcttctgaggccaagatacagcagctaatgaaggtgaataacaacttgagtgacgagctgagaattatgcagaaaaaggtaacatgttaataaatgccaggacggttgacgctttaatcccatagtacaaggaagaatctcaggcactgtgatgtggtccgaggaaagaaaaacagttattgtaacagccttagaaatctttgggccaagttgtctttttgaagcaggatgtatttggatatttaaaatgaaatatatccagagtaagttccccaggtaggagaaacctaacatctatttaagcatttgtgcccattagaataacccttggactattctgtgcttcctggaaacctggatggggctccatggatgtgattcttcccattgctagggaaggatgatcacaccatggagacagagccaatgagagccctgggcaggggcatgtttatcagcattcaaaccctgctcccaccctggcagccctatcccacatccccaccttattgctcaccagtttttactactaacttgtattatccccagagcctacaggagggcctgccacagagtaggtgctcaaaaaataagaaaaaacatttcatttgtactaggaagagctgcacactggtaaaaaacaatctcatttgctcagcattttctcattcattaccttttgagagaatcagaaccgtgtgaatatattaatccctaaaaggagtgtggttgatggtagcaaggaatacccttagtaggagggggattgtgtatgcaactccttatgagatggctaaataagggaattcgaaaaattgcaaattttgcccatgactttgtgggtatcactcatcattcagctctaaaatgagatttggacactttacttaaccagaaacaaaatgaaatatataatctatgtctttaggctgtcatttgagaagtaaggttttcaaatcattttcaagacctgaggacgtggcacactccatgtgtgcctggactcttttcagtgctgcttcctaaaggaaggtggaagaactaaaaaggggcccatgcccctctgtttactagggaaggaaattgctgtgcacttttgcctggggtttggtctaggattcttttgatgttgacttctagagcatttttgagactttttgaaataaatggctctaatgcctatagtagcagggaatgaagaatgcttaagatcagctagccttaaacgaacagacacttgttctgtgtctcccagccctgtctagggctgccgtgcagctgtaaacgagacagaccgagagcccctttgtcataacatacaggacctgtattttctttgccttctttggaatatattttatttagtggattatagtttgttccattaattggactaataattttgaccaggtgactatttctgaaacatgctgattttgccactgtaaatcaatctgctgcacatcaccttttaaaatctaacaatgcttcttttagtatttttggaaatcaccagagagagcctcattatctctgaaagcaaatgtcttgagcttctttgagaaatgcaaagtgaaattatttgcttttgcttattgattatctcatcaattcttagaagtgcttttgatttctgaaactattgaattgtctataactttttattttcccttatactccttccaaataaaaaagtgtagcctggttcttattaagataaacgtcattaaaatttatgtgaagacatctctctaaatacagagtactaacatttttaaaaattgaaaccaagaacttgtgctcatgagaacacattcagacaaaatccaggcatgaaaagtgttaggataaagtttcagatttcaaggccttaactaaataactgccacagaggctttttatacagacaaacacgtgatcacatgcaccagtgccccattgagggacctgtgtcagttacacacctcagtccttgaaccttgaccatttcactctaggccctgggttctctaatgaatagtttcaacaggcacttcatgcctgtctgtatcctggaatgtagaaatgttcagggctgctttgtcagctgctttgcagctgttctttccctggaaagggaattgcagatatgagctataccctgccagcctttgtgatataaaagcattctatcattctgtaatggcttgctcttcagagaaacagaatgagtggtctttttgtggaagaggcagtaagtcacactttcacagcagtttggcatgattaatataaagtatatggaatttgtttatttagcaaagatgtattgattatatttcaaagttgggtaaagtttttaatatacataaagttgacaaagtagcatgatttgtatctgatctttcacatttaacagttgcttggaaaagatgctaattaatgaagaggagcaactactattggtgtatttttcacagattggtgctttctaaataaaaattgaaagtaactcctaacattgaatgggtttgctactgaaaaagtaatgatcttctggtgcaaacagttgcttgtggacttaaaccttggcactggtggggaatttggtcagattttacaatctctgtcaaagagtagacagctgaactcacaccacacccagcttatagaatgtccatggaagatgaaggcgcaccagaagggaaggaccctgcgcagaatggacgtggtgaatggtgtttaaaatgccagatgccaaagagtaacacgattccctgctgaccccttaactctaatccatccagcaccatggagcagcctgcatgtgaggaatggaaggagcattcagggcctccaagtgacagtctctaaaatggggtggtgccaggcagattagcatgttcaaagctgacaccactgaggtcgtgttttttgggtgacaaagccaaaggagagaaaggccaaatattccagccctggccgaaagatgatcactcaccagacggaagcaagcgtgctgcgtggagcatccatgcgaagatgtcaattccatagatcaataggtttccagttttcttcgtgatatgttaatatagcaaacttaccatgatccggttttctcttttttctttttttttttacaaagtgctgaattgtttggaatatcaagagtattatgtaataaaaacttgttgatcataatttttcttgttggctttttggaaagcaataggcgatctgatttttcacaagctgaacttctgtctttcttgctttgcaaagcaaccctagtcatctttgtgctgcttccatggtgtctgctgtcatttttggcctttacaaattgctcagggctcatttgaaaagcaagttacctaaatgatgttttaatgatctcgaactcttgcttgaaacagccttagtaataatccagtgtacagcttgcctgcaaacatttcccagccccaccatgacaaattttaaagtggttagacattttgttttgaggaagtccaaaccacaacttttccacattcagaaatgaagctatttaatttgcttacgtgatgaagggagttgattgtgtttcacccaatccagaagaaagggtccttgtttgtattggctttttactttcagcccggctagctgttactgtccttattgtttaaaactggtagttgtattcatttacttggtgtttgctttttctgcttgctgtaaaaaaacacagtcccactgccaaacatttctttcagcttcaaacactccagagtgaaaattcgaacctcaggaaacaggccacaaccaatgtatatcaggtgcaaactggttctgagtacacagacacttccaaccactcttccttaaagagacgtccgtctgcccggggcagtaggcccatgtccatgtacgagaccggatcaggtcagaaaccatatctcccaatgggagaagcgagccgccccgaagagagcaggatgagactccagcccttccccgcgcacgtaagtaacaccactggcgcttctgctgttcactctatgcagcctgtctactctgttccctcttctgaacctacaggtccccacagctctgctttgccaaattggactaagagagttaccattgtgtttgctgtattaacatgtccacagatgcttgcgatattcccacaagcacacagggccatgggctgatggtttcctaaccaagttggggattctggctcttgcccgaactgctgcttttttctcccccacatccatgattatttctcaaccagccagtgttggaactttttttggtaaagcttccttccttctctacttccaaaaacaaaaataaatcataaagttcactctcagaaggaagtgttgccttcttggagctagacagggatgtgcccctttaagtactggagcccttagaatccaagacgtcttttcagctcctcctcaagcaggtggccttgagtctgtggcccaggtacccaggcaaggctggaaggctccaggcttccgcagcctctccatgtgtgctcagtgtgcctgctaggttcgcttctgcatcctgctcctcccaccgtggtgggggaagtgtggctttgttgtctcagaaaaggaaatgtaatactctacatcagtcttagaagcgctgaattccagagattgtgttctgcagcagggttcttacaatcttattttgcattgggatacatactgtgttataaggttttcaaatatatttcttctggattactttattataaaaatatgtgttttgccaagatgttacatttaaactttttcatgggatgctttttcagagagtagtatttgtctttttgagtgtcaaagtttattatttcttcagtcaaattttatgggagtttccaaaaaaattctcaaggtagatgcaaagcaaggacatggtttcgtgaattaaaccctagtttaattttgtcaattttcagtgtggtaaaattacaatattgttttactataattgggagtctgttatctcagattctttttaagatatttgggtttaacattctaaggcaattgatttgatacatttgatgtaatgggaatgccactgaactaagttaagaatcttttttttttgagatggagtctcgctctgtcacccaggctggagtgcagtggtgtgatctcagctcactgcaacctttacctcctgggttcaagcagttctcctgcctcagcctcctgagtagctgggactacaggcacatggtcctgtgcctggctaatttttttgttttagtagagacggggtttcatcatgttgcccaggctggtctcaaactcctgagctcaggcaatccgcccgcctcagcctcccaaagtgctaggattacaggtgtgagctaccatgcccaccctaagttaagaatcttatttttgtatagctgaagacaaaatttaggaaaagcaactttgttatttttcagtgtactttcttattttagaaaaaattagaatataaagatatatcaggaaggcactgtaattgtactaaaaattagattgatagtgtatagcaacttagaatcatttttatagtttctcatttcacatcagtcctgattgaaaaacaaatatgcatttcatagtatccattaaaaaattattgacaagtttgacaaattatgttaggtatttcccttatggaaaagcagccttattaaattcagagtaatttccaggaggtgtttcaccaagggtttaagcatctctggggtcctgtcactggtggccactgagattgcagcactcacgtcacataatgtgtggtgttccaggattcttttactgaagctggcaaggtggtaggtttttggtttgttttgtattttcccgagtgtgtttctctttcccattccagatcgggaggagtgcacttgtgacctcctcttcatctctgccttccttcccctccacactttcctggtcgagggacgaaagcgcccgaagggttaagtacattctgaatggtctgctctctggaggaggggccgtgctcctgggcgctttgtgcttgggctctggccctcctgtccctgctaactgcccttccgtcctgcatgaggcagcacttcctcctggtttctcacagtgcatcaggctcacactcgtccacatgcacgctcacccatcgagggcgcctccctttctctaaccccatactgctcatgttcacgtcatatttaacaaagtttgcaaatcaccctacagcatttattctgagcaaactgtttttttaaacaacgagaaaattagctggctgctggttagatattataataggccaaatttgttcaatttgttcagggctacagttgtcagattgaaactgctgtatgtggactcgctgaagtactaaaatgtcatgcctttttttttttttttaacctgtgacacattttatgtcagcaccacaagtgctgacaaaccaaggtttacaagtccctgcatcttgaatcagaattgtaacaccttgtggcattggagctatgcaagcagctgttaacctaaagctgttcacttgtacgggttggttaaacctcacctactggtgtataatttatggtctcaatagcagtgcatgattcaggtaagcctcttttagagtagtcaggcagtaagtattaagcacctcctccatacacagcgtttgggtaagtcaatgaaagggtcctaaggacttagctggcacagcccctgctcccaaaggcactgtcaattaaaaaatactttcatgcataaagagtggtacatgaccacaacctgggaaagccgtggaaagggcataggctttgaaatccacgtcccagttctggctccatctcttttttaatggaagggtaatgtaaggtaagaggaggaaggtggctgtgggtaagggaccacctttacaggcaaggtggggtttgcactgggcctttgccattccctccacacctaggaattatggagagcctttctttcctagttccagtggcatatggattaccaaggccctttcaggattcgtttttttattttttattttttagagacagagtctcatgttgcccagtctgtagtacaatagctatttacaggcatggtcatagcgtactgcagcctcaaactcctgggctcaagcagtcctcccacttcaggcttctgagtagctgggcctacaggcatgcgccaccatgccctgacccttttggaattcttcacttcactttcagtctattaagaattctcagccgagtgcagtgactcacacactttgggaggcctaggcgggtggattgcttgagcccaggagttcaagaccagcctcagcaacatggcgaaatcccatctctataaaaaatataaaaaattatccgggtgtgttgatgtgcacctgtagtcccaggtgcttgggaggctgagatgggaggatcacttgagcccaccatgagagatcgaggctgcagtgagccatgattgtgccattgcactccagcctggacaacacagtgaggccctgtctcaaaaaaaaaaaaggaattactgtactaaaaaaaaaaaaaaagaattcttgatacattgtacttaaagtctcggctgggtgcagtggctcatgcctgtaatcccagcactttggaaggccaaggtgggtggatcacttgagcccaggaatttgagaccagcctggccaacatggcaaaacctgtctctactaaaaatacaaaaattagcggcgggtggtggcgcatgcctgtaatcccagatacttggaaggctgaggcacgagaatcaagaatcccttgaacctgggaagtggaggttgcagtaagccgagattgcaccactgcactccagcctgggcgacagagtgagattgtcttaaaaaaaaaaagtctcctgagcagttctgaaattgaactgtaatgtttcattaaaatagcccagatacaactaaaggacagttagacagtgattaaatatctcattagaaattttgtaagtcaaacctcttttgtctactgtgaaatttttgttttttaatttgtatggtagccttaaaaatcattgcaaggactgcttgctgagacagagttttgtacaaaaatcatttaaactgatcaccctgattgttcctgacagcttcatcatgagtttagatttttatggcgtgtctttattcagagaaaactgcaaacctattaaatacattgaaccagcaccagctataaggtaaccttcctattaacagctttgagagagcagcactcttaaccaatagcttttggctctgcatgcttataatatttttgatacaattaaatgctggctacactgaaattctgtacatatgcttttgttgacaacgatggaaggacttaactaacgtgtaagtaactgatttcctgggtggttgctgctatatgttgttttccatacttgaaaaaacatttaccaaatgcatttattaggtatatgagtcactactcttctaaaatgtttaaatgaaacttggtacttttcatcattgagggtaatgcatttgatttgcgatttatcacattttcatcagggaaggcaaaaagattcattataaaggccagacatggtggctcacgcctctaatcctagcactttgggaagccgaggcaggtagattgcctgagctcggtagtttgagaccatcctgagcaacacagtgaaaccctgtctctattaaaatacaaaaaattagccaggtgtggcggtgggtgcctgtagtcccagctacttgggaggcttaggcaggagaatcacttgaacctgggaggccgaggcagaagttacagtgatccaggattgcaccactgcactccagcctgggcgacagagcaagactctgtctccagataaataaataaaaaagattcattataaaaatgtagaattttctgggtttaattctgtttctagtttgttttccactggagcagctctgggcaaatttttcagtataattacgtaaatgcaagtttttatctattcatatatgtgtatatgtatacacacacacacctctgtgtgggtgtatatataaaaaccaaaataaaacttaaaagttagttggggccaggtgtggtggctaacacctataatcccagcactttgggaggccaaagttggaggatcacttgagctcaggagttcaagaccaggctgggcaacatagtgagaccttgtctccacaaaaaagtacaaaattagccaagcgtggtggcacgggcctgtggtcccagctgctcaggaagctgaggtgggagaatcgcttgagtctgggaggtcgaggctgcagtgagccgagattgtaccactgcacttagcctaggcgacagagtgagaccctgtctcaaaaaaaaaaaagaaaaaaaattggcagggtgcggtggctcacacctataatctcagcacttttggaggctgaggcgggaaaatcacctgaggtcaggagtttgagaccagcctaaccaacatagtgaaaccccatctctactaaaaatacaaaattagctcggtatggtggtgcatgcctgtaatcccagctactcagggggccgaggcaggagaattgcttgaacctgggaggcggaggttgcagtgagcctagcttatgccattgcactccacaggcaacaagagtgaaactcaatctcaaaaaaaaaaaagaaaaaagttaggcattccctgtgaaagataagaagggttttgggtttttcttctttctttttcattttctaagctcatctctggaagaccacagtgcttgcccatgatcttcctgctataaacttctagcagccaaactcactgactgttcataaagccagatcaaaacaaggcagcaagagaagcagaactacttattgataggagatataaacaaagggatcatcaaagttgtcgattctacagaaattagctttacagactccccatatggctccaagctaacgtttaatcatttgccagatggatttgagtggcttcaggatgcacgagttcatagtgaattttaggagcccacagcaagtgtcttgtatttgagcagctgggaactaaacagcatgcgtggaggtgtggatggaagacctcagccgacagaggagagaacatgcgccctgggagcagaagagtgtatggggatagcaaacaaagtgtggtgtgaataaggggggcttctccacgtgggtccggctgccttgcctgtacccaccaggtgttatcagtaaggagtgacaggctttatgtagagttttgtggggtttttttttttttttctttttggttttgttttgttttgttttgttttgttttttgagttagggtctagctctgtcacccaggctggagtgcagtagtacgatctcatctcactgcaacctccgcctcctaggctcaagagatcatctcacctcagcctcccgagtagctgaactgcaggtgtgcactaccacacccagctaatttttgtacttttagtagcgatgacgtttcaccatgttgcctaggctggcctcaaattcctgacctcaagtgatctgcccacctctgcctcccaacatgctgggattatgggtgtgagccaccgcacctggccatgtagaccttcttaaaccaacttactcaaaagtagccactcttttggatgaagctacagggtttccatatgtttaaacaaagctcttagtttacatctgtgtccttagccacattttattgcagcatcaataaaactccttagtcccatgttttgattaacttggatgaaattcaaggagtaaagctagaaatagctcacacttatattttataaggtaagtggtttaggttttaaattagcctccactgatctctgttccagagaagttctcaagcattatgggtgaaataaatagggaaaataatgttcatgaaatactcagaacatagtccccttcgaaggaataaagtccccttcaaatttcgtcaccctagaagatcgtgtgtttagcagtgctgccatttgttcaaaacatttttaggattcctcttttgaatctgtatcccatttttgatcaccacagttgcaccaaatctttacattttaaggggtagatttgagcccaggcatgaaatattggaggtagcaggaggcaggagacctggtgcttggtcctgtttttctgcagactttgtggcctttggtgggccacccagcttttttggcccttcattttctcatatggggctcaatgagataatctgaaggtggcttccagtgctgaaggtctgtggtcatataagtgctggcatgtttttttgtttgtttgtttctgagacagggtcttatcttactctgtttcccaggctggagtacagtggtgcgaccatggctcaatgcaaccttgaactcctgggctcaagcagtcctccctcagcctcctgaggagctgggactacaggttcatgctaccatgcctggctgatttatttatttatttatttatttatttatttatttatttatttattttatttattttttaaatgttgcccaggctggtctcaaactcctagccttaagcaatcgtcctgcctcagcctcccaaaatacagggattacaggtgtgagccaccacaccctgcctgtattttaactgcatctcattatgttataaatttgagaactaaatgaggatatgttgccttgcatgtctgttagtttgtactaaggatctgattaggaagtggccactgagctaagaagaaaatggtgcaaagaaggaaagaggccatttctggatccaatattcatcttttactaaattttcactagagagttgtcccctgtcccaaatgagatttgggatgtgaaggccagtagcctaacaggtaacaattcctggggaagactcctgagaagagtctcatgttacaaactcatgagggtccctcttctttcttgtaggcatccaggctggagaagcagaacagcacacctgagagtgactacgacaacactcccaacgacatggagccagatggcatggggtacatgcacaggacgagcgtgccaggggaggggctccccagggccagagacctggcaggcctgggccagcagaagcagttcaccacacacaccccttttctctattttcagactcataaagtcttaaagtattcaagcatacgctcgtagtttacatgtcttgtcatctcacattgttgccgaaaggcctttttctttgtaccagcatgttatgtgtctctagctgtctgtagtgtgtttaaagtcattaccccacttcatcatgaagacaacattaggttacattctgcatttgtacccaaggagttggcccacctgaggatggctttataaacaaacaccctccccgctccaggtatttccctcccttttcccctccttcacccttcctgtgagagtcaacacttccagccctatggtagagtgaaatagccgattttagagccttaccatgagtctcctgctagacaggataaaggaaatgacgagaccagcctgctcatgcatttagccagtgcatacaaagtggctcctagaagcagaggggcagctgataagcacctgctgtatttaactgcatctttaatgttcacaggtcaagccgaaagggacggcaaagaagtatggtgtggccaggggatggcttggtaccagacacagcagaaccccatgtggccccaagccccactctccctagcaccgaagatgtcatcaggaagactgaacagatcaccaaaaacatacaggagctcttaagagcagcccaagaaaataaacatgacaggtaagcaggattgaagaccctgctttgggagagcatgagttatgcgcccagaaagggatgatgcccatgttcctaatggcagctattcccagcatgctgacttcaaggtcattgaaaacaagtctacataacaggcttaagaacaatgtcagttttggtttgctttgtcttgtttgatttacatggtattttcttttttttcatcttgttacgaagctccgaaaataaatgcctctagaaacaggattgcggcatagttagggtggtgacaatgctagttctaggagggggacaggggctaccttacacctcgctt

SEQ ID NO: 1520 - DNA, 2287 bp, Homo sapiens
cgccgccgtcagcgccgccgcagctgggacccgttagagcggaagcgccgccgccaccgccgcctttgctgtcccccggcctctagttccccgcaggtgggaggtgggagccatgtcgaaacggctccggagcagcgaggtgtgcgctgactgcagcgggccggatccttcctgggcatcagtaaataggggaacgtttttatgtgatgagtgctgcagtgtccatcggagtctagggcgccatatctcccaagtgaggcatctgaaacacacaccgtggcctccaacactgcttcagatggttgagaccttgtataataacggtgctaactctatatgggagcattctttgctggaccctgcgtctattatgagtggaagacgtaaagctaatccacaggataaagtacatcccaataaagcggaattcatcagagccaagtatcagatgttagcgttcgtccatcgcttgccctgccgggatgacgatagtgtgactgccaaagatcttagcaagcaactccattcgagcgtgagaacagggaatcttgaaacctgtttgagactgttatctttaggagcacaagccaacttctttcatcctgaaaaaggaaacaccccactccatgttgcctccaaagcagggcagattttacaggctgaattattggcagtatatggagcagacccaggcacacaggattctagtgggaaaactcccgttgattatgcaaggcaaggagggcaccatgagctggcagagcgcctcgtggaaatacagtatgagctaacggacagactagccttctatctctgtggcaggaaaccagatcacaaaaatggacagcactttataatacctcaaatggcagacagcagcctggatttgtctgaattggcaaaagctgctaagaagaaacttcaatctctaagtaatcatttgtttgaagaacttgccatggatgtgtacgatgaagttgacaggcgagagacggatgcagtctggcttgccacgcaaaaccacagcgccctggtaaccgagacaacggtcgtcccctttcttccggtcaatcctgagtactcatcaacacgaaatcagggcagacagaagttagctcggttcaacgcccatgagtttgccacgctggtcattgacattctcagtgacgccaagaggagacagcagggcagttctctctcgggttcaaaagacaatgtggagctcatactgaaaaccatcaataaccagcacagcgttgagagtcaagacaacgatcagcccgactatgacagcgtggcatcagacgaagacacagatttggaaaccactgcaagcaaaacaaaccggcagaagagcctagattcagatttatcagatggaccagtcactgtacaggaatttatggaggtcaaaaacgctctagtggcttctgaggccaagatacagcagctaatgaaggtgaataacaacttgagtgacgagctgagaattatgcagaaaaagttgcttggaaaagatgctaattaatgaagaggagcaactactattggtgtatttttcacagattggtgctttctaaataaaaattgaaagtaactcctaacattgaatgggtttgctactgaaaaagtaatgatcttctggtgcaaacagttgcttgtggacttaaaccttggcactggtggggaatttggtcagattttacaatctctgtcaaagagtagacagctgaactcacaccacacccagcttatagaatgtccatggaagatgaaggcgcaccagaagggaaggaccctgcgcagaatggacgtggtgaatggtgtttaaaatgccagatgccaaagagtaacacgattccctgctgaccccttaactctaatccatccagcaccatggagcagcctgcatgtgaggaatggaaggagcattcagggcctccaagtgacagtctctaaaatggggtggtgccaggcagattagcatgttcaaagctgacaccactgaggtcgtgttttttgggtgacaaagccaaaggagagaaaggccaaatattccagccctggccgaaagatgatcactcaccagacggaagcaagcgtgctgcgtggagcatccatgcgaagatgtcaattccatagatcaataggtttccagttttcttcgtgatatgttaatatagcaaacttaccatgatccggttttctcttttttctctttttttttacaaagtgctgaattgtttggaatatcaagagtattatgtaataaaaacttgttgatcat

SEQ ID NO: 1521 - DNA, 1419 bp, Homo sapiens
atgtcgaaacggctccggagcagcgaggtgtgcgctgactgcagcgggccggatccttcctgggcatcagtaaataggggaacgtttttatgtgatgagtgctgcagtgtccatcggagtctagggcgccatatctcccaagtgaggcatctgaaacacacaccgtggcctccaacactgcttcagatggttgagaccttgtataataacggtgctaactctatatgggagcattctttgctggaccctgcgtctattatgagtggaagacgtaaagctaatccacaggataaagtacatcccaataaagcggaattcatcagagccaagtatcagatgttagcgttcgtccatcgcttgccctgccgggatgacgatagtgtgactgccaaagatcttagcaagcaactccattcgagcgtgagaacagggaatcttgaaacctgtttgagactgttatctttaggagcacaagccaacttctttcatcctgaaaaaggaaacaccccactccatgttgcctccaaagcagggcagattttacaggctgaattattggcagtatatggagcagacccaggcacacaggattctagtgggaaaactcccgttgattatgcaaggcaaggagggcaccatgagctggcagagcgcctcgtggaaatacagtatgagctaacggacagactagccttctatctctgtggcaggaaaccagatcacaaaaatggacagcactttataatacctcaaatggcagacagcagcctggatttgtctgaattggcaaaagctgctaagaagaaacttcaatctctaagtaatcatttgtttgaagaacttgccatggatgtgtacgatgaagttgacaggcgagagacggatgcagtctggcttgccacgcaaaaccacagcgccctggtaaccgagacaacggtcgtcccctttcttccggtcaatcctgagtactcatcaacacgaaatcagggcagacagaagttagctcggttcaacgcccatgagtttgccacgctggtcattgacattctcagtgacgccaagaggagacagcagggcagttctctctcgggttcaaaagacaatgtggagctcatactgaaaaccatcaataaccagcacagcgttgagagtcaagacaacgatcagcccgactatgacagcgtggcatcagacgaagacacagatttggaaaccactgcaagcaaaacaaaccggcagaagagcctagattcagatttatcagatggaccagtcactgtacaggaatttatggaggtcaaaaacgctctagtggcttctgaggccaagatacagcagctaatgaaggtgaataacaacttgagtgacgagctgagaattatgcagaaaaagttgcttggaaaagatgctaattaatga

SEQ ID NO: 1522 - DNA, 55998 bp, Mus musculus
  misc_feature (653)..(1291): n = a, g, c, or t.
  misc_feature (12656)..(13095): n = a, g, c, or t.
  misc_feature (20153)..(21482): n = a, g, c, or t se.
  misc_feature (25312)..(25675): n = a, g, c, or t.
  misc_feature (33216)..(33235): n = a, g, c, or t.
  misc_feature (36721)..(37194): n = a, g, c, or t.
  misc_feature (42797)..(42816): n = a, g, c, or t.
gttaataaaaggtgaattcgtgttacaagatggttcacacctatagtcccaacacaagagagcctgaggcagcagtagtcaaggccagcctgggagctacagtgagactggctcaaaacacaaagtaaaataagtaaaagcaaagagggatccttatccatgactcctcagatgggagcacttgctgtttttatggaggactgggggccagctcctggagatcagcaaattcagctccgtggggaccaataccttttggtttccagggacacttgtgcacacgcaggcaccacatgcctgtgtgtgcacacgcacacacaaaatacatctaaaataaacacatactgaaaggcagtctttcacagctgtaatctcagcatttgagatgctgaagcaggaggagagtgaagttaagggccagcctgagagctacagactgaactctgtgtaaaattaaataaagaaattgtggggtggtgaaacctttaatcctagcactcgggaggcagagacaggcagatctctgggtttgaggccagcctggtctagagagtgagttcctggacagccagaaaccctatctcaaaaaacaaaataaaaatagatggaaggaaggaaggaaggaaggaagggagggagggagggagggaggnnnnnnnnnnnnnnnnnnnnnnnnnnnnnnnnnnnnnnnnnnnnnnnnnnnnnnnnnnnnnnnnnnnnnnnnnnnnnnnnnnnnnnnnnnnnnnnnnnnnnnnnnnnnnnnnnnnnnnnnnnnnnnnnnnnnnnnnnnnnnnnnnnnnnnnnnnnnnnnnnnnnnnnnnnnnnnnnnnnnnnnnnnnnnnnnnnnnnnnnnnnnnnnnnnnnnnnnnnnnnnnnnnnnnnnnnnnnnnnnnnnnnnnnnnnnnnnnnnnnnnnnnnnnnnnnnnnnnnnnnnnnnnnnnnnnnnnnnnnnnnnnnnnnnnnnnnnnnnnnnnnnnnnnnnnnnnnnnnnnnnnnnnnnnnnnnnnnnnnnnnnnnnnnnnnnnnnnnnnnnnnnnnnnnnnnnnnnnnnnnnnnnnnnnnnnnnnnnnnnnnnnnnnnnnnnnnnnnnnnnnnnnnnnnnnnnnnnnnnnnnnnnnnnnnnnnnnnnnnnnnnnnnnnnnnnnnnnnnnnnnnnnnnnnnnnnnnnnnnnnnnnnnnnnnnnnnnnnnnnnnnnnnnnnnnnnnnnnnnnnnnnnnnnnnnnnnnnnnnnnnnnnnnnnnnnnnnnnnnnnnnnnnnnnnnnnnnnnnnnnnnnnnnnnnnnnnnnnnncctgatgctatataactagaactggtgagtaaagatattttttccatccagatgttaaccaggcttgaccctgcttagctttcaagtacaggggatatggccatatatgatcgaagttacttctacagtggtttttacgtgtgtgtgtgtgtgtgtgtggtggtggggggggggtggagctgggttttgggtttttttgagataggttttctctgtgtaaccctggctgtcctggaactctctctgtagaccaggctggccacacgtgtgccactactgcccggctgagtgtgtgtgtgtgtgtgtgtgtgtgtgtgtttaagacagagtctccttaggtggtaaccacctgccacagtctgggatgacaggtaagtgccatcttgctagggtattaggtactcactctgctctgttcaaatgttgggtatcttgatattttatatgggtgttgaagatttgaactctggtcctgactgcccagcaagccaaaccatcccctatctctttgcctgtcatttcttgagcttccttataactctttattcagagttcattgggatgtattgtatgttttatggtaccttaaatctcaagttcaaagatatattgtaagtatagcattattccaattcatcgttgatctacaaaatcagaagtggatacgtcactaggatggaaaatgtcaaagcctgttagtgaattagtgagaacaagctacagtaatgaatcaaatacaatacgacatgccactatagtttctgtcttagaacacaggcctgtaatcatagctctgtgggaggctgaggagggaagatcacaggttccaaggcttgcttgggctgcagaatgagttcaaagatagcctgggctacttagagagactgtttaaaactgactagtacaagaacaagtacttttgggggtagctcagtaagacaacacttgcctagcatatatgaagccctgggctcaatcccaatacacaaagaaaaaaccccacaacaaacaactttgtgtctgtatcatagtttctcccttcaccctcagttttgtcttaaatttatttgtttgtttgtttgtttagtatgtgggtgcacatggctcacgggtggaggtcatacgacaattcttagttctcccaccacatggctcccagaatcacctagcttaacagcaagcacatttacccagcaagttaactggctgactccccagtttctctcttgatagacagatgagtaagttgctggaatggctctaggggacacaggctgctgtgataggttctacgtcataatacatggttgccccggccgttctgtggcatccttctcccatgcactggtgatctcaggccctgaaatggcaggctcactgccgtgtagactctcctggttagaactcaattccgtgatcccataagctgcaagggtagctgagaagcatggtcaagcttccactattcacgaagaagagaaaatggatgattttgggtgagtaattagcactctgtcatgatttgtattcaatcatccgagaagagcggattcctaacacacggagttcttggttgtagagaacattttgtataatcagtaagcaggatcgttagtgtcacttctctggaaagaagttattggcaccgacaaagaacattgttcatgcaatagttatgccactgtggtgtcttgaaagaaatgtctcccataggctcaggtgtttgaacacatggtctccagctagtggcgctgttagccttagagcatggagcttccctgaggaagtttgtcactgaggcaggctttgtgaatgggtaacttcagattacttctgtttctggctgtctgcttcctgtgggcagctgggatgtgatttccttagcctccagctttggcccacctgcaatcaggcctcccctgctgtaatgaactctgcctctggaatagtaagctgaaataaactttatctacaagtcggtttggtcatggtgttttatcacagcaaccaaaacgaactaatacaaccacactttaacaaatacaaaaatattgaattcctacaacacctttttaaccttaaaaaaaaaatcaaatttattaaggttctgtgtgtgtgtgtgtgtgtgtgtgtgtgtgtgcgcgcgcgcgcgtgttttctagctgaaacacaatataactgatctgaaatggtgtatgaaggggtatatttcagccttggtattgatttatttttcaattgtgggggtcaggcaagtactctatcactgatctatatccctagattccttgaactcaccctgaagccccagcaaactttgaattttttatcctcttttctcagcctcccaagaagctgagggtattgacctggagcacccatctatccatttctacaagcgcgagcttggttacctttttgcccacaggaataccagttttaatgatgtgtctgtgggttttgcattcattttgccattaacatttttctggttttcccacagtgttctttaaggtgtctacatcgtgccaggagcccagggaccacttgcctacttctggacatcttcactgtaatgttcctagccttcagcttcgatctgcacctaagtctgaaccctgcttcaggtcaatgctaaacatgtaatgaagtccctttcccagtaagtacagcaaacagagaaacagggatacttgagttatatgtatcctaaccttccacgcaggctggggaggtggaggcaggatgatctgaacttcaaggtcatgtcagctactcaatgagtgaacaaggccagcctgttctgcgtgaccctctcgacctttacgctggagacagggcattccttttttgtttggtttcctttagccattatgaaagtgcctgggcagcagatccccgtgctgggcccgcatctcgtcccacacgtttcccagtcatgcatgctcttctgctacagctaacagcagtgctgcgccacactgatctagacacaaagttccatcctgccgagtgaaatgtatttgtcacccctgctaaattttccttaaataagtccaagtgcaagtgacaggatcgtgaaacacaagaggcgtgtaagtggcgttcggatcgatcagccagtctagcagagaataggtgtccttctgctgggtgggagccctcaaagtcctaacagggtcatcgggtcatatgcaaatgatttcagcacttttctattggggctggtgagactgctcagtgggcagaattgccaccaggtttaatgacctgagttccatccccaggagccacatggtagagggagagagctcactcttttgggctgccctctgatatccacacaaaagtatacattttaaaagactaaaccccccccaaaaacctttatattcaagttacaatcatctagagtgtccagagaaggcttaaggccttgcaatattcctcggggatggcccaacatttcaaatgaaaatatagtacaaatttattaatttatctgagtgcattcagcagacttctaactccaggagactagtgcagggtacaactttgaatatttgtcagttcgaatgagagttgctattagagagcggaggttccaatgaggcagacatgcctcggaagctaatgaagaacaaataaaaatgtgctagaaggctcttggaatagtttatttgcatccccatattaatatattccattttaatattgagacaaggtccggaactcactatgtataccaggccagcctcaaactcagaaatctgcctcttcagtgttggaattaaaggtgtgcaccacacctgtctcttaatgcattttaacaattttcctatagaggtgagcttcaactccatattgattaaaaaataaattaaatactcaaaattagttgatattactctattctttttggtttctcctgacagggtttctctgtgtagccctggctggcctgggactcattttgtagaccaggctggcctcaaacactgagtttctcatgtctcccaagtgagattaaaggccaatttttctatattctttagttaattgcctttagttaattattgttaattgacttcatattccattgtcttttttcatatttattttacacatatgaatgggtactctgtgtctaggaattagatggttgtgggccacctgtgagtgctagggatggaacccagtcctttataagagcaataaatgctcttaaccacttggccatctctccactccctgcattgtcttcttgctattgttttgttgaatgtttcatgtagcccaggctagccacaaactcactaggcagcaaaggatggccctgaacttctgaccctcttgcttgtatcttttgagtactgggtttgtaggtatgcatcactttgtccactttctttctaagatttattcatataggtgttttgtctgcatatatgtatgtgcaccacatgtgcctggtaccctcagaaatgaggacagggtatcagatcccctgtaactggagttacagatggctgtgagctgccatataggagctggccacttaattcaggttctatgcaagaacagcagttgctctaagctgttgagccatgtctcctatcttactttttttttatagtcatattttatttttaaaaatttcagagctgagcagtggtggcgcatgcctttaatcccagcacttgggaggcagaggcacacatggtggctcacaaccatccataatgagatccgacaccctcttctggagtatctgaagacagctacagtgtgcttacatataatagagaaataaatattttttaaaaattcatttgtatgggtgttttacatggatgtttgtataccatgtgtgttcctgatgcccttggaggctagaaggcaccagatcccctggaactggagttctagacagttgtaactgccacgtgggtgctgggaactgaacccaaatcctgtggaagagaagccagagttctccattgctgagccatttctccagcccaacttaacttttaatatagagatcttgggtaggtcagtctactcctacttccatgctggaccaacaggaataggctatcatgcctgacttactgttttgcccaatagcccaggctgcctcaaactcattgctattataggtaggagtcaccatggtatatattttttaagtgacctgtagtaactatttttggttagtactttttctccatgaccaactcagtaacaaagtaactattcaatcattaaagcattttaaaaaaaagtcacccaggctagccagatggctcagtgggtaaaggtgccaagtttgatgacctgatttcaatctctgggctccacaaggtagaagagctgactcctgaaagttgttctttggtcttcagacatgtgaagtagcacatgtccccagcaacacacaaaaatgtaatatacacttaaaaaataatctaatgcttcattaagcaatagaaaactatgagtgactttttagaatttggacttcaacattcctttgctattcaaatcaaaatgcagacatcctcacattgttaccatggggtttcaaaagaataatctacatttctaaaagctatttatatgtaaggacagaagagcacacaggcaagctggagcctttccaggtcattgtctctgggatccaggcagccaagctccagggtaagcggaaaagggttatggctaggttccagtctagatgcttcaagttaaagaagttcaactgtgcacacgttagcttgactaataaaaaccaaagggcctgcatcttcagagactgaacaaaggacccctcgagttaaaacagcagcaacgatgtgggtatttctaaagcaggacttctcaccatgttggagatggttgagatggctcagcagttaagagcacttgctgcactcacagaggacatgagtacctgtcccagcacctatgtgtccattcacaagttcctggaactccagctctagaagaacgtgttccgggctagcttccttgggcagctacacttatgtgagcaggcgcgtgcacacactcgacacataaataaaaacaaaaccttcaagacacatagaggctaaggacacccactgctcttatctttgagaacaggctgctcattagtttgggatggttcttggtagcccttgaaggtgcccttcttacttgaagcccactcctttctggggaggctcaaaacttgatttgcatctcattaattcccagcaggaatcaaacactgctactgactgcctagtccttcccccctcccttgttttttttcaggcagggtttctcggtgtagccatgggggtcctggtcctggaactcactctgtagagcaagctggcctcaaactcagaaatccacctgcccaccactgcccagcatcagactgcctattcctcgaagcctgttgtagtttcagtctgtaatgaggaaccgcacctgttccaggtccatataaaaattctcccaagagaggttgggtttttcttactactttcctgaaatacagatcaactgggagcagtacctaccactaaaacacacaataaaaatgtaatttaataaccctgtaaataataattacacacattcatatatatatatatgtgtatatatatatacatatatatatatatggttcagcttctatactgactgacaccgagtaaaagccatctttcagttttgtgacactaaatgcaaaagctgttcttcaaaatttgtaaaaggaagatgctccaaaatgaagtgatgtctaacactttcagttttctattctaattagtctctaacactttggtttctcttcatatgaaacttccacctcttcacaattctgttttcttctgtccctgtcacttgagctcttggcttcttagcagaggaggtagaatggacacctccttgctccgatgtgttttgagagttattccttggaaaggactctctcacaacactgctgatagcaggtcctcaacttcagtgtttaagaagcaagcaagcatttaccatccaaaagaacaagaacttcaagacttctgctataatagattttgtacactacaccttcttaaaatatttgtaataaaaagctattattgctttaaaaaccttatccagaaacatgagctgatacattggcaaagagataatttggagttctttgtgtttttaaaaggaaacaatacaattgaaacattccagatatacagcctttgtaaaaattaacaaaaatctaaggataagaaatgtcaaatgaacaacgtaaagaaattacatatttacccagatgaaatggttttattttgtacttacagctacttagaataaacatttatcagctttcaaatccatttgtttgatataaaagaactaactaaataaaatacttagttctaatgtctcaaaaaaagaattactttgggggtgtttgcagaagcgtgtagatgaagacacataggaaaagacactatgataaagttgtgtgaataaaattaaacatgtatcccgtaatttgttcacagccggacatccacatagtaccatgaggtccgagggctgcccataagaagctggtaacccaatgggaaccagggctgtaaaggtttcttaaaaaacgtaacgtggtcgaacaaaaacaaaacccaaagcaactgtaagacctggcgtaagtgccccagttagcgactctttggcaatgcagatccaaccagacgattagaatgaaacgtgcaacgctctctctcaaaaaatcctataaagcccgtcaattatgttcggctctgagaatcggcagttcccagcaccttccttttccactttttaatattttatacagttctccatctgcggcctttccattcattaattgccctatacaagatccccccgatgactctcggggaattgcttcttttaagacagggcatcagattgccaagcctctggggtcgagatcgcgccctcgctcctttggatgtgggagcgtcatgcacttaagacttgattatttaattgcggagatgggagcagaccggtcggaggggttgtgccaagtgggcaccccggggtgtgtgtgtgtgtggtgggatttgtccttcgtgcgctccaaaaatgcgcgccctccttgggcctgccttgtgcccgcgcgccccaggcctcgtccgcccgcccagcacccagaggatgcccccgcaaggaccccgcccctcccgtgtccacgcacctgcggccccgcccccggccacgaaccttcaggtccacgcacctgccctgccttccctcccgcccccagcgcgcaaccaccaaggtgcagccgcgctcctcttcggcggccccggtatctaaaggggtccgtctccggcaccacagccaaatggctgagcctccctggcccgctgcgcaggatgcccattggaccctgccccccgccgccaccaccactattggctggcgtccgaagcctcgccatttgattggctcttgatgccgccgctccacgcaaggagccgcaggtcccgcctctacggcgatcaggttagtgtgcgccgcgggtgctgggggctcgagaaccgagcggagctggttgagccttcaaagtcctaaaacgcgcggccgtgggttcggggtttattgattgaattccgctggcgcaggatcctctgcagaaagagagagcgcgagagatggagatggacaaacggatttatttagagctgcggaacaggacgccctctgatgtgagcatttgccaaaaatatctctgtcggtccattctcctactttgtgttatgtgtgcgtgtgtgttttggggggaaggcacttttttatggaggggggctccggggaaggtgtggggtttggggtctgactgcaaatgaattgcaaggttggatggcgggggtgggggggttgcaatgccaccggagcatgtttcgtccgccgtcgctgctgcccttggtgtgtgactgactacctgtgcgtgtgctcccgcgtgtgcgggtatgggtgcgagggtgtgcgtgcgagtgtgcacccagcggggggccggcggggcgcacgcgttcgggtcggagggaaggcggcaatctcaccctcgtccgagctctcagctcccacgacttgcatctggatggaaaagatgatcgaggggaggagaagatgggctgcctcctggattaaacaacaaaaaggggttgttatattttagaagcgtaaccccctttccgccccctcccgcgcctgccccctccctttgcagtctctttcgctcgctcgcacacaataagttttgggcttcgcgagtccggtatagtttctgatcaatgtagcccgaggaccccggggagagcgcgtggggacccgactgctgcggagttgggagatggctcgagtttaaagcgcgtcttcgtttctctgcggggatgaggcgagaggtggggagccatatttgtaactttgtcgtgttcgtgaacgcgccctttctctccctccctccctttctctgtctgccttccttctcctttctctctcactctttccaccccacctttgggccagatgctgtcttttctcccttcttcctcgcggaaagggagggggggtaccttaggttaagggggagggattgtgaagtgtgcaaatgctcagataatcctcgcgcctccccaaccacgagcgtcgctaatgtaagttgcccggaggctgcgtcccgttctggcccccggctccctccccagatgccagccttggcaccctgacgcctcatcggcagcagacaccccaccttcccggtccttgcttctcctggggtgggctccctggcagccattcggcgcttggttaataaatgggcacgagaaactttatcagaacccgagctgcccagagctagtgccgctgtggggaccgacccagtctacattcttgcgggcacggcaggcacgcagctctgggatgggcagttcgtctggccgtagccgttatggattgggcagcggcgggagtatggcaggaggaaacttacaccggtgggaacagggaggctgggcgcgagcccactgcaaggggaagtgagggttggtgggtgactcgaaagctactgtttatttttgtctccctctcgctttcacgcactcgtgttgtctgcgagttgacccattcgagagaccttagggtctgcggtggaaaccctagccaacttcccctctaggctcggtagtagggagcaggagctcgcgggcgggaaagatctcgggtctagcctgagggtctggggctcgggcgagttgggggctcgcgtagcacgttgtgctgacctgtcgcccctccagccacttggcccctcgaatcctgacaaaggcaggcctcatttcctcttttctcctaattcctccttctaaacctgagtaagacttttgaaaacaagctcctttctgccgaccgcccatcctcacgcagctgtgcactggagacgtgctacagccttatggcgcgcagggcggaaggagggggcacccctagcaccaggacttgccgcgggggctgcctggttcgcccggtggcgtcccgacccagccagggtgcccgatcccggggggtggaagggactgggtgtggtgctggggggagggggccgaacgcgacttcccgcgtactttccgggaagacccctatatgtagttggggggcttcagggtcccggcgagtaggtgcgcagcagcgccggacccgaccgagcggttcacagtactagctgacccggagcgaaacggaaagcgggtcgaaccggctctttaaacttccccgagtgtgtgcgctgggggaggggcgggcgctctgggctgggcgcgatttctcacgcttcgccccctcgccgtgagtctgctgcccactcgccggcctccgggcttatggcggggtggggcgcgcgggtggcgggggagggggcacttgctgcgcatgggggaggggagggcagaaagctctcgaaagagggacaaaaggggtgggggaggaggaactggctttttgttgttgttttgctgggtttttgcttttttcaaataaacgtttttggaaaacagatcgttccggggaacctccctccccagagtcccccccacgcacccaccttctgcaacctctctcccaagtcgcatctcggggactggtggccgcgaagccgccgtactaggacgagcagccatgtttcccggggcgccggaggcccacccctcccccacggcggccgcggaccgggctccgcggggaccgtggcgcccagcggtggggggcctgagagcacacaggcacagtnnnnnnnnnnnnnnnnnnnnnnnnnnnnnnnnnnnnnnnnnnnnnnnnnnnnnnnnnnnnnnnnnnnnnnnnnnnnnnnnnnnnnnnnnnnnnnnnnnnnnnnnnnnnnnnnnnnnnnnnnnnnnnnnnnnnnnnnnnnnnnnnnnnnnnnnnnnnnnnnnnnnnnnnnnnnnnnnnnnnnnnnnnnnnnnnnnnnnnnnnnnnnnnnnnnnnnnnnnnnnnnnnnnnnnnnnnnnnnnnnnnnnnnnnnnnnnnnnnnnnnnnnnnnnnnnnnnnnnnnnnnnnnnnnnnnnnnnnnnnnnnnnnnnnnnnnnnnnnnnnnnnnnnnnnnnnnnnnnnnnnnnnnnnnnnnnnnnnnnnnnnnnnnnnnnnnnnnnnnnnnnnnnnnnnnnnnnnnnnnnnnnnnnnnnnnnnnnnnnnnnnnnnnnnnnnnnnnnnnngcgaaacgatcgcgctggtgtttgcgccttcagcggaaatgattgggtggtgtatgggggtgggggtgaaactagagggcgggaggggctcagggctctttaatctggtggccctctgtaatgccgagggcgtcagccttctacccgggagggacgagttgttggatgcgctggggaaacgccctccggggctgggctctctagaaaggttggtcgagtttcaggtgggtgtcgcagcactctgcaggctgagggagctctctcgctctttatccagttcctcaccccgcgcctcccaccccgccccccatttttgttttggcggggaaggtaggtaactacatagtaaacgctaccttaaaccgaaagagaaataggatttttctttaaaaaaaaaaaaagtaaactgtccttttgtattgccttcagactcgggcagtttgttcctaatgcaggccccgatgtgggactcaaaagcgtgtgctaggcacatcgcaggctgtaggctggtgtctgcatgtagagactaacttccatggaagtgtcgggcaaaggctgctatcggagccgggagtctactttgacctctggaatgcgttgcattttttttttctgtccaggttgacttactgcctaattgggttcgggagagtggcctggcggtttgctccaatttatgcaagccaagcggggattgggggcagagaactgaatgtggccttggtatggggtgatcagttgactcttgtgactggcagctgctgaggcttgtttttgatctgaaggttccatggtgaggctggcttctgaagccacacagaccctggcttgagttcaccagctacaaggaggtaggatcctgccaacctgtggtctgggacagattaccttagtctacatccaacgttttgtacatgtgtcctgtaagactggacagttctgtttttatcaatcaataagtcactattggcttgagttggcccttcgcaggtgcttgatatagtcgcagatactggggagtggggaggaataatttagggccccttggaggtttaaaataacaactccagcaataatagcagatgctcacataactccttactgtgtctggcatgttgctaagtggattacagacatcagttaatttagcctcacaagggcactatgttaagtactgttgttattcttatactaaatgcaaggaaatggagtcagaactccagatcaccgccagtcggtgcagaactgggattctaactccgttagactcagcctctgtactgccctgaagcaccacgggaaggactttttctcctccagttttggagtgaggccacctattagcaagagggtgggtatgggtttgttggtgttgagggcacagaaacaaagcatagcttcctggtggagcgataggtgaaacagacaagtggagtgggtaggcattttaagggggagcctgaccctggtttggaatattcagtatacactgttagatgtttccggtaatgagaagacaagcaggagccattcttagtggttatttaggtgtcttatataagtagttttttcattagcctttctgtagaaagaaaaaacaatctcaggatagaatagacaggaccttagtgttgggatgtagccatgctagtaatactgcctagagccactcacctaaccctgcctgaagttccttaaagatagccaacctctctgttctgtggatggatcacttaggactcagagtcagcctcccaaggtagtctgtggacaggagagaatgcaggttctgtagttgaccaaggcccatacatgacctatattaccagatcatccagggaaccggtaaaatgcaaatgtctgggctccaccccctgggtgtgggcttagtaccaggtcaccgtggttcgctctttatgctgctgagttgaaaacagtttgtatgtctaaccactaagagatttgggaatctgggagcgaacctttgaatgatcctcctccctacaaatctcgctcgtcgagttaacaaagttgtattaacgagaaaaaagattgtacttattttgaacttgatcaataaaagaattaagagggagatgtgtatccttttgttataaaagcacctgtgttatgttctcaattttgcttcttgaagtttactacctggaaagttagttctctttgtttagcaggcaggggaggtccctggggtcctgtgctttgttcttttaggaatgtggcaagtcctacatttgatggtgcactgtgaattttccaagaccttctgaatatgcgattaaacaacttttgatcctcatagaaatgggctcccgttcacaggccttcatgagaagttgttctcattcctggctccctatggagcagtcctctctgtctcagaggtagagaggaggaaatttaagtccagggctactgaagtttgcaaagctgcttgctgtatacctagtgactagtgagggtcaggacatatcaccacagtccccaggtcaccctggcacctccgtcccaggcctgctgctggggggggggggggggggggagacagcacacagcaaagcagaaatggctttgggttcaaaacctttgtctaattgcctcttaatgcttgggccactaagcagaagtgtgtggaacgtgaagttcccggcagcagtgtcagaccctgtcccctccctgggctggggccacattagtggcctctcaaggtgacttacttgggactggtgcagttaggcatcttctgtgcagcactgtgggtgacctgactcagtactaactcaccactctgaagagccaggcaggagctgtctgccagctgtctgctctcctctcctctctcccttctatgtcggagcccagggcttgttgctgagtggctgtggtgggggtctgatggaatgaacttggcctagcattctggcctgaattctgacctgagagaagcagctcattgctacggtgtctaaaagggtgttttccttggagcatccccttttaggctgtgtctcctgggacctactctccatcggtgctcagcacctgcttcccatagacaggtaagaagaaaaacatgaaccagacttgagtcttttttttttaaacatattgatttttaaaaattttttagatatatttatttttattttatgtatatgagtacactgtcactgtcttcagacacaccagaagagggcatcagacccccattacagatggttgtgagccaccatgtggttgctgggaattgaactcaggacctctggaagagcagtccgtgctcttaacctctgagccatctctccagcccctgacttgagtcttatattacattggcatataattatacaacaaatactgagttaaagagagggctcctgactggactggaggtagttattcagaacatttcagtgatagaattggttgaagccatgtgagcaaaacacccatggcctcaacacgtccaattccagacctggaaactgcctcctagtatagaaccacgtgtcccggtgacaccggtatctttcttcacgccctgtcctctgcggtgctccacagcaccttccgggaggtcccttcaaactgatcttgtttttactctgttctgtgcaactcccctcacccctgacacgcccagtctaccattttctttaccaaactggctccaggcagcaggtctaaaagatgagcctacttgatcacttactccagcgtggattgcagtccctgcctttctcccagaggtatttgcattttgagagtctggtttagtgaggaaattattgagaagaaccattaaagacttggacgcacttctcagcttggtcattaacttgagttggacaagttgttcagcttctctccttgtcgtctaaaatggagtgggaggggggtcgggctggggttgtagtgactgttgtagtaattgtagtaacacaattactagagttcttatctagaacatacagagccctaggttctgttttctgtactttgtaaggcagatgtaatgccagcacttactgcaatcccagcacctcgggggtggaggagggagaagttgaaggtcattctctgctccatatcaagttcaaggttagcctgtgctacatgtgaccctgtccaaataaataacctgagggtgctgaattcaagcccagtgctgttcagattttttgaacccactagtaacaggattcacaccgttgctcagcacatgcatattatttttttaaacgtgaacacttttgattcactgaaaaatatgatagctcagactcataagttgatttcactctattaccgtttggaaaatattaaaggttggagattaagcttccttccacagttttgccttttggtgtggggctggagcttgccctcccgagccttgtgtagtgtgtgcagcaacacaacagggcttttcccaatttcccaatttcatggcagctcactgctgggtcctctggtctccagctgctctctggtctaccccagacaacctcatggtaaaagtagccattagcttaagtgtgtattctccatggtgcctgcagttattggctacaccagttctccttgctacctcgtcccctagcccctcctgctgtgcactatgaagagcagccacactttcttttactgagtcagagcgttttttagagagcggtgcctggtacgtgcctgtctctcactcccagtcctggcgagttgcctcacagtgtggactggggtctccaaagtgaggctgtcaccaccaacagtctcaggcaccagatgcgtcactgccgatgtgctagagtgtgtgagctggcaggcgcttaaaaagagaaagtgaggctcgtgaggtggctcagtggtaaaaacacttgccacgcggccttgacctgagttcagatcctcaaaacccacataaaagctggaggtgtggagatgcgacatgggcagctggaatccggggctccagacaagagactaggcaaactacccggaaggttgctgcgggcaacagaaaatcaacagggcctgtctcaaaaaaggaggaattgaaggaccagcacctgttgttgcacgtgtgtgtatacacacacacacgtacatacatacatacacatacacacacaaaggctgacattaaagtggtacttgtttctgtaggaaaggaggtttgaatctggagatggcatccagatgccactgtctgttcgggatcagctgcagcagtgcagagcagcccagcccttggctctgcactgccttcccaccagggtttctgtagaggtcgatgcctatccactctatccactgccctctctctggaagctcctttttcactgcacatctgctgcttcaggcattctctcagatcgcctcctggtccttcaccctctcccagcctgcagcagcttccgtaagaaatgcctatctcctggtttcctaggaagtcctttccctgcagtgtgtgtgtgtgtgtgtgtgtgtgtgtgtgtgtgtgtgtgtgtgtttgcctgtgcatttgcatgggtgccatgctcctagaggtcaaaggcagtttgggggagttagttctctcctttcaccatgtgagtttggggaatcaaacagagttggtagcaggcagagttcatttacctgttgaggcatctctccccaactccactgccccactggttctctttctatatagattctttttcagctgaggatgcttctctggctttagagaactggtcctggacgggggaagcaatttggcaactgagacaggaggatcacaaagttatccagggctctacaatcggaaccttgcctcaaacaaaacaaaaagaccagacccccttgattgagctggatccctccatagccgctgcctcctgtcttttagattattgtaactgggtttaccctccctgtctcctctaagtagctgtgatttttggatatggctctgggaatccgtcagctctttcatgagtcctgaggtatttggagtcctagactttggtgaaaaaaaaatccatctttctgggcatgcttcttatggtctgtctatttctcaagcttctaatattttaaactcagttggatgtgggacccaggtgcccttattctatccttcttccctaagacagcttctccttagtggatgtgtacgaataccacatgctgtctgggctggggtgtttacctcacagtcacagtatctggatctcagcagcgccctgtcctcagggaacccatggcctctgtaccctgtcaaccaccccctccccttctacctaccacaggtcctatttactatactgttcagtccatcccagataacttccccataccacagttctggtctctttgaagccaggattccaactttagccaaaaaacaaaactatgatccaatcaaagcacagatgacggttgacagtgtcttttttttttttttttttaatcctgtgtgtaaaattcaccaccgggataaagtctaaaaatccttagtactctaagtccgcccctgctggccttctaactggtctttcctctctggcactgttctccccccccaccccagccccttcccaaaccactcccatcccacttcgcagttgactcctccccttccttcctgagagtctaagtcagattcttttaaaattttgtgaaactttcttaggagttttccttgtaattgcacatttctattaattagcatctcttccccctgggaagccagtatgctgtgtgctttaaagggacctgggtttccttcacccctgggtatccccagggctcggcactgcattcacaagcattctctagtgtttttggagtgaagaacctgtacgcacgtggtccggtctctttctgttattgttcactacagggtttctctgcataacagttctgactgttttggactcggtttgtagatggggctggcctcaaactcacagagatgcctgcctctgcctccccaatgctgggattaaaggtgagcaccaccacgccctggggactggtctcttctttatacccannnnnnnnnnnnnnnnnnnnnnnnnnnnnnnnnnnnnnnnnnnnnnnnnnnnnnnnnnnnnnnnnnnnnnnnnnnnnnnnnnnnnnnnnnnnnnnnnnnnnnnnnnnnnnnnnnnnnnnnnnnnnnnnnnnnnnnnnnnnnnnnnnnnnnnnnnnnnnnnnnnnnnnnnnnnnnnnnnnnnnnnnnnnnnnnnnnnnnnnnnnnnnnnnnnnnnnnnnnnnnnnnnnnnnnnnnnnnnnnnnnnnnnnnnnnnnnnnnnnnnnnnnnnnnnnnnnnnnnnnnnnnnnnnnnnnnnnnnnnnnnnnnnnnnnnnnnnnnnnnnnnnnnnnnnnnnnnnnnnnnnnnnnnnnnnnnnnnnnnnnnnnnnnnnnnnnnnnnnnnnnnnnnnnnnnnnnnnnnnnnnnnnnnnnnnnnnnnnnnnnnnnnnnnnnnnnnnnnnnnnnnnnnnnnnnnnnnnnnnnnnnnnnnnnnnnnnnnnnnnnnnnnnnnnnnnnnnnnnnnnnnnnnnnnnnnnnnnnnnnnnnnnnnnnnnnnnnnnnnnnnnnnnnnnnnnnnnnnnnnnnnnnnnnnnnnnnnnnnnnnnnnnnnnnnnnnnnnnnnnnnnnnnnnnnnnnnnnnnnnnnnnnnnnnnnnnnnnnnnnnnnnnnnnnnnnnnnnnnnnnnnnnnnnnnnnnnnnnnnnnnnnnnnnnnnnnnnnnnnnnnnnnnnnnnnnnnnnnnnnnnnnnnnnnnnnnnnnnnnnnnnnnnnnnnnnnnnnnnnnnnnnnnnnnnnnnnnnnnnnnnnnnnnnnnnnnnnnnnnnnnnnnnnnnnnnnnnnnnnnnnnnnnnnnnnnnnnnnnnnnnnnnnnnnnnnnnnnnnnnnnnnnnnnnnnnnnnnnnnnnnnnnnnnnnnnnnnnnnnnnnnnnnnnnnnnnnnnnnnnnnnnnnnnnnnnnnnnnnnnnnnnnnnnnnnnnnnnnnnnnnnnnnnnnnnnnnnnnnnnnnnnnnnnnnnnnnnnnnnnnnnnnnnnnnnnnnnnnnnnnnnnnnnnnnnnnnnnnnnnnnnnnnnnnnnnnnnnnnnnnnnnnnnnnnnnnnnnnnnnnnnnnnnnnnnnnnnnnnnnnnnnnnnnnnnnnnnnnnnnnnnnnnnnnnnnnnnnnnnnnnnnnnnnnnnnnnnnnnnnnnnnnnnnnnnnnnnnnnnnnnnnnnnnnnnnnnnnnnnnnnnnnnnnnnnnnnnnnnnnnnnnnnnnnnnnnnnnnnnnnnnnnnnnnnnnnnnnnnnnnnnnnnnnnnnnnnnnnnnnnnnnnnnnnnnnnnnnnnnnnnnnnnnnnnnnnnnnnnnnnnnnnnnnnctcaagacaggtctttccttgtagtgccaattggcctagaactccctatgtagaccttgaactcacagagatctgcctgcctttaccctctaagtgttcggattacaggtctatgctatcacgcctggcttgcttgctttatttttaatttggttgtaaaagtccacggtgtaaaagaagtgcctgtaccatgccaaacgctgtctacgggctgaacgtcccacccctggcatggaaggcagggtcgaggatagtcacagcctccacttctaagccagcctgcctcaggtacccagctcatccaaggccactgctgcatggcagcttgactgactgacgattagtgtgtgtgcagatccaccaaagcccactctgatgctcttgaggctccaggggatctgccctgtgttctccccacagatagcctgagaacccaggagtgggcctagtgagaggccccataccagaggctcaggaccaatgatacctaggtagtttttttttttttctcttgcttttctatgtttgagaatgttaccagggaaggttctgcagcaggctggaagatcagcgatgggagggaaggatgagggtctgattgtgtgtgtgtgtgtgtgtgtgtgtgtgtgtgtgtgtgtgtgtgcataggactctgcagccagccatagggcccaggcctggatttctccattggtctgtgtcctgctaaagtcatgaggaccatgggggtaaggggactggcaaggtggaggccaggacctgttatagtaaatttagaaggaccagacatttggggaagggattcagtcctcctttttgcaactggtccaccatcttcccttgactttacaggaaaccaacatggtgtggcctctgagggaaatcagaggacccccgcagtcatattccctgtccgtcagttgggttcaacgtactggccttggaagaaggctgagttattctcctaagccatgtgcacagctgacttacttaattgcattctctttctgtggcttgggtggggcagaggtatgggaggactagattgccgagggcggtgatgcccatgtcttgcggtggagcctgtgtgatagacaggaggaaagaatgtggttaatgactcagattgcagcctcatctggcatcagaactaccagaggagcatctgagggacttcccaggctcttccccaactgctgaatctgtctctgcgtggtaccccaatgcatgtgtttttaaagccctaggggggatgatgctaaggcacactgaagcaggattcagatcttcacagtagaagcaagctaaagggaagcaaaagagagtggaactaaagaatggtccaggcttttaatgtgctgggctgcaagggcccatttctccgcctgtgtctgtcccctgcacctcccctcccccgccaccccacccctcgcccccgctaaaggcagtctttaaacattcctactttgtgcttatcaaacttgtatctatgtacctgtgttccatgaggctgctgctaccagagtatgaccaagaatgggcctggttgggctggagagatggctcagtggttaaaagcactgactgctcttccaaaggtcttgagttcaaatcccagcaaccgcatggtggttcacaaccatccgtatgagatctgacacccttttctggtgtgtctgaagatagctacagtgcacttatttataataataaataaatctatataaaaaaaacaaacagaataggcctggtgagatggcttagttgctgaagtgcctgccctctgagcatcaggacccagatgcccatgcatggttgtgtatatctataataccagtactaggggcttggcagaaacaagaggattcctgagtgcaccggctcagcccagtcactgagctccagtttcagtgagagaccctgctttagaaaatttgatgaagagctattgaggaggacatctgatgttggtccacaccatgctcagaaagagttcctcctggactcagtggagggaggagaccctctgcgtctatccaggtggcatacaggatgtgaaggcgtgttctatccccttgtggattcccatcgtgtctcacgtgctggttgctctccccggttcacctggtcagtgtttctttgcgcacttgccagggaacattccaaggttatgctgagtccagtgtggctcccccacagctggagcaggaaggctccctggtgaccaaggtgcttctcagcttctgcccaactgcttgtgagaagcagccccatccatccacatgcaggagtgggagctggccttcctcctctgttgcatgtccccccttgccatgaggacgtcgagctgtgagtgtgctagccagcctcccctcgccagctctgagaggctggagaagcttctgcagaggctggcctgcagccatcgcaagcagctacttctctgaacaccggctagtttgcggctccattacagacatgcttatatacgtctatgggtgaatgccggtggtgtaactgttcttccaaggaggagtctggggtggtttctggagcaacactctgggctgccgagtgggatgtggtggcaggagcccaattggattgcaggctgtctgtcctaagccacaagggtattgaattcagaccatgtttgttctctgggagcattcaggaactttctgtccactctagtggcctgtgtggtcatcgataggagtggcacaggacatgtttacatgttgaccagtggctgtagaccccgtctgagggggcggggtgcccattgcaccagaacacagacttgtatcttctgaatgcatgagctccatggaagttagggcatggatgtctcagtggtaagcaacgcttggctgctcgatatttgacattaaccagttctatgcggcttgtccagtgcttcccagctggcaaacagcagtgcaggtctggaatcccttcccactgtgacccccggccttggtggtttctgttctttctttccgcacacagagattgaacacctgctgtctgctgggttttttgcaggctgtctgtatatgacagttatgcagataagcacatcaccagtcctgagcacacacagcctccattcatggcaaaggccccactaagtgccatgaaaacaaagctgtggctcagggaaggcttcctggaggaggtgacattctaatggacagcataagaacactcaagagatcccaggagaataggatgtggattgacatgcctgtgacaccagaggcaaggccaagaggacatggcaagactgagaccgggatcgactagaggcagttccaggctaacctgggcaacttagtgatactctgtgttaattaagaagtaaaacagagagccgggctgtagctcagcggcggagtgctggcctagccgcaacagaaccctgggttcaagtcgcagcactacccaagggttggtgatgtgttccatcactagggaggttgagtcaggaaaattcaaggagggaggagagaaaagggatgggatggacaaacacgaataaactggtacaagagtgggaaatgcaaaattatgttggggctggccagtactctgtgcactgcagccttagacaggaccttgccatggtagaatgtcttgttactctcttaaggctcagaccttaaataatctgaactttgaagtatgtttttctaggtttgtttatttatttatatatatatattgtgtgtgcgtgtgcctgtgtgtagggggtggaggttcaggtgctccgaggtgggctggacagtattatactgctgctgctgttagtcaacgtgttgatgcgnnnnnnnnnnnnnnnnnnnnnnnnnnnnnnnnnnnnnnnnnnnnnnnnnnnnnnnnnnnnnnnnnnnnnnnnnnnnnnnnnnnnnnnnnnnnnnnnnnnnnnnnnnnnnnnnnnnnnnnnnnnnnnnnnnnnnnnnnnnnnnnnnnnnnnnnnnnnnnnnnnnnnnnnnnnnnnnnnnnnnnnnnnnnnnnnnnnnnnnnnnnnnnnnnnnnnnnnnnnnnnnnnnnnnnnnnnnnnnnnnnnnnnnnnnnnnnnnnnnnnnnnnnnnnnnnnnnnnnnnnnnnnnnnnnnnnnnnnnnnnnnnnnnnnnnnnnnnnnnnnnnnnnnnnnnnnnnnnnnnnnnnnnnnnnnnnnnnnnnnnnnnccaccccacacacacacactttccttcatctttcctcactatgagcttgggttctcctggtgctctcaggatgtgccaggttcttagggaaggtcctttcccttcatgactgacatactttatacagtcaggtttgtgctcacagatgagaaacatacccagaggttttgacctaggtctagaaagtaggaaaagatgcatagttttccaataaaagtaggctaaggtgtaattaggggcctagggcctgcctccgcaaacaggagcagggatcggataggcagcctctttagcaggagcagagtagcacccctgtgactcggcgtggcgaccgtgtatgcagagcacctccctaccctgttaagctaagccttctcctgggataagaggtggcttccttgacctttactaagtgcctagggtgagtttgcggtagtgcttgttgttagatacttggtaaacattaccttttggatctattagcacatcccgaggtataggctgggccacttgtttttgagataaggaagacaggcccagagaggtcagattggctaactgaacctcgatcctgtgttgtgatgccccttccagactagacacccttgggtcaggaggcaaggacaccgtttccactgtggtcccccccccccccccccccgcgttgtagtctccattgagtgagttctagcattgagggataaattgaggctgagtaaccttctaatcgggaaaggtgatgaggcccttagatttgtaggactttgaggactgtgaccttacaatcagggtgggatctgatttaagtacttgtccctaagccaggggatataaagtgacatgtgccagcttattgtattccatggttcctttattacactaaagatcagaagccacccaaaacacccccagccccaaagtcagtgttataggttagtttgagggtaaaggcaagaaaaataagattccagagttctaaacacaccctggagataggtggaatagttactgggccaacagggagcatatatagtggggaagtcaggccttaggatgtcttcccaggttagttttgatgcctttctgatctacagaatttcctaggtgctaagcacaaggaggagtaggggactggggcggacagtacgtcatctctgttctctgggtacagcatcttgcttggtaaggaacatgcttgtgaaatgtattgcagtaatgccaagcacagcacagtctccccaagtgccttcctacccagcatctagcctcgttccctggattcctctgcggggatagatcttcttcccattctagtggtgatcactctgagttggcgaagtcttgaccaaagccacagttctgggctggggctgtatgtaactcagtttgtagagtttgcgtagcatgccaaagtcttgggttcatctccagctcagctgaaaccggatacgcccctgacttcctggtacttggatagaagagacaagaggatcggaagtttcttcttcaattgcaacagagactttatgaccaccaggcctacatgagaccctgtctcaaaacgacaaacaaaaatatgtctagattcttagtagaaaagtctagcgccaaaccagactgactccatctcaacgtgtccctgtgctaataatcaaagcagcattccatagggtgtccccatcgtgtggcagaggccacttccaccagaaaatgtggctatttgcagccttttgctcacgtgtcgtggagccactgtaaaggtcagagttctgtttgtctgagtcacttctctccttccctgtgtggggtccagggattgaactcagttcatcagggtgacagaagcccacggagccatctctccagccctcccacagactacccagctgcagcgtgtggccaagcctggttcccacttagcgtcttagccatagctgctccttccattgtaagagccctccctggtcagatactcttagggtcaagtatgcgcagaagacgggccttgggtagtgttgctggccaccctccagtgctgttctctgtcactgatgattttctgttttcctttgagcatcaatcgtgtatttatcactcactgacttaggatctgactccccctgcacgtcggagggcattggcattggttgtctgccatgctatttcttaccgcctagcttgatgtctggcatactgggcctgtggtctaagcaggtaactttcctccagaggaaaaaaagaaaacccaagcagcatctttagaagtgacccacaacacacacctagcagcgagcgcttcataagatattactcatccatatagcgggtgctcagcacagtttgtatacaaagctcttcttacagatagttgcttagggttttgattagcgtgggtctcccacctttctgcctaagcatccctagttccttgtcatcaccccggttctcagatgccttcccaccctggttgtcttcttcctcgcagtctgcccttgaagttctggaatttacagtttggtcttggaggtgcaaatggggtttgggacgctgccatcaagtgcctttgggtttttccccacttgtcttaaagtttttgttacgttttctgggcagttgtgtgctcagacatcggtgtcatagcatcatgtggaggtcagaggacaacttgcaggagctggctggttctttccacatgtatgcttcaaaagtcaaactcagatcattaggcttggtgacaagcagcttcagccaccgagtgccccccactcccatccttggtaggagagcttgaatataataaggcttgttagtacctgctaggcaagcattctatcagtgagccacaccccccaccatgcctgctcttttttctctcaacccagcctgaagagcttagctttgtctgtgtgggctgcagtgactgaggtaggtggggtgtgctctctcggagactggtctccccagcattgtcacctatttccagccaactagcccctccctgactctcacagtcctaaaagttgtaacattttgttctttagcattttaagattaaagcaagcccggtagtggtggttcaggcctttaatcccagcacttgggaggcagaggcaggtggatttctgggttcaaggccagcctggtctacaaagtaagttccaggacagccagggctacacagagaaattctgtcatgaaaaacaaaaacaaacaaacaaaaattaaagcagttgctgggcagttggtggcgcacgcctttaatcccagcacttgggaggtagaggcaggtgagtggaatctctgtgagttcaaggccagcctgctctatagagcaagttccaggacagccagtgctacacagagaaattctgtcttgacaagaaatgaaacaaaattaaagcagctatagacctgtgaacaacagctaactcaatctgcattctatttttaaaataattaagtataggtcaggttccactagcaagaccaggcggagaaaaaacggcactctggagctaaaccaagccaggcgttccccttccccctttccttcccctcctccctttcccctccctttcttcccccttattgccctcctcttccttctccttttgccccttctccctgccctcccctgctccttccaccaggagttttagcataagtatttgatttgtccacttaggcaagttgaatgcatcctgttaggctagggggaaagggctgattaactcacttcttatgcattaccgtggctaataggcgaggctcttctgcgtgattgctgcccaaatcatctgctccccattggagcttgggtgccagacttcagcaccaggaattgctcagctcgtgtgattgaggaggctgcttgtcaggtctggtcaaggtggcaggaaggaagccaagggcaaaatttcttctctgaggctattagacttcttgtctatttccatgccttctggggagtgtaaggcctggttgagaggaggtccagctctagtctgggcactaccctctccgttccttttatttgttccagttttctcctgcttcaagcagttccccctggatagctgagccctaggctgagaggacggggaacagcccaaggtttccatcacagactaactctgatctttgcatatataatggttggcttccagctcattatgtggctgaggatagctttaacctcttgattctcctgcaactacctcctgagagctgggactactggcacttcatcaggcgtggcttatctggtgcttgggatcaaacccagggtctcatgtgtgctaaataaacattctaccaacttagctgtagcaacatcccctaagtgtgtttgtttgttttggtttttgcaaagccaattggaagtggggtagatctccaaaccaggagactccagtgtcctggcctgtgagtctgaatgctttttgccttcagggtttagggtggtcacagtccttgagttgccagtctgtgggcctttgaacagtgaatctggggaagtgatctcacttgtatctttcagtcaacatctcaaggtagaaaccccagggagtgtgcccagcttcccacaacaggcaaccatgagcccactagtggtcacagcatcacttaggtctaaatctcctgtctgatttcagcagctggttactggcatccctcagttggcacatctgctctgcccaaccgtggttcgagtagaaagggagtcggccatctagaaatttctctagaacgattgcccacctccagcctgagtggctttgttcccatgtgaccaggagcacagactgatgccagcccctctgtgcagggagcctgggaaggtggactgagtctttagacctgtcagaggctctcagagggccttggtggacaggaacatgctcctgggaatggtaggggagggaaggtagccttcctgtgacctgcaatgtcatgtggggtgaggcatagaccgctagctgccttgggaagacgtgtgaggttgggggcctgggaatcctgctttggatttgcacttgacctccatgaccattaaaagttttggggaggaataatgctccacaatgtaacatcactggatctgtggcccaacccttctgaatccagcttttctattgcacagggacagtgctgcagctctttagtgcgaacatatcaaccaccgtaggtttttatcaggaattacactgtgggtgagtgaggtgaggtgtggggtcttgttagtggaggtggtttctgcccgttccccctaccacagtcggggcttgggtgccattgggtgcttgctctctgagatgactgatgacactcccacatttggaacctcacaacctgggccgctggggactacttttataatcgtggtgtgcagaaagagcctagctgatccgtttctccgttttagttattacctagaataatgaacagttttgtagttttgcacgctgaaacctgagctcttccacgtctaaggtccctgtgcctcctttagggagtcctggctgaggggatgttcatagacatggaattttaggacctcatctctttattccagccccactgcccagtgtgtaggctggagggaggatggggcagaagcccagagtggggaagcaacttctaccagggcacacagcaaattcagagatacagcagggacagaagccaagcatcttgcagtgtgtgggtgccttttgactaaccggcccttttcggctatctggactagtgctctgcggctgactgtatgccagcccctaccggaagacaggaagggaactgttaagtgaatggagcctgctacgtttgaccatcacctccggcctcccaagctctctctccgcactccatctctctttcatcaccgtactctcctccttggacagccagtcagaccctacagctgctctctaggctgtttccagcttctttggtaactttctgttacttgaaagttgagcgggaccagggcagggccaggcaaccagggaaggtttggttgagatgggaggcaggaacgaggctttaaatggagggctacttggggcaggaattcgcctcagcagttaacagcgcttgcttgctactcttgtcgaagaccccggtttggttcccagaatctacttgtggctcactggcgtttgtaacaccagtttcaaaatatctgataactgtcccctgtgagcatgcacatagtacaaggcatgcaggcaaagcactcataacacattttttaaatcttttttaaaaattaaagataagaggaacgcaaaggctgggggcagaagctaggtatccttttgagcaagcctggccagcaccgagcctttccagtgagtggaagcgtccctagcaccgaatactcctgcaaggaaagcacaggcgaaatcacccgaccgcgcggggaagagtggggaggagccagggacaagaacgagtcgcagggctggcgggctggtgcagtctcagcctgccctgccagctggacctatgagccagcctgatcttcctcggcccgccctcctgcctctaagtaatgaggatggcgtcaccgttgcccgcgccacgtgctcccccgccgcctgcctgcagagctgctttgtacgtagcagcaaaaatccgaagcccggagaggctttcaattctcggggagggttttgtttgtttttaaagcgaagaaggctcatgcccctggctaagatcctgagaggcgttgaaacccccaagccctggcagccacaaggctgcaggaacttgggaggatggtggatgggccgtgggttctcttacttttggggatggcggtggggggcagattctgacctaggacaggagacgtgttgtggcagaaaagaaaaattaatcacccgggccagagttctctgcccagccgcccatcccccccccacccccccccaccccggtcctctgcagaacatcaatctctctggcccacttcaccccatactgagggccacattttaaaaattgaagtaataagagggctggagagatggctcagcagttaagagcacttggggcacttgcagaggacttggattctgttctctggactcagatccggctcctcacagccccctgtaattcctccaagagattgccctctgcaggctcccctacacaagtggcattctctcacagagacacataaataaaacttttaagtttttttttttttaaatctatagatgggatcctatgtgtagtgtttattttcaccgagtgtgcctacaggcaaacagtatgtgtgtgctctgagtaaagtaggttttgtttgtttgcttgctttttgttttatttgtattaatgtggctgtgtaattaatgcgtatgcatgtgcctggggagactagagagagtgcagaatcaatccactcccctccccagctggagctacaggcagttgtgagcctctgaccctggtgctgggtaccaaactcagacaagagctgcaagtggcttgcctgctgagccatctctccagctcctaaaatgtacccnnnnnnnnnnnnnnnnnnnncgtttattatctctgcctcaaacctcaagtgactcacacagcgtggccttctagctaggaatgggatctgccagcagggggtggcccatttaaaagctgacctagttaaaatccaggagcaccaaaaaacactgggtcaatctgatttgagtcttctgttcgaagcctggaacctggaacctaaattggtcagggactgacaaggttgaaaccaaaccacatatatttatccaattcttgttcagtaaaggaagcacaaattatgtctggaggttgggggtagaaaaccaggcaaagcaagatgtagaggttgaacccagagggtttgttttgaatgctctccacagctccagagcagggtgggaggcttggggtgttgggctcagagcctgtggcaggaaggcatggaggactgggcctggttaggagccttcattccctgctaccatcttcagtgtggacaccatgggcagagccagtggtaaaggggatggtgggtagcttttttttcttcaagctggcaaaattctaggctggacttcttattgtgtaatccggccctaggtcgttggcactagaattctgagaggaaactggaagcccagagaggtgagaagggtgagagaccagtggttcccactcttcttaactgattgcaaccatacaattttttgttgctacttcataactgtaactttgctatagtcacaatgtaaatatctgtgttttctgctggtcttaggcagacccctgtgaaagagtcgtttaaccccagagaggtggagacctacaggttaggaacagctgggctagagagaggaacttggactagagccaggtctgtctggctagagtccaccttctgcccatcctgagttgccatagaagttctgaaaaagtaaggggcggctcttaaagtgtcctttccccctgggtcattattttttttagtaggcctgtcgtagacccaagctgtccattctaatcagagccagcgccacagccatgtgacctacacacatagttggctgtcactgtcttagaattctatgtgaggctttgttttgtgttttgttttgagatgagtttcacatagcccaggctggtctcaaactcagtgtgtaactggggatggtattgaacttgtcatccatcttctaccaagtttatgtagtattggaaaaatcaaacaagagactagtacaggctaggaaagcatatgctatctaccaggtaaatttccagcaaggagcccaccatctcattttgcactgggctatagttacatagccattcctgaccaagacagcgcctctctcttcccggtctccgggtacctcttatctcccctcgtggcctttcggggctgtttaccagccagctgtggatttccagcctgccaccagctctctctctctctgtccgactcctcctctaccccacatcttggatcaccatggattctgtgacccttcagccaactatgcggcaggagtgtcttatgtagggagaactgactggagtgtgctgagtgctgcgtcagtttggtagggtagcgactgatcccatccgctgtcagggctggtgcttgattggcataggcacacacccaaagctgttgcgggaaagcatgagcattgatcccacctgctatagtgcactgtttatgcttatgagctgtttgggcccctcccccctctctctgtattcccagtacttattatattgtgcctggcccagtaagagggacatttgctaagcagtgctgtcccatgcgtccctctaggctgattatggggaaggacagtctctgacctctaggagggtcagatgcttaatatacgattaaatgattcatgctgctgcctctgagatcgctgcccagccttgggttcttagagccagctacagggacggcttcctgggagggagtcttgaattagatttgggtgcaatgggtaggtgacttgggggagggggaagcggccggctagtaggtcactaaccagccgtgagtgtttcagaagctggctagagtttgcagtttataataggctaagccgatgccaccgtccttttcctaaagaggtggaatcttggactccagagaacatgatatcattcagcccagatcagggggtcttgcatccagggtgaggttggtcaacagtagcccaggctatctcgtaaccacatccttccctgaggtcacggccttcaagacaaacacgcctgaagtaactagggctgtgacgaaggctgcagcgttagagagaagaaaggtcacatctgagaacttcgtaaggatcagacttggtggttttgaaacaaacgagttgttgtgttgcgtgaatgtgtttgtgtttattatgaagttcagctttcactggcaaggaacgaaggcagacccaagtctggggtgggggtctcgggtaaggtttacgaaggggagagccagaccaggctggcttcttatgtgaatgtgtggtgcctccctacagccagcagaatgtgaatgtcagcctcctgcctggggctgaacgatcctgtgtaagcagaatagccctggcctctggggctacagaggtaactgagtgcactggggtgctgttgttgttgttgttttaagggctagtggcagttgctgttgtgtgttaagggctgctggaaccgggagggcatctaaacccaaagtacaaatattcagtttaattttaacttgcagtttgctcacactcaggacttggcaggggaagtgggcctttattctatttttttttttttttaaagcacagcacttcttggatacaaaagggatgctgtcacatggaagggctagagaagaggctgccaaggacggaggaagtgggttagaaatgataacagttgcagggtgagtccccttggtcgcaggccttgggagagaggagggggtgggggtagagagagggcaggcagaagactcaggcagacgatggctagggttttccgctttgtccggtttgagccacttctcggcctgcgaggcttgagctttctacacaatactgcgatcttcgggtctatgccctggccaccccctaaacagtgccgggcacccttactgtctgtcaggaaggaggaggtgcagaaaagcaaaggagactgggaaaggctacctgagactttgccagagggagaggaaactcttgggggccccacacccagccggaggaggccaggttgagctctgcaccttggtgactgaggaggtgggtgtgatgcccaccaagctggtggaacaggaaagggctgaaggaaagccattacagccatggggacctatggagttgggtgatctctgggcaggcacagttcctataccttggaatgtcagagatgcctcaggggaccgcgctacattgagcagctagcctgcattgacctgtttgcctaggcagccacctgctgggcctgcatttcaggctaagtatttctttttcttannnnnnnnnnnnnnnnnnnnnnnnnnnnnnnnnnnnnnnnnnnnnnnnnnnnnnnnnnnnnnnnnnnnnnnnnnnnnnnnnnnnnnnnnnnnnnnnnnnnnnnnnnnnnnnnnnnnnnnnnnnnnnnnnnnnnnnnnnnnnnnnnnnnnnnnnnnnnnnnnnnnnnnnnnnnnnnnnnnnnnnnnnnnnnnnnnnnnnnnnnnnnnnnnnnnnnnnnnnnnnnnnnnnnnnnnnnnnnnnnnnnnnnnnnnnnnnnnnnnnnnnnnnnnnnnnnnnnnnnnnnnnnnnnnnnnnnnnnnnnnnnnnnnnnnnnnnnnnnnnnnnnnnnnnnnnnnnnnnnnnnnnnnnnnnnnnnnnnnnnnnnnnnnnnnnnnnnnnnnnnnnnnnnnnnnnnnnnnnnnnnnnnnnnnnnnnnnnnnnnnnnnnnnnnnnnnnnnnnnnnnnnnnnnnnnnnnnnnnnnnnnnnnnnnnnnntgaggaggtgccgtgtccccgtccccgtgtcttccccaccacacacacacacacacatagaggcaacttccctagacattcccttgactgcccagcattaccttcccaccccaggtcctcttatgcttgctaatggcattaaggggagaggccgtcgaaccactctaggaaaaccacagatgactgcagtctctgaggagacaccgggatctgcccttggaagcagggattccctggaaagccagttaaggagaaagcctgtgcacaggagtccaacacctcagacttgtgtcccttgcccacagccgctcttcctccatttgctcgatgccctcagccaggcctttctctgcaactgtcttgccctggggtgaaggactccaagagcttcattcttacactctaactgggagtggcttgacctggacccgtggcctcttagatccatcgagaagatggatggagcatggccagggcagaggcttggagctcatgattcggggaggaaggtggtgtggtgttcctggctttctttccttcagatagaactgtgaatccctgctagggatggggctgtcctgcatggagcactcgctgtctctgcagggacccaggtgccccatagtccctgccctgcctattagcctggagtgaaccctgttgtacctctgcagagtggctgaagacaagtggtctctggaagaccagaggactctctaggccaggtcctcttagaggagaagtgcagccatgggtggggactggctcgtgagctgtttatgcagggtggtggtggggaggacagtggtgaccctctgagacgtgtgggcctgtggagaaccccatggatggagggtgcagcacgtccagtcagtattttccatgtttcccagaagctgcagggtagaagctgattctgaggcggagtcctggggtgcaggggtgcatgggggacaagtgccatcgggaggggtcagtcttctccttttagagtcctttcagcctcaagccaactctaagatctctaatcccaactatttcagaagcgagtcaggattacaaattgaaggccttttaaagctatgtgcagggacaattcagatccagtttaggcgactcagagaaagactgtgtcaaagtaaaaaggggtgggggtggggggagtgaactaaagggagcaggtgcttgcttgccttgcatatgtgagcgcctctgctcaaccctcgcttctataccacagtaaggttcctggtatcaccaagagactgggttccccaagcacctggcttgcccaggattaccttggtcggcctgcggactcctttggctgtttgcgccttttctgagacccactggctttcccctgacctagcatccatttgcggtgtttacccgagccagcaactgcccctgcagtgggtgtggtttggatcctcacgagtaacttctaccgtctcttgccactttttgtcagaaacagagaaatacctcccagcaccaccctcctgtccttggagagggagtgggtagggaccctcacatttaagtacgggctgtcttaggagtacaggctctctcatcctctatgaggcagggaccaaggaagacatccaagagccatgtggtccggtaactgtgccttgtatctctgtatacctaatattaaaataacaccaagtgttcaggaccacacgaggcttgtggctccattcttggacagcaccaaacacttcctttctggtgggaccatctgctggacagtgctgtctcggcatgaggatgtggacgagggttctctgctatgctgcccctgtggtggagcaggctggggacctgattacagtgataagggccaggcctcagtgaacaggctgaggccagagggaggagggagagcaagcatgagtgtattgtgtgcaagccacgagcatttggcaagggggtatgggggaggtggtggtggtgggacagggatggggaccacaaggtgtggactgaaatgagtagcctgcctccagggagtatctggcctgggcattcgtaggcagggataccaggtgtcatggctacctccattgtggctgatgcctgtgggcagtagggactgtcatttttattgtatactgggatgtgtagcaggggcttattcacacatgtgcgagcatgtgcacgcactcacacacacacacaccagccttggtgacagcaaagcctactggatatgttctctgcagaggttccccagttctaaatatttatttattgattttatgtatttgagtacactgtagctgtacagatggttatgtgctttcatgtagttgtcgggaattgaatttttaggacctctgctcactccagtcaatcccactacctcagtccctgctcactctggcccaaagatttatctattattatacataagttcactgtagctgacttcagatgcaccagaagagggtgtcggatctcattatgggtggttgtgagccaccatgtggttgctgagatttgaactcaggaccttcggaagggtagtcagtgctcttacatgctgagccagcccatggctccccagttctagaggtgtgcttatccaacattctccatctgggtctgtctttcttaatggtagaaagatgggtagcccggtcaccctttgctccaaggcagtgctgatctggataaggcaattgatgggacgctggagttggaccgcctctctgaccccttcactcacaccaaccttccttttccaggtgaaagagctggtcctggataactgtaagtcaattgaaggcaaaatcgaaggcctcacggatgagtttgaagaactggaattcctaagtacaatcaacgtaggcctcacctccatttccaacttaccaaagttaaacaaactcaagaaggtaaacaggctgggagctgggaggctccgggtgggggcgccttgtgctccgagagcataattaagggctaggccagttgcttgcttcaacttgctggcagggtccctggggatgttcccttcccgctggctgcctggggagagtagccccgagctgggtgttaagtgtactttcccttcctgcctcatacagcttgaattaagcgaaaacagaatctcaggggacctggaagtattggcagagaaatgtccgaaccttaagcatctaaatttaagtggcaacaaaataaaagatctcagcacaatagagccgctggtgagtcccttggtcctctcctttccttgggggcggtggggagcccgactttcatggttttatttatttatcactgtttttctttgactctcgtcctgtgctgtgagctaacatgggtactatttctgcttagttcacggagaattcagttggaccaaggtcacctggtcagaatgggcacccagtgtggggcagggaatggagcctggtgtggtgtgtgcccttcagcccgggttgtggtatgtctgggctcacagcctggctggcttgccaccctttgaggagaggagcaaacctagatgtaagctgactctggatgtacatcagctatcatttcttccaagggttagggtttagtgctgacacagacgtggcattcctggagtctgaggctgtgggtgggaaagcccagtgcaggccttcatttgcatatggagagaagagtgtctgtcttggtgaccagggcctcagagacaggatggatgacacttctggttcttgctttactcattttccagttagggaaattttagtcagaatggcagtctcttgttaccaacgtcccaggtgcagcgttcttttggtttttaaggaaaccgcccgaagatgtgacaaaaagaatccattggaaatggagaaaagttgcaaagcttgacttgaggaagggccagggatgcggcaaaagtgactgttccgggttcacaaagcactcatcagtctctggacatagtgagctcatggggccaggtggtcataacagcaagcaggcgttgctttttcaagctcagactgtctgtctgtcttgctaataaagcacactgaccacaggaagttctttccaggtctcccactgacctaagtgaaggcagagctgctttcatctgctgggaagccctgatgtcatccttttgttaggaagagaaacctcttcgaagttctgactcacttgtgttgggagtgtgagtacagctgagtctatacagtctgtctaacacagaccagagctcagatgtcctcttggcctttggcccctcctaagaattacctgagcctatatacaaaatagtagagaatcaagactgactctgaggggtctactcttcctagtttgacttggtccccatggcaacagggactcggtgagatcccctgaatgaggtgagaggtcaagattcagctgcatttcttgctagctgtgggcctcctcacttcctggagcctcgatagggcgtttcccccttcccgcccctttcccacggtcaccctcaccgttgactgcctttctccacttgcagaagaagttagagaatctcaagagcctagacctgtttaactgtgaggtgaccaacctgaatgcctaccgagaaaacgtgttcaagctcctgccccaggtcatgtacctcgatggctatgacagggacaacaaggaggcccccgactccgatgttgagggctacgtggaggatgacgacgaggaagatgaggatggtaggtgtcctggggatccgggatgcagagctcactctagacaagctggcaagccatctgccaccggttttcaaagggaagagggactggtggcctcaagtccccccagagaagaacactatgtatatctctatagtgtgatcccagacgtgggagaagagaccagttgtaggggtggactccccagggccttttctccatctgagaaaccagggtcttctgctggagaggctgtggcgccccctggtggttgcagcatgcaggaccactggcctgtgttgggcccttccgtggccctagggaagttgggggctatagtcaatgtcagatcccttgggaaggaaggaaaggctaagggtctctcctccctaccccatccccctatctccacaggccccctgcagttggcaccctgcagctcttctgcagggctttatagctcaaacagaagtactcagatagtgccagtcgatgtagacataaaattcttttgtccttgttggtctgggttcttctgtgaaatgttcatatattctgtcagcatcggtggatatcctttgcccaaggattagattatacgtgttcccctgttgcacacagtatggtgttgtgatatgtggcatgggtctgtagtacagccccggggccagtcctccaagcccttggccagttgctccactacacaggccacttgtggccttgaacagggcagttctctgaagagggattagttatgttgacttaagcttcttgctcaaacctccgtgtctctgtggccttacccacacagaggttcttctacatatctgacttggaggaaggcttatagcatgagtcattttttgtgtgaacaccacctgtgtgcattattaaagcagtcgggctctgagnnnnnnnnnnnnnnnnnnnnctcaatccgagttgtcttcttgctggccacccccacagaggaggagtatgatgaatatgcccagctagtggaagatgaagaggaagaggatgaggaggaagaaggggaggaagaggatgtgagtggagaggaggaggtaaggagacggggctgggcacctgtgcagtcccacctctgacctggcaggtgcctcattatcagtcgaggcaacccaggaaggagccttggttgtctacctcctgcccgctggcggggaaggaaaaggggtccgttttccaaaacttctatggcacagactttgctgcacagacctcagctgccgttctgaggaagttgtgtcagagtaaggaaagggaggggataccggaagcagaggctccgcgtgctttgggcggggcctgtcgctgaggaggtcagaggacaacttttgggagtcagttctgtcctttcactgtgtgatttctggggattggactcaggttgccaggcttggcagcaagcacccttaactcgctgagccggcttgccagcccctaccttttgttttctttctttctttctttctttctttctttctttctttctttctttctttcttttttttgttttgagactgggtttccttgtgtagctctggctatcttagaacttactctgtagacctggctggcttcaaacttgtagagatcctcctgcctccacttaccgagtgctggggttaaaggtgtttgccaccactccccagcttctgcttatcattgcaatagctggttctagccctgtcctgagctgtgctcgtttggacagatttcttgtttttttctgggtttcttgtcatctgtgacgtagggacctctcttactgggttattgagagtaaagtcacatcgacagaaggagtctggtgaggggtacagcagccacaggtctcaggtacccacaccttcctccttgctccatgtgttggggttctatgagtttggaggctcagggtctctcaaagcagggtagttttccatgagttgtttagaatgctgaatctgttcttgccactagtaaatggtaaccaagaaagatttgcagtgcacactcatgaaccagatgccttcgggcacacatgcgcagtacacaggccatagtctctccttctcctggttttctgcctccttgcttgtagtacacgtgcccacacagctcctgagccgggttcctggcctgcctaccccagggctcaggagggtggatgccagcagaaaggccaggctcccatctgtacctgcggtttctctgtcttctgggtttaggctgacagccccacctttaagggatacttgcaggagggaacctctttccttgaggacaaggtaatgggacatactggctggtggactgtcccttgtaccattcctgcctgctgtcataagagccccacgtgtggactttgatctacttttttgtaatctcattgaccatctgccctttctcagttaccaatgaaagagctcttaaatacacacccacaaacacacacacacacacacacacacacacacacacacacacacagagtcttcgcaaacagaccagggagagaactatccaatgatgtaaaagtgaatttacttcaactgttcttagaaacagccgctgtgaaaccatagaaaccaggccttcaggtacagagaagctaccagcatggaactcagggaatgacccagaacaaggaccctaggatgggaggatgaagtcacagggctggctgaatcccaagcaggttgaagtgaggttctcaaggacccttgagtctatccgccacacccaaaccctttagctgcctaggcttggctgtggggagggcccgggaaaggagagctaggcttgcccacttgattctggacttgctgaaactggggtctttccttgaagctaaaaccatattgaggacagatgcaagaaaggatggcctactttcaatgacagggcatctacctgcctagggagcctggtctcctaaaagcctgcatgctagcaagctgcctcttttctaggggcttcacatccagtgtttctaacatggggtagtccaaaactaccccacagcccaggtaaccctcagtatcttatttaatgtgggaaatgtcttaggtcacccacatattgaaagtcatctgactcaggtggttccttgatacaaaacagtaaaaagccctactgtgtgtgttcaccctgagctgcaggccttattgtgggctctgagatgggatgaaaggcctttctaggcagggacatctctaactcatgtaggtgtgcgggtatagtgtatgtgcttgcgtgtgtgcacatgtgtttgtttgtgcatgtaccatgtgtggaggccagaagttagtgtcaattttatttctcaatttctccgccttatattttgagccagggtctcttgttgaacctggagctcactggtttggctaagccggctgccggtgagctccagggttccacctgtctgtgtctccaaggtgctggaatagaaatgtgtgctgctaggccctgcctttacctaggggctggggtggagcttggatcagtgggactgggagctgcctccccagatccagcaggggcactgctaataccctgctgtctttctttgcccctaggaggatgaggaaggttacaatgacggggaggtggatgacgaggaagacgaagaagaagctggtggtatgtcagccttctctctcccagtggcagcctgacccctttgactctagcgttgccctgcttgggctttaagggccaggcgatgggagggggcacccacgcttcctggatgtgttctggttcccagtgggggtggggctgccgggaagatggctgcctgataactctccctttccctccatttttccagaagaagaagggagtcagaagcgaaaacgagaaccggacgatgagggcgaagaggatgactaaggaatgaacctgtttggggaaattcctattgtgatttgactgtttttacccatatcccctccccctcctattcctgccccccgaaacttatttttttctgattgtagcattgctgtgggaaggagaggggaaaagtgtactgggggttgatggggggtgggggtgggggggaggggaggaataaaatactatttttactgccacactttatttccccccctcctttttcccttgtgtctggttttgtccccataaatgcaatagcttagtgcacaccaagcaagtgtttgttcttactctctggagaggatggcttggaggtctaacattttctggtatgtcctacatccccagagttgatcgggaggccgtggctggcctctgccaggtgactcacagcccctgtcatcttcactaactcctgttctggttccggttcgtgtggtcgctgccagaggcacccagcaccccggtttgtaaatagcaaccaaaaggcgtattttggcactggtttggggacagtccccatctctcatcccttttccctccctccacagatggcagtgggctttgctttttgcaaagagaactcttattactctggggctatgatcccgagagccaaaaagaaaaaatcaaaataacaacaacaagaaaaaaacaaaaaacggcagggttaggagatacttgtaaaatgggaaagaagtgaaccttcatgtttcagcttcttaaaaacaaaaacaaacaaaaaaaactgttctatttggttctgtaaaatattagagcaactggttttgtagaaatggcaggaggacgcatctcaggcgctccagcttagaacccttttacaaatctacgctctggagctccctccgagagtcctctggggttttgttctgcttgttttccttctcacatacattggagcacaggaaaggaatgcaaactcgtattttcttacccggtgggactctgaaatggccgcaggtttctcctagggaatgctgtgtgccttctgcatccttcttccagatcgctttagaagtgacgtgctgtgtccctcctaccctgcgtctcactggtacagaacaactgccactcatttttctcccgcccttgagaagagccaaactttgagttttatgtctgtttgtcattgataaatttcaataaatcttttttatacaattttttgggagatggcttcctttgagtctttacaagccattgatcgtcctagggtcacctgctggccctggagggaaggcttgtaatgtcacctgctaaacagctttcttacagagtaaatagccttacaccgagatggagggagaatttttgttcgcaaagcagcaaaaacatatctgggtgggatatgttctacttaaaggctacagtctttaaagtgggggatggtgggggggggggaagggtacaaaaccttataaataaataaataaataaataaataaataaataaataaggcaagccgcctaaaaggcacaccaacaataaatagctcctgttcttgtttttaaaatatctttggttaattttttttccatattgtaaaagaatgtatgcttaaactcaggaatgtataaaacatttaaccaaccctagacttaacagctggtatttattgtattttttacttatggtcctgggtctctgttttttttgggttttccgaagcgctcaggtggttccctgctaatcccatggctgggttctgattggatttattgtaactaaataggtagattgttgaattatttccagtttctcctgcagcatccatccttcccataagtaatcacacttaaaatctatttaagtaatcataagtaatgataagtaatcattttaaaatctatttacattgtgtgtgtgtgtttcttgtatgtcagggcaactttggggagtcagtttctcatcccatcccgtaggtctcagagattgaacctgaggcatcaggcttcacagcaaagacttgtactcagtgggctatctccagctcaccaagcccaagtacttaacatctttcatttttctttaaaaaaaaaaatattagttttctcagtaaatcgccctggttggcctggaactctgtaggtcagactggcatcaatctcctagagatccgcctgcctctgcctaccaagtgccccccacagattcttcatttcttcatagtcaactcttagacaagatgctcattgggccaaacctctcctagcatttttgtaacggtcatgtatgagattgcctaaaacttgtcagaccagggatggcacactggctgcgtgaccttcttctcagccatacagctttgcactccatagcaagcatcagctatcttgccatcatggcagggttccagtgactcttgtacatgtctgagaagacctgggcctcacctcaccctgacacctgctcttttagactagctatctctggcttcagaagcagagtcaggtggtctcctgcaggctaagctatgtggtcatgatggggaagccaggcaggcatgtctttacaggaaggtatcaagaacatgggcgtaatgtgtcaggacagatgctgtggaccccagctcctctgtggtggctcaattgacatggtgtgagtaatgaagaatacgttttgcaggcagcctccaggggactccctttctgcatcaggccaggtatttccatccacctttgaggaaggttgatgagaattctagggagatgctcagtataaacatgaggacctgaggaccttcagcatccattgtctaaagctggatgtgttgtgtgctgcttgtaacctagcactgagaggcaggcaggcagatccctggggctcactggtcagcctgcctagcccacttggcaggccccacactgtccagagagactctgtgtcaatcaagatgaacggctaggagcaccctctgaggctgacctctggcctccacatgtttgcacatacgggtacattctttgttccccttgaactcttcccccgtaaatgaggaaggctgggactgagtaccttgagcataatatgtaaaacccggcctaccacacggtaagtttttagttttgttgaatggaaaggaggaagagtgggctgtttctgagccttgaccctgtggccagcccagaacttcaaacacagccagtccagcgggttttctcagagtctcagagtgattcagtgacgtacagaagagccctgagaagctgagctcctgtctagtcccagagccttacactaaatccccctactgactgtatccttgacttgtgcaagactgctgggtgaggcatcatgaactggttcctcagctcacaccgtcacgactgtggtcaccagtgtgctagtaagtgctatatggataaaccccaagaggccagttgcccagtcctagatgtccatagtggtacctacctgtaatcccagaacttggcaatcggaggctagctcaaggccatccttgtctgtataacaagcttttggacagcctggttacttgagaaattgtctaaaaactaaaacaaaagcctcctcgttcaccccctctaacttggtgaagttcagggaggacaagtggtgggcccaaggtcacatcacgggagagtggaagagcccagcctcaagcccaggatagatagcttttcggggctttggtacactcctctgcattgaggctggaggtataaagtgcagtgtttccagtaggagccaaccctacaggtttcgcatggcaataggacctgtcatcagttctccacattcccagagcaatgggtttccggttcatctcctagtcaagccattgtctggagaaaggatggtggcgtcatctgtggtgtggcctccaggctgcgtgctttgagaccgccactccctccagtctcctagattgcacaaagatggaaacggagctttagcggcaaggtgactctccagcttgtaagtgccttaaaaccccagggctctggcaccacatggttcttacttatcctgtgttagaagtgctagcaggcagatgcaggccagaggtgaacaattcaggctctcgtttgctgacttgcaaagactatttatatcctggtcccaaaactcattgttcacatttggaaggattcccaccctgggtccctaacaagcaattcctgtggatataggctgggcataggcaagaataggacagagagaggctggagatggagacagatctgaagccagccaggaaggtgttagcagggtagagactagagaaagccaaacccaggggggacattgtcactgggactgcaggagcagacacaggaacataacaaacaattcctcttagtggggcaccgttggactgtggacggcccagtggatggggacattctccactccagatgttcagttagatgatgtcccatgctcactcacaaggacagcaggtgtgaaggagcccctgcctggtgtccagagacatgattggatagtggtagagtagagacagtttggttattgtttgaaagacttaatgttttaaattatgcatgtgtgtgtgtctgtgtggggctatattcacatgaggtgcaggtgcccaaggaggaataggaagtcagaaaccctgaagttcataggcagttgtgagccacccagagcagaggctgggaatccattctgcaaacacagaagtatgtactcttaaccacaggcgcctctcctggtccacagagacagttattaataagaccattctcaggccatgcatgatggcaaacacctttaatctcagcactcagaaggaaggaggatctctgggagttcaaggccagcatggtctagtccagccagggccacaaagtgagacccagtctcaacaaacaaacaagcaaaaaaccaacaaccaaaagcaaaacacagatcttgctgcacggaactggaaggaggagcctggttgtggaggcacgtcttccagggaaaggcagcctgtcaccagagccaggaagccatggaacttaacatcccgtggcaccattcagccttggtctgaccagcgcagagtgggtaacccccagcggtccttgaacaagtctgcttttcattcactagagctctatttggtttataatcatcctcactacaaagactgcacacacggaagctctcagtgaagattagctgcttagcactcggcacagtaaccgatgctcaaccccagtgattccaaagatttcctgactggagtccccagggtttgtccgatagccaggtcttaccccatgggaattcttgttcactctagatcgggacctggaaaacccaggactcaaggttctaccaaagtagccttgccatgagggatgtttggagaatggtgtattaaactgaatactcccagtgacctgcagagaaaagtttgatcgtaccacattcattcagttaagggcagtgagactcagagacattgaatgatctaattaatttgtcacacagcccacaagtagcagagttgagtttcaaacctgggtcagcataattttcatagctcctgtagagagtaggtgaaagcaactgcctgtatgcctcaagattcggagatactagaaaaaagcaaggggaaatagagagtgaaaactattttttttaagtgatgtgatagcaagatgattcagagggtaaaggcatttgctgccaaacctggaatcctcatggtcggaggtacgaaccaactgtgagggctaaagttaagtttaaattaccaagcctaagaaatcttgggctggagagatggctcatcaattaagagcattgactgctcttcctgaaggtcctgagttcaaatcccagcagccacacgatacttcacaaaccatctgtaatgagatcagatgccctcttctggtgtgtctgaagtcagctacagtgtacttacatataataaaataaatacatctaaaaaagcaaaacagctgggtgtggtggcgcacgcctttaatcccagcacttgggaggcagaggcaggtagatttctgagttcgaggccagcttggtctacagagtgagttccaggacagccagggctacacagagaaaccctgtctcgaaaaaaaaacaaaaaacaaacaagcaaaacaagcaaacaaaaaacctagccagcacagacagagtcacttcaggagctgatgatttgctgtttgcttatcaaaactttcttcaaaatagtcattatccactcaaggtcacctagccagaaaggtacatgtgtcctacgttctcagggctagcgtggcttacggttgaacacagcaagattcgtcttgactaatttcacactttccctcaaggactcaagctctcagacccaacacagtcctctctctcatctctgcaactctctctgcttccaaaccagtgacacagtattcccattatccctggggacagatgtctcataacaaacatgttctaaaactcaagtacgaaactcaagaatgagcctcttgctgattgcagagatgctgctgtctgtttccaagcatcaacagtcgtgtctggggctttaaaaatcaggtgaggctgcatagcgcaagatgctaaactcttgggctgtcatgggcttgggctgtcatgggccagtgccaggaggtttatgtggccttggacaagctacctcttactgcccatctctagaaggctcaggaggtcagggcatactttctgctagggatggtgcaagagaaagttatggatgacattgggtaatagggaagcatggggtcttggatttaaatacaagtttgacttgcgattgctattcttagttgtcaacatgactacatatggaattaactaaaataaaaaatgagggcacaccaatgaggaatttttgcttactttgaagtaggaagatccacttcaaatccagatcttgaaggggacgataacgatacacatctttaacctgggccatactttctgttggaagtctgtatacggtcatggaagaaagctgcttttgctctttgcctgcttgctctcaccttgttagcaagtccatctcccccttggcatgagatcctgcttcttcaggattccagtgtacactgaagaccagccaaggcatccagccccatggactgggcaacttctagattcttggactttcaattcacagcccaccattgttggattagctggactggagcctgtaagtcattgcaataaatcccctttgtatatatagagagattcattctataagttttgttactttagagacccttgactaatacagtcttccatagagacaggatatgcctcatcctttgtatccggagagcaagagaaaggccattgatcacctaagtgggttgattccctggtggggaattggaaggcggatacttattggtgtttgaagaaaatataatctgggatcatcaataagacacaggtacagggaagggtaggatgggggtaggggcttgaggtggggacagaaggcgtgaggaagttgttgtgggtggtgggaaagcaagcacaaggcagccaacgactgagtgtggctttaacgtggtagattaaggagctgggactgaagctgagtgggcaaagttcttatctaacatgcacagtgtttgggttccttccctgatattgtaagaactgggcatggtggtgcacacccgtaatcatagcgcttgggagatggagacagaaggatcagaagttcaaggtcatcttcagctgcatactatgttcaatgctgggctgggatacatgagaccctgtctcaaaacaaacaaacaaacaaacaaacaaacaatagccccctaaagtagactctttggagagttatgagggtacagtttaaattctaagctggttaaggaggtgattcgaaattgtcaggaatgaagaaggagagggccagcagaggagctacaggccagaggtggggatatccagggtggagaagggagcctcaatggaggtgaggggtgttttcctagcacttcagaggtagagacaaagacatcaagaattcaaggttagccttagcttcagccagttcctagccaacctgggctacaagagagcttttctcaagaagtgtttagccctatcccatctctccttccatgtttcccccacatccacctgtgtctcccctttgaggtgaacagctttgctcccttccatggtagcttcctacctcagcacaagcccagaaatggactcagttgaccaccgatcaaaagttctcaggtcacgagccaaagtaaatattttgtcattttaagtaactcatctcccccagatatttgtcacagtgacagaagtaacatagacaccaaggtaggagaggggagaaatgaggcattcatggaaaaatgagaaggatccccaagtccaggtataggagcccatgaagtacgacagcccccctggtggctgcttcacttgaagactgccagggaacagggtcacaaggaaagaccttgtcagacaaagctgacaaaggtacgatggagaaggcctgccttctgctaacccatgagctacaaggagtgtactagttactttcctcattgttctaacagccaatgggaacggctaaggaaggaaggcttgtttgactctcagtttgagggtatgggttggtgggtagtcatggcaacaggagagtaatgttgctggtagcaatgggtccacagtcaggaagcagagaggacaactctggtgtttagcctactttcttctttttattcagttcagggcctagggcatagaatggggccattcacattcagggtaggtcttttgacttaatgtggggagaagatgaagtcaggtcagttgccaggctgtgactcatggcacctagagctttgatggcgattctaaattctatcaaaatgataatcaaaattaaccatcatatttggttcctaaaagttgaagtgtaagggtaaaaaaaaaaaaaacccttctgggcagagcaggtgaggtgtgtcctactaacgctgaagacccaagttctgttcccaagacccacatggggagaaacagcttcagccaattgttttctaacctccacatgtgcacctcggcgtgtttgcatcccaaaacacaccacatgtacactaaatacatacactaaatacatacatacatacatacatacatacatacatacataaatgtcataaaacaggaaaacagcctttgttcttttctgcaatttcaacacggttcaactatgggcaggaaacgtactacaccctcccattcccatgggacaattgtttacagattgctggcagatttgtgttctgtttgtcttttctgaatctctggagcctgttggcccctcatttggagccctctcaaatctccctgtgcctcctgattctctgttctaactgggtactgggatggtctttctcctgtcaccctggatccatccactctcctagaccaattccagagggaagtcctgtgttggaaccccaggtacaggctctcccaaacacgggcacgtgtcaggtgtctcctctcctggcttcccttcagcagacattccagacctcatcaccagaagtcggaagtcaaggagaaaatcaggaggcacccacagcagcccagctgtgaacaggtatttgtgagacttaaaacgaatggcaccttttgtcactcaaacacatggctgcgccttggatattcagtaagttccactgttctctacacgtcccaggccaaagtaggctgttggagccaattaccacttgcatcagggaaccttgcccgggattggacagtttttgctttagacagggaatgaaaataaggacaagatcgctccaaggtaagattgagaagaggtttattgtagccatgagggatagaactgccagccgcatctggaggagaattcgaagctgagagaagggaagaagaagcccagagagaggtttagggtagggggcggggtgagaagtgcggggaggagccacaggtgtggagtgagacttgtcctaggtttctttgggccatgacagatggttagctcctggtgctgggacagatatctgagaggagtgacataaaggcacattcactctgactcatggtttcacaggcagtcgggccagctggatccctgtgtctaggcctctgaagtaacatgccatggtggaaaggcag

SEQ ID NO: 1523 - DNA, 863 bp, Mus musculus
gggttcggggtttattgattgaattccgctggcgcaggatcctctgcagaaagagagagcgcgagagatggagatggacaaacggatttatttagagctgcggaacaggacgccctctgatgtgaaagagctggtcctggataactgtaagtcaattgaaggcaaaatcgaaggcctcacggatgagtttgaagaactggaattcctaagtacaatcaacgtaggcctcacctccatttccaacttaccaaagttaaacaaactcaagaagcttgaattaagcgaaaacagaatctcaggggacctggaagtattggcagagaaatgtccgaaccttaagcatctaaatttaagtggcaacaaaataaaagatctcagcacaatagagccgctgaagaagttagagaatctcaagagcctagacctgtttaactgtgaggtgaccaacctgaatgcctaccgagaaaacgtgttcaagctcctgccccaggtcatgtacctcgatggctatgacagagacaacaaggaggcccctgactctgatgttgagggctacgtggaggatgacgacgaggaagatgaggatgaggaggagtatgatgaatacgcccagctagtggaagatgaagaggaagaggatgaggaggaagaaggggaggaagaggatgtgagtggagaggaggaggaggatgaggaaggttacaatgacggggaagtggatgacgaggaagacgaagaagaagctggtgaagaagaagggagtcagaagcgaaaacgagaaccggacgatgagggcgaagaggatgactaaggaagaacctgtttggggaaattcctattgtgatttgactgtttttacccca

SEQ ID NO: 1524 - DNA, 744 bp, Mus musculus
atggagatggacaaacggatttatttagagctgcggaacaggacgccctctgatgtgaaagagctggtcctggataactgtaagtcaattgaaggcaaaatcgaaggcctcacggatgagtttgaagaactggaattcctaagtacaatcaacgtaggcctcacctccatttccaacttaccaaagttaaacaaactcaagaagcttgaattaagcgaaaacagaatctcaggggacctggaagtattggcagagaaatgtccgaaccttaagcatctaaatttaagtggcaacaaaataaaagatctcagcacaatagagccgctgaagaagttagagaatctcaagagcctagacctgtttaactgtgaggtgaccaacctgaatgcctaccgagaaaacgtgttcaagctcctgccccaggtcatgtacctcgatggctatgacagagacaacaaggaggcccctgactctgatgttgagggctacgtggaggatgacgacgaggaagatgaggatgaggaggagtatgatgaatacgcccagctagtggaagatgaagaggaagaggatgaggaggaagaaggggaggaagaggatgtgagtggagaggaggaggaggatgaggaaggttacaatgacggggaagtggatgacgaggaagacgaagaagaagctggtgaagaagaagggagtcagaagcgaaaacgagaaccggacgatgagggcgaagaggatgactaa

SEQ ID NO: 1525 - DNA, 744 bp, Homo sapiens; identical to SEQ ID NO: 1524

SEQ ID NO: 1526 - DNA, 925 bp, Homo sapiens
  misc_feature (910)..(910): n = a, g, c, or t.
gattccgggtgcgccgcgggtgctgggggctcgagaacgagcggagctggttgagccttcaaagtcctaaaacgcgcggccgtgggttcggggtttattgattgaattccgccggcgcgggagcctctgcagagagagagcgcgagagatggagatgggcagacggattcatttagagctgcggaacaggacgccctctgatgtgaaagaacttgtcctggacaacagtcggtcgaatgaaggcaaactcgaaggcctcacagatgaatttgaagaactggaattcttaagtacaatcaacgtaggcctcacctcaatcgcaaacttaccaaagttaaacaaacttaagaagcttgaactaagcgataacagagtctcagggggcctggaagtattggcagaaaagtgtccgaacctcacgcatctaaatttaagtggcaacaaaattaaagacctcagcacaatagagccactgaaaaagttagaaaacctcaagagcttagaccttttcaattgcgaggtaaccaacctgaacgactaccgagaaaatgtgttcaagctcctcccgcaactcacatatctcgacggctatgaccgggacgacaaggaggcccctgactcggatgctgagggctacgtggagggcctggatgatgaggaggaggatgaggatgaggaggagtatgatgaagatgctcaggtagtggaagacgaggaggacgaggatgaggaggaggaaggtgaagaggaggacgtgagtggagaggaggaggaggatgaagaaggttataacgatggagaggtagatgacgaggaagatgaagaagagcttggtgaagaagaaaggggtcagaagcgaaaacgagaacctgaagatgagggagaagatgatgactaagtggaataaccnattttgaaaaattcc

SEQ ID NO: 1527 - DNA, 746 bp, Homo sapiens
atggagatgggcagacggattcatttagagctgcggaacaggacgccctctgatgtgaaagaacttgtcctggacaacagtcggtcgaatgaaggcaaactcgaaggcctcacagatgaatttgaagaactggaattcttaagtacaatcaacgtaggcctcacctcaatcgcaaacttaccaaagttaaacaaacttaagaagcttgaactaagcgataacagagtctcagggggcctggaagtattggcagaaaagtgtccgaacctcacgcatctaaatttaagtggcaacaaaattaaagacctcagcacaatagagccactgaaaaagttagaaaacctcaagagcttagaccttttcaattgcgaggtaaccaacctgaacgactaccgagaaaatgtgttcaagctcctcccgcaactcacatatctcgacggctatgaccgggacgacaaggaggcccctgactcggatgctgagggctacgtggagggcctggatgatgaggaggaggatgaggatgaggaggagtatgatgaagatgctcaggtagtggaagacgaggaggacgaggatgaggaggaggaaggtgaagaggaggacgtgagtggagaggaggaggaggatgaagaaggttataacgatggagaggtagatgacgaggaagatgaagaagagcttggtgaagaagaaaggggtcagaagcgaaaacgagaacctgaagatgagggagaagatgatga

SEQ ID NO: 1528 - DNA, 96599 bp, Mus musculus
  misc_feature (4408)..(4427): n = a, g, c, or t
  misc_feature (39512)..(39633): n = a, g, c, or t.
  misc_feature (53333)..(53661): n = a, g, c, or t.
  misc_feature (61962)..(62538): n = a, g, c, or t .
  misc_feature (64905)..(64941): n = a, g, c, or t.
  misc_feature (83686)..(83705): n = a, g, c, or t.
taattaagtagataaaaaatctcacctgggaccattcttttagtagcattaaaaaaaagatctattttgttggagagtatttaaaacaagacccacgtgaagtatgagaagcagtagcagacgcagcatcctttattaggtcctcgtggctgggtaaggaataccagtgcacaccagctcagggctgacataggattgctcatagctattttagttgtattcatgtcatcttaaatacagtttattaacattgtactattccattacaccattaatttatcttcagagatatttatagtatcaatttaaaagctgtaaaacttcatggaaagtagcttatactatagggcttcaacaaacaagcttgccattttgaacagggactcacaggaactggacttcttacaaggtttggagtttcttgctgttgttctggttgatagaattatgaaccttataaactcagtactttttagttaacctaaatacataaatctatttggattcatcttatgaaaagagatatgtcattagatatatgatcattatatgcttcagtgattcatgggccttgttacatacatgctttgtaatgtatgaattatttagtaagaaaaatcacaataattttgttgttactcaaaaatttatgggttggcagaaacaattatgcagcccggaagctggcgtgttaaggtaacatcattaactcatgtggtatgagtttttagcagccgtttgacataacctttactgctgctgctagaacagatcagtaattttgtataacaatctgcctgtgaacagaatgctgaattggctatccacaaagtgattcattttactttatttccatattagtacataatttaaatcctacctaaaaagtgtctacccaaaccctaaagaataaaaacatgcaaaataatgaatgcttcccaagtacacaaaagtgcaaaatcacatttaataagagcaaccatttctatttttaaaatgttagatgcttaagaattggatgaaaataatttatgagagtagattatccttaaagccttttttacacattgtattacagccactactaagagataaagaacaaaattttattttggaaggcagcaatgccacaaatgcaataccaaaggtcatgattttgaactttgaaatttacaaaatgaagtagccaagaatttggaagtctgaatataaacttaggctagctcaactttagactatttgccttgaatgtgtaaggttccacattcaatcttagcaacaaccacagtacacacactaattagtatcactaattaaaacatttatttttattttctatgtagtgttttgcatatatatgtctttgtatcacatgtatacctggtgcccacagaaaccaaaaaaggatatcaaatcccctagaacttgagttacagacaaccttgagccactatgtaggtgccagaaatttaaccaacatctgaaagaacagcctgtgctctttaatcgctgagccatctctctagtcccagaatgtcactaactttaaataatatttaaaattcgacaatcattcatgcaccaaattaatactcaataccagcaaagctgaagaccaattttagtacatttgatttgccaacagactctagtagtcctgagtctacacagagaagtcagactgcagaagactctctgcacacgacagactgagagtcacgtgttggcagtttttgttggcaacatttatcatagaatggatgctgtaaattgaatgaatacatgattgtaaattgcaaaggcagcatgtttgcctttaatagcatcaagacaaggactctttaatggaaggcatttggatctgtcttgcaagaagagcaataaagaggactagagagatggctcagtagttgtgagtactgacttctcttccagaggtcctgagttcaattcccagaaaccacatattggctcacaaccatctgtaaccatattaaagtatacttaatacattaaataaagaagagcaataaagtttgacatgtctcaagtgtaatgaatcaagtatgctttctgaaaaaaaaataagagtttggaatccttttgccatatcctcttaaggcatttcaaaagttgtattttattttctcacacatgggaactgctattgtaaagtcaaatttaggtaatgcacagaagtggaacagaagtactcgaatcagctagactcattctttttattttacatttgtattatcatcatcaccaccaccaccatcactaacaccaccatcatcattgaagcatgggatgcaggcattgagcaagaatgataccactgagctatatcccattcagccttactcttttaaaacaaaactaatattttgattgcgttgtcaaatgagcaatcatctctcagaaggaagccaggcttctgttggttttcagaggctacatgacaatttcttatgaaggcagggaagaactcttgagtaggacagcagattatgatggtgattgggaagtctccatgcctctgtctgattccccgtgactatattcagtttggtgatttatatacatataatataaaaatcctattttagtggacatggcttaaattatttcccagccattaccagttggataacagagtagtttcagctttctgagctttagtatctttgctatacaataaggagactatctaacagaaagcatttaatcattacaaggaccttatacattctaagtcacttaatcaaaccactctatgatgtaagcattgtgcactgtatttcttcttgttatttagttagcatcagctcatctttcacctgtggaagttttacccaaggccagacaaggttcctgagtctacattcttggtcacgtcattccacttgtcctatgatacacaagataattctgtcaggtgataactgagaagtcacataaatgagacttcattacttcctctgcatataggggaaattcagaagtgcttagcagtgagtcagagtcatgctagagtttgttttccagagactctagcctattctacttaaggggaaatacactttggagaaattaaatctggtgcattttgaatgaaagaagccttcgtcttagattatctgaactctccagttctgatcccgtgcctggtgcatgctgctgccccatgagcacctgtcatcgccgacccccctcgccggtatgattgttaccactgcttattttcattcctatcaaaatagataagaacacacttgcctatcatagttttggagactgctcatttttttcatatcttcatattcttcttaaataaacaaacaaacagcaatcagtataaagaaaatgcttgcttgcggtagggagatggctcaatggttaagtgcttacagtacaagcttaaagaccagagttctgattccagtactcacctaaatgctgggtgggagtggcagcccatctgtaattctagtctcagaggcagagataagggattcccaaagcaagctgattagcaagactaaccttatcagccagctttgggttccattgagagactcatcgatgactaaggcagaaacatagagggtgattccatagcaacctcaagtcttctcgggccttcagatatcccacagcctcctaaaagcaagacctacagaatgggaaggacccatgtagataacgtagacatcaagggtaagaggattccaagcagagaggcagtagagagaaccctggagtgtgatgtctggcatgttcaagaagcatgtgggacaatgacttgtgtgtgtgtgagaaggaagaggagacatggggttcaagagttcagaagtgtgtaggctctgggagatggcccagtctcactaagttctgatcccagtactcattaaaagccttgtgcctggaattcaagctctgggaaggtgtagagagaaggaaccctggggctccctgtccaggaagcctagctgaacaggtgagttccaggtttgatgagagacccagtctcaaaaaataaggtgtcaagaaatttaggaagacacttgatgctaaattctggctttcacatgtgtgtctgtgtgtgtgcttaagtatacacgtgtgtgtgcacacaaacacaaatacatccataggccctcagaagaggatgcagaggataataaagctcagtggtaggctccatgctcagtatgcaggatgcctgcaaactatgccaagaaccaaataaatggatgaatagttcagcaggagtaggggtcaaaggagaaagagtgggggttttgcctgctcgaggtgagaagctatcagtaaagctggacagaaaataacaagttactattgttcagtgaaaagaaagtattttcaggagtggtaaggatgaaannnnnnnnnnnnnnnnnnnncacaccttaaatcccagcactcccgaggaagaggcagacggatctctgtgagattgaggccagcctggtctacagagcaaattccaggacagtcagggctatatagagataccctgtctaaaagaatgagatgggggcggggggaggaaaagggagagggagggggagaggtagagggagagggagagggagcagggagagggagagaaaattatgggcatggattctggttaaggatttgagattgaggttaagataataagagagaaaagaaaatctctctgaacttataaaagcaaaataaaattcctcattaaatgactttaaagcaagagtcaaaactataaaaaccttagcaccaaacttgggtagaatctctctcttcacacaagtgcgtgagggtgcgcacacacacacacacacacacacacacacacacacacacacacatgcacacaaaaccacaggagattgtcttagccacaggcagctacaagataaaagtacagaaagggaaaaaactttagtgacatggagaacttggaggccttaagcaaagtgggtatgtttctgccgtgctgtggctatggtttgtatctccgtcactgcaaaggttgggaattaaaggcttagtcttcaggtagccatacctcatgagagctggtggactctttaaatggtgagcacttacagaagctctgagagtcattaggcccgtgcttctagaaagaattgttgaacatggcctctttggtctctggctttgagttactgtctcttcttggtacacaagtacaatcccttcattgtgtcagaacccagctgatgtcagcaccatgtccttgaacctccagtgctatgtgctaaataactatcatctttataaagttagcctggtcctactgctgaaaggggacaagcatatgaacttccatctctaactaagaattcctctccaatagacacccacttgcaaaggaaaaattagttttccaatggagtctcagtgactttataaatcacacttaaaagcaggctccattcccagaagtagacacccaacacaaaattaactcaatgttatttttatagacttttaatctcatatttctttgtttgggcttatgttttcttttgtttttcaaggtagcatttctctgtataacagtcctgactgtcctggaacttggagatctacctgcctcagcctccaggtactgggattaaaagcatgtgctaacttctttgggcattatcatctttctggtcttatttatgtgttatggtttctgattttgtgtttttatgggtttagctcttgtgtgcctctgcatttcttgtgtttactgttattttatttttgttttttttaaatctggcttgtttgcattttttgtttgcctgcttgttttctaaaaagagagaaaaagaaggagtacaatgagtggtggggataatctggggggagttgggagcagagaaaccatgatcacaatatataataaaaaagagtaataaaaatacataaagttagcatgtcttaggaatttcattacagtaacaaaaaagtctaatgaaatatctgaaagagttaaaattagtctggaacattagtgttgttgatgatgatagttgtggtggtggtggcaattattacttattattgaagatggtaggaatttgggttcaggaatcaccacacaatccatacaaacacagatcttagttaagcaaaaatagtttattgaatgcacaccctaatactggtcagaccagggacatagttcagaattatctgaactatgagaacagataactttttttttgtcagcttataaaggaaaaaacccacaaaagttcatatgcaggtgcaggcgtgactcaggatatcttagactgaacagttcatattgacccttgatttgatgggttctacgtaaagctttatggaatttcttaagatatcaaacctcatacagaagattcagagcatacagaacaaaacagggtatgtggtcagcatgtccttgagccaagtcacttttctgtgtcaatgactggcaggcatgttaaagcagcaatacaaaatagctggaggacatggatcagaatggccacagacagctattcgggatggggtggggtggggtggtcagaccatatcagtaggggtcaaatccagggcctaacgtgtgataagcatactgtgttccactgaggtacccagtcctggaatagaagttcttacatgcacagtcatagcagcagcattattcacaacagtcaaaagatggaagtaatctgagattccattggcaaatgaatgaatgaagattacatatccaaaggacttatctttaacccagcaaatgaaggatctttagtacaaaattaccacagagatgaactttgaaggcattactctaagtgaaataaactaggcacaaaagataaatattgtctaactccaattttataaggttttaaaagtatttcaagttcaaaatcagaaaactaatgctagtgagaggaagggggagggaagtcattatttaatggggaggggatttcacttttgtaagtgaaaagttctagaaattgattgtgtgacaatacaaacgaacttaaacagtgccgaagtatatacctaaaaagggaaaatctgatcttatgtgtgttttatcacaattaacgtacattaaaaaccagtcgatatctgtctcagggtttctatgctatgaagagacagcacgaccataacaactcttatttaaaaaaatatttaattgggctggcttacaggttcagaggactagtccattgtcatcatagggacaagcatgaaggcatgcagccgacactgtgttggagaggagctgagagttctgcatccagatgtgcaggcagcagaaagggagagcaacattgggcctggcttggacttctgaaaccctaaagctcacccccattaacacacttcctccaacaaggccacacctcccaagagtgtcactccctatgagtttatgggggccattttcattcaaactgcataacacctaattttcagaaacaccttcttttcagttaaggttacacacaagtaaggatttaccagggcagtcagcagcatctccttcagtgtttccttcccatattccctctgggcccatttctccttgcttttaccaccatctgatatattttattcatttttgtgtttcttccatcagaatttagagagaaactttctatcatagtcatttagaagcaggtcctctgtgctaatcattgtctcattctccttttattattttgttttttgggtttttgttttgttttgttttgtttttttgagacaggatttttgtgtgtagccctggctgtcctggaactctctctatagactatagaccaggctaacctcgaactcacagagatttgcctgagtctgcctcatggtgctgggattaaaggcatttgccaccacaactggttcatgtgtcagttttcaatgataagcaacttataagtaggggggaggaggtatatattttgcctcataagttcacagattttaggccatgatctctaggcctgtggttaggcagacttccacacatcagcgagtgtgtgggaaaaggcaggaagtaaaggtgttttcttcatggctgacaagaaacagaagaaggaagaagggcactggtcccaataacgtcgtataatatgcccccaagaacctatcttactctcactgacccaacattagattctatcgtctcctggcagtgccactgacggacaagcaaggcttgagcatatgggggacatttccaatccaaactttaaccccctttaagtaggaaagaaacaagcataaaccttctactacaattaaagtactttatggctaccaaactacctcagtcagaacttgtgtggctacttatgtctactgttaaaaagaaaatactatgtgcaaaaactttaagatcataaacatatatccctttaatttggacggtggtgtttatattacttaacaaagaggtacttttgaatgttaatagttctgtgaaactctgctcaaataataaagtcttaagatttcatgctatgtaaaggctacaaaaagttgaaatgtgattatatttgctctttagatatttgggaagctgagagactgccattcatatatttaaaaaagtgcttcagaatatacatgcaaatttggcaaatggtgttggttttccctatggtactatgaatttttaaaaagacgttttaacaaatcataggttaatagaaaatctctagttttgtagttaattttccttaataatagaaataaagtttagattaagaagtacatggcaaaatagtgaatttttctttagcactgaagagcagttacaaaggggtagttccaacagtacctggagaatcggtctacgtgaattcctacctaagctattaaggaataataactaaaagatggtcatttatctcctacaatggcctttcaaatgcaacaggaaaaaagcccaagtagaggaaattatgccacaaattttggtattacattgaaaatgatcaacatttaattgttcctcctcttacattaatcacatatctgtttattccggggaaagtggacactggtcccaccaccccacgcactatgtttatgcataatcagccccaaaaggtagagataatagcataatttaattacaaataaagggcctacctacacgttgccatttgtaagcaattcttttgtatagacacatagatcaacaggattatgcactttaaaatgtgaggtaacaaggcatttaaaaataaccaaggtttacggctactgccctgctatcactgactgcataaacactgcaatttagctgaaaatatatggaacagacgggatatttttgcaacggttgaataagatattatgatgccagaaatacagctgtccccaggcagttaagcgctctccattgagtttctttactgttgcttttgagtaggagattgcttggtactgtaggtcactggttagggtaaaggacctcactgaaaaattcatgcacactttgctaacgtgggagaaaaaatagtggtattttggaactgttaattggaagaaggggcataaaaacatgcttttttttttttttttctttttttaataaaaaggtcttgcctggctcttgccgatttaatgtaacaaacccgcggatagtaaaaggtatataacttgacaagctggtgctgccgtcttgtccttcaccgccttttctgcatgatcaaaccttaaattgttttacggacagcccccagccgtagatccgtgtcttcctgggttttctaggctcctttaccactacctgaagagatggaagtcagccagtcctagcacgagatccctgctccgccccagctgccctcttccaacatggcgccccaggaggcgggtcccacatgtcggctccccgggttccggcgccatcgcgttttggttccggagtaacagcggtctaacggccgccttcctcctcctctcgccgccacctccgctgccgggacgcgggcctcagtcggacgatcctgcacgcgccgcgccctccggttccggctgcggtccgggacccgccccttgaccccgcggccctgggcccccctgcctggttggagggcaggcgccaccggtgcacctccgaaacagccccgacccagcccgcggcgcccggccaccgtccccttgcccaccgagacactcaggacggcaggaccctggccactgtacctgccttaaaccaggccgttgctccgctgtctcctcttactcacaaggactacagaatgcttgtgggttctgttttgtccacttttgtaactccaggaccttccgctctctactaattcctcttggccggtcccccaacagtgcatcctctcctagggacactccacacgacctgggcctggttttgggcctgcaagctccctcctgatcgctcctcttcacttctccccatcttcttgctccctatttatcgcctgccttctgtctatcgttccccttgtcacttcttggggctcctcctaagtaggggcaggtcggtacccctcgccccaggatgtgagaccctttaacctgtaatgctgtggctggcccttggccccttctgtgccatggagaaccaggtgctggtgattcggatcaagattccaaatagtggcgcggtggactggaccgtgcactccgggccgcagttactcttcagggatgttctggtgagtggtgactttagtggccaaatcccagcgttggggattatggatctggataggcagcatcttgaccattggtggcctgagctggcctctggtggggtcaacttacctgttttaaccacagtctcggttaattgcactcactgaaaactggtaaatgtgcagcgccctgggaaattgatgtatccgactgaacccctgccctcaggaagctcacagtctggactgtgacttacacaccagtgcagacaactgggatgtaaagagttttaaaactgtttcttatatttttctcaagtatttggaaaggattcctgccctcattctagccctgtcactgctgagtttcctgaacttgtgacctgctgggaaagggacaccagggcaatcttagtttacaatggttaagcaaaccttagatgccactgaatgggagacctagacttaactatcaatatggaaaggatgctgcctgttagaactacagcacatcattccgtgacaaacacagctcaatttcagagatgttgagtgttcagggaaaatttacatcttagaatcaacagtgcattgccttgggatgcttagaatatatttcacacaaaattatgaaggttaatgtaggctggcccttgagtccatatataatatatactataaaacattatgtatgtgtgtgtttgtcctgaatagagagtaaaaggaccttccgaggacttgctcctgaggttgagagtcagtgccaaaactatagcttccttacttagtatatgagtatatgtgtgtgcagatgtgtgtgcgtgcatgtggagatcagagatcagcctcaggtgtgctcaggtgccatccaccttgttgttttgggatagggttggctggccagcaagccctgggcattcgcctgtttcagcattcccaatgttaagattacaagcactcatgccaccaagcctgggccacctgtcaagcacccacttcctaggttttttgtttatttgtttgtttttgtttattttttatttttattttttaacatgggtctagagattagtctcaggccctcatgtttgcataggaaacactttgccagctgagccatctccctggcccccaaatttacttttgtttcctgtagtgtccccatatacttcagtccacgtgcatctttctagtcagttgacattaacagggtgacatatatgtatgtccacagtaactcagcaggagaatttggtgtacggggaagaatgttttaacaggcagatgtgccgtctgacttacagggactataagagaacactgagtggtgtcatttactgccttgggttgataaaaaatgaaatggtggtatctataatttcattttgaaagctagatgctcgtaccaccaaggccatgcttgggtctaagccaagcatgtggcaccttaggtgagctagcagcctccagtctttgaccccgaatggcatcccttctctgcagctggtgctcttcacaatatgcacagtgctagtctcctttcctcataaggccccacagtcctccttgctgtcctcaggctcatcttgattatcctggcacctatgtcctctcttgccacatcttcttgagcatcctgtgtcccaggtgtacagagctactgtcagtactcccaggtacccaggctgtgcctccactttgccttctttgtctggctctcacccacccttccctgccatgcctcactctccctgtgtcagtgtttgccaggtggctgccatggtagtcctatgtccatccctgtggcaaagcatgcattcaggatgatgtgcttgtctattctagaatgtaaacatctggaggagagaaagagctctgtttctgttgcgtcatagcatctgagacttgaggaggggccaatgggtgcttgctgtgtgagcctgaacttgggtacagtccgtggaacctatggtagaaccaactcctgaatgctgtcttctgatttccacacacatggccatggcatgtatgcatccgtgtttactgtttatacacctgcatatataataagtgaaaaaaaaagaaaagaatgtatatcttaaggaccagctgtgtgcaattttaagctgtgcagatcactggcttcttttttggagccatgttggtgtctgccatgttgctcagtctgctctcaagttagctattttaagagggaaccctgggactgctctcctcctgcctttgcttcctaaagctgggtgagcaccgagttctcagtccggcagttggaacttcacggccaggtgtgccactacctcggccagttactgtatgcctgagcctcagtttccttatttctagtcagggacacctgcaccacgtcgtgtgaagattaaacacatagaaagtgctctataagtgttgacatataatgtaagggacaggacctggccttctgcttcctgagtacccacaggagatgtccagcgtggggcctccaggaagcatcgcactatcatcactaaggctcagaaccgcgtgtcgggacagtttgctcataagatccgctggagcacatttgtcatgaagagccggaaaagaatttagaacttggttctgtctggttgctgtttcctggcaagtctgacagggggccacccaaggtccttgtgatctgttctccgatttcacgtcatctcttccatcaagagtaaacaaaaccctaaagaaaccagcatctctgacttggaaccttgagctttaagtctgtggaacttggatgcgtcccttgtctgacccaagccccctctcacactttcctgttttcagatgaggaagcgtaagtagctctggaaggggaggggcctcctagagccttggagctagttggcttacctaacacaaaagccagagggggtttcagccactgagtccagagggattgagtatctgagagcagagtcagagttgaagatccagttgctccttctccacatggctgggagaccttgtgtaggctacttagcttgtcccctctgggcttgcctgtgctctgtatctccaggacctaaatgcagtatgaaggaagccaaaaccaagtgcagagacactgactgggctctctgtattccttcagcctcctttctcttcatccttggagacggtctaggacagttctaggacttgtgaatagaattggattgattagtgtgaggtagaggactaattagtgacatttctatccaagtggaaccagtgactctttcttctgagcgttccttgttgtgacaagattcctaacaaaagccacttagggaagaaaggtttgattttcactcacagtttgaaggttgagcaggaggcagctggtcacattgtctctgcagtcaggacgcatagactacgaaggctgctcagctcctgtccatgaaatggtgctacccatatttaaggtgtgccttctgcctcagttaacatggtgtagaagctcccatacagacatgcccagaggtttgtgccataagtgattgtcagtcctatccagttgacagtaaccgttagcaatcacagtgaacactgcttgccactgagatcttgtatttggctctttttgttactggagtgtttccaggtgccatcttatctcagagaccagattacaggccggctgaagtctagagccaagtcctgacctgtgcagacttataagctcctggcctgctacagaggaggtttgacttctccactgttatgtagttttctgtcttactgagaagaagaaaggaaacaaatacaaaattagctcttaaaggaaactggaattttaccatttatcattaaatataccctgctttaaaatggccagtagagcggctgaggaggcaggcagtccttgtcctctggccaggttcagactttcctctggattgcctgtgtacttaattctgtattcagtttatacatctagctccctgttaagaaacgcgtgctacctgagttaaaggccagcctgatctacagagtgagttccaggacagccaggcctacgcagagaaaccctgtctcgaaaaaccaaaaaaaaaaaaaaaaaaaaaaagaaatgtgtggtacctgtgaatgtgtagaaagacatttctaactctaaatttttgtttcttagcttcctcacaaagtaggtatgtcatctgctaagactagaatcagagaaaacgttttttctggctgatgtgtaagggttgttgttctcccccatcaaatttcttttgcacggatttattttttaaaagaaagaaaaaaaaaagacgctccatatgacgattatgcagattggcaccgcagtaaacactcctaagaactgcctttagaaggaggttgtagcctccactctgtaagtgctctgctttggaagggctgcaggctccctgctgaggctctgtcagctggctgcctggtgccagttcccgcacagcctggtctgcgccatcgctcctggagaggaaagaggtctgcaagtcttttactgtgggactgggcatgatggaggactcttctcccagaacttaggtgttctgggcctcttcccatcagctgttctgaagactaattttttttttttttagtattttcaacattagagactcatttacatattgatattatatacaccttccagggccccctccccccaaatcaacttatatcccagcactattaaatacgtttccattgcttaggaggaaaggttgataagaactgtcttatcgtccttagctgcttatcatcgttgtagcttgtttgctaaagccactgctatgagagcaaggtaccacacttactgagtgtctacaacgggctgtgccaggtcttaggcttttgtttatcacaccatttgacttccacattatcctttcagtgtcactgcatccatgttttgaaaataatcagaatgaggctcagggtggtcaagtaaatatttttcccaggttgtacatctaatagtaaagatccaaagctaagtccctcccccacacatgccacctcccagcctccggtacatgaaactctgtgtgtgtgtgtgtgtgtgtgtgtgtgcgcgcgcgcgcgcgattgtatagtgatgtgcactgttgagttgagaataaaagactgtcttcaatacagtatgaagtttttctaatcccctttctccttggaatagagatttaaactttctgggctaagtgtgattgcaagctcatgtttctgtggtttatgccagcatttcagaaatccttccaagttccgctgtttcctgttggacgtgccacatgttggcaataaagaagatggctaattgtgcttctttattctttctttgtttaggatgtgataggccaggttctgcctgaagcgacgacgacagcgtttgaatgtgagtccggctcgcgtactctccggttctttctctctgcagtgatatttcacatgctttatgggttgtattactttcagaactgacaaaaccaggttatttatgatcatcatacggcacatttaaatatttataaattaatgcaagtttaatgatgatactgaaccgagtaatattttcttatttaatcatatcttgggtgtgcatatctctacaatatagctttaattaccaacatgacctttatctgctcttctcattgttataacagtgcagggcaaaatgagccgtgtaaactacctgtagaccgatgatcgttgattaagaggttttaatcctttagtgctttaggacatcgcagtagaataaagctctcttgagcagcgggtggagtgagtctgtttcagtggggtttggctgcccccatgctagatgacaagggcacttctatcctgactccttccgctctccattgaactggcctagaacagggctaggacgagctagtgttttgacgcagtccaggtcattgcaggaggagtcttggtgctggtttagaagtagcagaaggcctcaggtattgagaaggtaaagtcaacgtctggaattgtggtcttgcccgttttgaaaatgggaccatgggccaaggtgattgcttagtggagaaaatgcttgttatgccattgtgagaacctgagtttcagttcccagagcccatgtagaagctgagcataggagcacacatttgtcacccagtgctcctgtagcaagatatgagatggagacaggagagtccttgtgggatcaggtagccctaatgtagacagcaaacaactaaaagaccctgtctcaaacaagacagaaggtgatgactaatagctgagatagctgaggctggggtcagacctccacacacatgttgagggatgcacacccacactcacccataggaacatgcctgtgcacgctcacacacatacatacacatcatgcacatgcacatgcacacatggacatgtgtgccactgtccaacatggaaataatagtgatttttttccccaggtgacagtgcttttgttcttatcttaaagatgattactggtaaagtgtacgataataatggcagtacagtgccatgtccttgtcacttagtgacaggtaagctgtgcacaatggcagtacagtgccttgtccttgtcacttagtgacaggtaagctgtgtggcacttttgattctgcagatctctcaaggaagctgtccagcagaaacactgaacacccttgatgaagtgtaattcacttgttgaagtgttgcatggtaggattatttttaggtagtaagaaactaaatgtaagcaaaatgcctctgtacgtggactgataaatagtaatgtgtccctgttttgaaggatatagcagcacctaaaatgaacaagtttggagtctatgtattgatatggaaagggaccagcattgatttttgaatggacagtgtatatgggataatcccatctcatcgagtctagccctccttatctacctcatatgtttatagggggacaggatctacagagggcccattgcagtgctttctgccctgggaagtacacatgggccctgggggactggatttgaataggtacacttttcattttatgtatgtgtccattgctggaatagtgttcagtattctgaacttgcttttaaaagctacagtgagtaggactattaattactatttcattaatggcactagaatctccatgctgttgaggaatatatatgtgtgtgtgtgcatgtgagtgcatgctataagctctatttagatttctttcagtagctacagggagttggggtttctggaatagtctgagagtgagtgtttggtattcatactgctgccgggtgagttagtccattttctttagcctttacaagattcccatgaggtgctttgaaggactgctgttgttgcttcagcctaaggaagggcatctctcagaactgagcaacttgctcagatgcatgtaagtgagacctctggagtagattccagaaagtgttttctcaaccactgtgccgggctgttctcagagtcacccagttgaagtgcgtcctggctggctttccttaagcatggcaaggagaagtttacttttccactattttaatctctctctctctctctctgtctctctctctctgtctctctctgtctctgtctctctctgtctctctctctctctgtgggtgcatgtatatgtgcatgtgtgcatgtacttatgtgctcccatcccccactcgggcatgtgtggacagcatttccgtgtcagttctctccttccacactgggtcccagggatccagcgcaggccatcaggcttgcccccacaggcctggcttcgtactgtctaccccgctccaccagcttcccagtccagcgttcataatagtagtactcattgtcctgtcaccgatggtgtgctctgagccagccagtgtgctagatcttttccgttgattcttgctggagcttaataatttttgtagtgactctgcaaagtaggaaaattagacctttgaggaaactggaactcgaagacctgaaatgattgctcacggtgattgctaggaagtggcagagcccagaatcaaaaacaacacacacagtctttgtaagaacatggaagcctctgaaggataaacagaaaaaaatgttcagacttcgaggtttcattctttgatgccgtgttcttgtgtgttctccagcaaggatagcaatgctgtgcctggctgtgtgcagactggctttgctcacctgttatgtcaggcttctctccctttctctcttcctccctctttctgcccttcctcctttccctcccccatctttctgccaagtgctacctaggactgtaggtatttgccctgacatccaactatggaccagctctaggtaaaatagcaagagcaacaacaacaaaatatacacagagagacaaaaataatgacagccattggttgtttgtggctggcttatcctaaccctcggctagcttttctcatgactatttttgagtagtttgattgtctgacccaaaaatctgaaccactaagtggaaccaatatgcaagaaatagtgaagatttggtttgtaggccaatttgctgggaagtctgaagcattttggtggtttgtggatgagtaaccctcaaataaataaaactttatgaaaggaccatttaacactgcagcatgtatccaaccctgactccttacattggagagatggtgtgataattatagagcagcaagaggcagtgcagagctcaaagctgcagcttttcatagatgtaggaagagttagggattgggagctgggagaggttgctgactgactgacaggttgcctgggccagctcttacagggcttgtttctcagcactgttctcagaggggtggactagaagcctccagttacctttgcctcccttactgggccagtcatgtcctttgttcctctgttagcactagttctggagcaaaaccactgtcccttgtggctatattcaaataagaattgtgaaaggtcatgaattagagctaagtggatgttgttctgagctttaggattatctgtgctattgcctggaccttggatgtatttggttatgatggagatgttgggccccaattcaagttgccacacatatgagagggaagagtttacagttgctatttctctctggttttgccttctggcctggagtttccaagggagttagggctgcatgggataggagggagggccctctgggccacagtcagcataggggctggtggtcctaagcccctttctttctcattacccttgcaggttcttctcccacataactagagcacaaatgagtagtatttagttaattttaagtttctcattgtgtgtgtgtgtgtgtgtgtgtgtgtgtgtgtgcatgtgtgcacacgtgtgtgtggaggtcagaggataacttgcaggagtcagttctctccttctatagtctgggttccagggatcaaattcaggtcctcaggcttgatggcaagtgctgccacccactgagccacccagccagcttgctaacccagaagtacttactagcacctactggggtgttgtttgtttgtttggctggtttttaagtagcttaggaacaaagtaaaaagttcccatttgctggtttactgttattaatttcctgagttccttacacactgctgccgctgcctgccccaccctcattggcatacattagacttcttgcaggcattagtgtgctcatgtcaacttcggccttcagctgttgcttaaattatttaatatactagatgggcatgtaaatttttaccagcttttttatctatatattttatgtatttgagtattttgtctacatatccatctgcacgccagatgatggcatcaagttccattataggcagttacaagtcaccatagagtgctgcaaattgaacttaggacccatgggagaccagccagtgctcttaactgctgagacatctctccagccaccagcatttttttttttaagatagggtttttctgtcctagaacttactttgtagaccaggctagccttgaacccacaaagatctgcctacctttgcctcccaagtgctgggattaaaggtatatgccatcactgcccagtgaccctccagcttttttaaaaccagaaaaaaatcggacgtcaacagtagtgactcagattgtttcacactgaggaagctggtgtataatttggatttctaggcatttgaaatcactgtggtaaagagaacctgctgctttgaacgttagtggccatccacgagctttccgtgcagatgggcctcatccacagcctgtcagaaagccctttctccccaccctcaccatctctctaggcgtgagcacatttctctcctgttaatgcggtgggtgcaaagctactgcctttcctcgttatatattttggaagagtgatagtttctttttatctttttatctgcatttactgtctggactattttctgtcacctttgcccacacgtctcttaggctgccttctttctacttgattgcagcgctttccaaagtaagagcattggtccatagagcaagcattggttcattgtacttacaagggtttttgtctagtttgttgttcttttcagcttgttttttgcgctctctctctctctctctctctctctctctctctctcatacagaaggctaaagttttatgtgggcagacttaccatatttccctttatttctgattttgtcatgcttaaaaagatcttccccatcccagggtgcggaaaaacatttacttgcattgcttttctttctgttttaataggagtgtgcacatgcatgctatttatttaatatgcttatttgtggatatcatcaggttttgcttttttttttttttttaataaaaagcatgagttttccaagattagaaggagttgactttactcttaccatctttagcatgtgttggagacagccggatgggggttcagttttatttttcttgtgaatagatagttgatttcatgccaattattgaatactttgtcttttctcagatgtgagactacattctgtaaccataaaaaatcctgtatgctgcatgtgtaggcctaaggatgctgtgggagcttggcacttacgaaggcccagagatccctgctgagtctctcagttccattagcagattaatgagcgctccaacacaccaggtgataaacatcagcagggcccacagatgcgtttcctgggcgtgcctattacgtgcacactgttccctgtatttttcttgagactagtaactattcgcctgatgttgtgggacagggaagtctcatgggccacttgaaggatgagctggaaggccatctagacaaatgctgcctcgtgctcagaacgccatgcatttccgcaattccatactacctccatatatttaggcctgaagccatcccacatcttcatccttgtcaaactgtgtatcacaatttgacttagaaaacatggttagaagataaatgtgtctttcctcagccccaactatttaatttttgaaaaagtttatttatgtattttgagcatagtgctcatggagaccaggagaggacatcaaatccctgggagcttgagttatagacagttataatcagcccatcgtggatgctgggaacggagcttagatcccgtggaaggtagcaagtgttcttaaccgctgagccatttctctacccttctaactcagaagggtttgtatccacttcttattgattaagtattctcagttgttttaagactttttgggaagtttattttgtgatctagatgggaatcttttttaaaaatttgcctacatgtgtatatgtatgtacatcacattcgtgcccatggagaccagaagagggcatcagatgccctggaaccagagttacagatggttgtgagcctctgtgtgggtgcttggaactgaatctgggtcctctgcctgagcaatgagttctctaaattgctgagccatcgcttcaaccttcttgcttaggaacctttatcttattttatttttttgagctcttgattttttttttttgtcatgctttaataagattactaccgggaagatctctgtgcagccttcatgccgcatgtctatagagccttattcctatggactcccaatactatgagtattctatgaaatacccatagtgtatataaaggtgtccaataatatgtaggtccctctattacataaagcatttacaaaaaaattgtatatttaagtcttcagttgtaaaaaaaaaaaaaaaagaacaaaagaaaaaatctccttttgcctagtaaaacaccccctttctgcatagtaaactatcaataatgtaatttcttgctactctgtaattattgatcacttagaacatgagttctttgtttaaatattgttattgtctgaatttcataaagtatctaaatttaagtactctgccacaaatgccccctggagagaagtcaaaatgaacacattgatgccaggcatgtcaaaatttacaatattgggacggtagataaatttatcagctaaggtgggacacatttggacatctaggctggccttaggtacagaggaagacaaaaaaaaaaaacaaaacaaaacaaaaaacaaacaaacaagaaacctctcacaggctccttctttctgtcttcccagacagcctgtctccctgtctgaatgtcctggccttgttacctaggaacctctaagtaaacataccatgtccttattttaagttggacatatatgagctctcatagggagactgcaattatgggagttgtaagctttcagagtgtagaaaacagccatagctgagtgttggaaccgtgcctgtatgagatgcttggtgtctgagcgtcccagtgatactggaaagaaaagaagtttcagtttcttaaattattatattattatatagaaaggccattatttataagcagactaggtagattataattcatgataaatgtacattgagtctaaaaaatattgaacacataaaagttaattgtgcaaactcactgaacctgtcttcacatagagccaacatgtggtctgttctcaaaagctcagcttggataggtgggagtggtgcgcactgtgtctcagcggttcagcggggtgtggtcagaagattaattgagccatgagttgatctcacttgggttgtacagtgacactctagcttttaaggtgggggacaatgacaaaacttggagtatctgtagcttgttaggccaccattaccctcaactatagtaggacagcagctgcctaggtccctgtcccagcctcctcttgtgcatgcagccagggtggtcctcctggaagatgaaatcttaaaatcagaaagcccctgtggcttccatcttactcacgagtgagtgaggggcagctccttcaaaggctgcagccatgctccgtgctgaccccttcttgttgtcacttcttggactccttctttccctctttgcactcttctcttccgctttctcttccattgtcttcctttgtgtcagttgttctttcttcctacaatctctttcccaaatatgatctgtgttgtgtattctcactcagggtgtgtgtgtgtatcatgtgtcatgggcactgcttggtttttgctttcatcttccctgtgcccagatatcacacctgcacatagtaggcacttgttttgtaagaagaagaagaaggaaacaaagaagcagggaagcattggaatactgggggtgaaggtggggtggagtgggagggcaggcaaggaggcaagctcatgaatataaaggtatgtccataggaactatggcctagatcagtaggctccacctctgagaactgctctgaacttgacatcttttctggtaatttcctgctgatgtctttctaacctttacaaccatgtttccatttctttcctgctgttactgtagttctatttgactcccacctggcacagaaggagtgtgacaaatgacacataatatattgcctttacttttctgtcactctttgtggaaagccctcctgagctcctgttgctgcagtaggtgctgtggattccccagtctctgctgtgtacacactgggccattctgagcacccctacccaaggtgcttcttctctctggggcctttatatgcctcctctaggtttccctttcagattgcatgtggcttcagataaaaatcatgaacaacatatggcctgttatgattctctttctcaaactctgccattttgtatatttgtgacacactgcagattttgtaaagattgcttcataatatttgtttgccatctgccgtactctatttggtatcttgctaggatttttgcctccattttaagtgacattaacaaaatccagccagtgcatagacattcctgttctccccttgcctccctaatgtgctggaaaatcatattactatgctccaggcaactagaggagtctgggactgtcattgtgaaccagtgtgtcagatctctgagcaccccctccccccggttatatccagtaatgttattttggtcagatggcaaagaacctcgtgtatcaggttatttttctactttccgccctcctctgtgctacctccttctggagctctgttccagccctttatgcctttagaagtcttggttcccttttagtaagctcttatgatttattactcttatgaattattacttatgatttagtgagtgtagtttttaaaccatcagtacagtttgaaaggcaaatagccagggtgtttgccggagctgtttgaacaggtctaacttttgggttagtagtgttccaggtcactgtctactgagctgctggtagtgtgtctgctttcctgctttccctcgcttcccaggcttgccatttaactggttttggaaagaggtgtgtcctctctttaaacactggggtgagtgtttgtggctgagcctgccatcctagggtcagggacaggttcaatttcactctttggccagcatcacctgaattctcatgagtgtgcttatttttatgtggttatttttctaacccagcttcccttttgacaagaacagggagtcttcgttgaagcagttaagcacggaaattagagggtaaagcagtcccctgagaaaccaagacggccatcaaatagggtctcctgttaggctataagagctattagtcaccatgtcacataagcttgattcttatcaccaggcttaattggaatgctccttttagttggtctgagatctccctcttggagtcggagctcattctgtggatggtgtcagcatctctcccaacccttcttgtcggcttaaggagcatggcttggtcctgtctgttttcatggggtgctcagtgaggagctgctccgctagctgacttccctaggaaaaatctcaagcttacctagaaaccagaatcccagaacccttgtttgaagtagtcttaggcacctaaggctgggtgtgagaactcagagattctctaccccattacatctcctgctccaccatccacttctctctatcaatacttccttatcttactttacagagataattatatgaatggtgtttatggaatttatactctcttatcagaagccatacaaagctcttcacctgcttattattaaactctgagcactcttttgttctattcaaagactgccttcctgaggttacatgtatatgcatgtgttgaaatctgaatatgagctgtccctttgtactcattatctgcacagttagttctggtgcagaaatgagatttgccaaaagctccttcatttttgacaaaatttgagcccagttgattgattatatgtatattcatgcatgtgtgtgcagatgcacatgtatgagtgtaactgtggaggccataggttgacttcacatgtcttttgtttttctctatattttattctttaagactccttctcttactaaatctggagcttggctagactgactggccagcaatgtccaggaattccccctcccccgctcccacgtcttcacctccccagcaaagtgattctatttgcttgatcttcatttttgctttacctacggagtcatcttcccagcaatctttcacttggctttaaagcagaaatatgaagtgccttcgtctgtggtagtccatagtcttagacgcttttatactacctttttttttcttgtctactgaatttcaaagacttccaacttagccttgaatatgttagcttctaagatctgtatggaaagacctttcttttgtttctgatagcatggtgtttctgtctagtttgtctttagaaagtctattttaaaaaccagagtcaggaaaagcagctctttttgtgcagaactctcctggaggtgctgggatttaggaatgtgcccgtttgcacaccagtgtagtgctcctgactcttggctgtggttttcagtagggttcttgaccagtaggggctctgctcagctgtgtggcagagacttgcagatgctgactccctccgtgggcctggggaattctgctgcatgaggcttagggaagaaggcactttgagagctgctggcttcagctacccagggaagtgctgctttccctgcttctgtcaggttgctgctggctactgagaacagaaaggagccaggagttctgcttagtaatagactaactggggaaaagccgactcatcccatggcccccatggctttgttaccaaacaggaggacatcttcaggatgtcttcagttggacaggaggacacgcctgttggtatgcagcagaagattatgagcattgaaacaaatctctctgttctttcagagctgtgcaaacatattctcttatgatgagatgtcctacttgcctggtttggaataggtacttctagtcaaggccgtaactatatgctgcgaacagaaatataatggtagcaagtatttggattctgagcatccttcccagggtctacccaccccttctagattgttacctgagcaggctgtggtcaccacacaagtgttttaggcatttttctttgaactatgtaattagagcttccatatcagctgccaaatgttcctgcctctgttaaaattttgttattatattttattcattcattcatttattcattcatttattcattcagtttgtgtgcttgtctgcctatgggcatgcatatgctgcagcatatgtggaggccggaggacagcttctgagcattgaccttctcctccacagtgtgggttctagggattgaactcaggtagtcaggcttggaagcaagtacttttatccactgagccatcctggttaccaatgtgtcctactcttgacagatgtttttctttagagggatgaagtatcaagacagttaggaataaccagaagtcattctgagtctagcctaggaaaagatgtgagtggtgactcggccaacaattctattttaggttaaaattgagatctgctctcaagaggtctctctttaggttcttaaaagcagcttttaaaactaagagaattactgcaatgagcacattacttctagatgtggcctccttgctgcttactcagatgtgcacattctggttatgggtcctgcagcctcaagtcttaaaactgttacattattccagaataacatgcatcaccatctgaggcttacaggtcggagcagtggggcaaacgaaagtcttcggagggagctttgcaagttagggcaaaagatgggagcccaccatgtctcctgtaaagcagcaataatcctggtgtccacattgcagggttgcagtgtggttcttaaggtggtattgcacatgaagcacaagtcagagcaccatctgggctgccgtggttagtaagtgagagacatttcctcctgcttcagtgatgcgttaggttgcctgggagagaggaggaatagagaacagggaatccggtgctgcctgagacataaatatctgatggtagagcagggcctctcttctctcaaaagctgacgtgtcagaatccagttaaatgcacttgacttacatatatgtctagaataatagggaaatattttgatttttcacctttcttataaaagaaaattttagttctttctttagcaagggctccaactccttttttagcctaggtgagccccgcaatcatgtgcacacacccctcaatacacagtggacagtaaccgtgtatacacatccctcatacacacagtggacaataatagtgtgcacacacccctcacatacacagtggacagtaaccgtgtgcacacacccctcacatacacagtggacagtaaccgtgtgcatacacccctcacataacacagtggacagtaaccgtgtgcacacacccctcacatacacagtggacggtaaccgtgtgcacacacccctcacatacacagtggacggtaaccgggtgcacacacccctcacataacacagtggatggtaaccgtgtgcacacaccccctcacatacacagtggacggtaaccgtgtgcacacacccctcacatgcacagtggatggtaaccgtgtgcacacaccccctcacatgcacagtggacggtaaccatgtgcacacacccctcacatacacagtggacagtaaagtaaatcttcaacaaaaaaaaaaagagaattcgagtcttactgctttcatcatattcatttttaaacagatgaagatgaagatggtgataggattacagtaagaagcgatgaagagatgaaggcaatgctgtcctacgtaagtgtgctgcatatgagggctgtttcaaaaaatgcctttgtgtgtgtgtgtgtgcgcgcgcgtgcgtgcgcacgtgcttgctcgcatagttcagatgacatctcgcaggagttgtttctctcctgccaccatgtgagttgtggggatgcagctcaggcgtcaggcctggtggtacgtgctcctagctggtgagccatctcatcagctagcaaacaaggactgtttttaaagactgttaatgtaattgaggatgctgtttcttgggcacagtggagatagaaatggaaccacagttgccacagcatttttatgtgtaacagataaggttttcaaagatttccttatgtgaaagttaggggcattattttcaaaagacacttactgatcatatcatgaacattaagaataatgcatcttaatgacttttgcattaggtatggtgcagactaaatggactatcaatttcctgtattttttatgcagtacttaaagtaacggctcattaaaaatgaacccctgggctctaaaaaatttttcaaaatctacttttgactggagatgtctttcacccttccagacttcagctataacatagctgcaggcttgtggatgcaggatttaaagatgtactcctggttgttttatgcacttcttgcaccttaaaatgaactcacccacagtgatctgagtgtgtgtgttgggagcttgctttggtatctcaacgttcactgaaattttgaattaacaacttgtcccgagactaaaataggtgacagaaacggtacatttcaaatgcttcagaaccaattgagaaaccttcataaacaaccaaagacatatagcttccctgagccccagtttgagctttcctcccaagttttattttaccttagtaatctgattggaaaaccttttctgtgttctggtggcaagcaccactctagaggggagccacagctctgctgtgggtccctggcctaaggcagatggtttaaccttcagtatcacagttgcctcatctgtcagtgtgtggtgggtaatagcacatgtccttcctattgctcggggttgtgtaatgatcaaatggatgatagatgtgaaacgctgtcacatgcaaagtattgttacagtggacacgatggacaaggccagacatctgcttttctcagagactctaattgtagccaacagttagggtgtatgttttggagagcccttaacttcaaccaggatattgtttcatcgtaatgaaaactgtaaactgtctgtgtgggtttccgccaatagttttaatttagggtaggaggaaagagaacaagagggatggcatgattaacagagcattgcattcctaccagcccagagtaggaaaagtcaatttcccattgacttcccattaacttatgtgggagtctttgtgtactgagaatttagagctgagatcatcggtacgtggaaggcagagcgggattgtctttgccagggcagcattgctattgatggattggctaactctcccgagagcgtgactcctttgtttttagagaacgcatgcacacagacacagacgggttctggttttctaacctaggtctttggcgttcagtggacccccatataagcagagtggacttcccagaagaccttacaaactgtgcctggtgaaagagttctgagtgtgaccctcgtgatactgctcacctttccatttctgagtgacagatgtgtaaactcagagtttgaaagacttttttaaattgacttttacttatttgtgtgtctgtgtataggggtggcaagtgtgtgtgtacatattatgtgagtgagtgcaggtgtgagtgcacatggaagtcagaggatgaccttgggtgtcagtctttactgtctgcctgtttgagtcgaggcctctttgatgtcagccactgcatgagccaggctagctggcttttgggcttctgagcagtctgctgtctctgacctccatcctccatgctggtggagctctgggaatatgggcacagcgaccacacctagcttcacatggattctggagaagtcctcatcctttcatggcagcagcttccccactgggccgtctcctcggcccttaaatagtgactcactctatggtagatacaagcccgagattaaacctggatgctcatatttcctaagcatgtgccccattgctgagccaccctttgtcccctcatctctgtttggtaaatggttgagagacatgcccaaggccttaaagctatattgaaagttcagaactggaggccgtgaagacagatggctcagtagggaagctcctgctcctgccaaggacctgaatttggttctcatcactactttgggtggctcacaattgcctataactatagtccaaggagatttgacccctccttctggtctgtgggtacccacatgcacaaacccccacacagacatgcgcataactgaaagtaaattttaaaaagaaagaaaatatgtttggcctttaatctcactgttttcctggttgccactggaaactcctgctgggaactgtggaaagagcatcatagaattcgaatgatttgtttatgcaatatcttacttgtgctctctgcaccatacattcctaataaattattcttgtttgtttgttttgtttttttgagacagtgtagccttggctgtcctgggacttgctctgtagaccaggctagccttgagatctgcctgcctctgcctcttgactcatgggatgaaagctgtgagccaccactgaccccagctttatgcatgttttttaattgtagtacttagtcaattttagttgtagaaacatgttagtcatgaccttgttgtcatacagcataaccttgtaagacatgtccttaaacatagtccctgagatttttttgaaagatacctcttggtctgaaaataacacagttgcataattggctatccttttggtctgtccccattcttttgttttgttttgttgttttttcgagacagggtttctctgtgtagccctggctgtcctggaactcactttgtagaccaggctggccttgaactcagaaatccgcctgcctgtgcctcccaagtgctgggattaaaggcgtgcaccaccaccgcccggcatctgtctccattcttatgactggaagttcttctgggcccagctctgtcatagagaaccgtgtggatcaaactccacagtcgtgttcatcactagtcttcaggagcacccatcgaatactaggattttgcattggtatttatttattgatattttaaatatcttattaaattttcttttcctttctttctttttttttttaatacaaaccaattgcagttggtttccactccctccctccacttctcccagtccctcccttccctcccagatccactgttcctccatttccctttcggaaaagaacaagcctcccagggagagcagctaagcacagcatacgaatatacagtaagataggtacaaaccttcacatcaaggctgggtgagtgaggcaatccagtaggaggaaaagcatctcaaaagcagatgaaaaagtcagagacagccccgcccccactgttaggagtgccaaagaaaacaccaggctaacaaccataacatctctgcagaagacctaggtcagactcatgcagtctctgtgaggccctaggagctctgcttggttgattctgtggtctgtgttctactggtgttcttgacacctctggttcctacagttcttttccctcttcctctgggtttccctgagctccaaggggaggggctcgatggagatttttagcattaagtacttacataaaaaaaattggagcaatcttatactagaaaacatacctgaaagctctagaagaaaaaaaagtacgggcactgtggtggtttgaatatgcttggctcagggagtggcagtatttggaggtgtggtcttgttggagtaggtgtggccttggaggaagtgtgtcactgtgggggtggactttgaagctcttataagagttgctttgggaaggagttacagagacaaagtttggagctgagatgaaaggatggaccatgtagagactgccatatccagggatccaccccataatcagcatccaaacgctgacaccattgcatacactagcaagattttatcgaaaggacccagatgtagctgtctcttgtgagactatgccggggcctagcaaacacagaagtggatgctcacagtcagctaatggatggatcacagggctcccaatggaggagctagagaaagaacccaaggagctaaagggatctgcaaccctataggtggaacaacattatgaactaaccagtaccccggagctcttgactctagctgcatatgtatcaaaagatggcctagtcggccatcactgcaaagagaggcccattggacacgcaaactttatatgccccagtacaggggaacgccagggccaaaaagggggactgggtgggtaggggagtgggggtgggtgggtatgggggacttttggtatagcattggaaatgtaaatgagctaaatacctaataaaaaatgggaaaaaaaaagagttgctttggttgtggtatctcttcgcagcagtaaaaccctaactaagacacacacccaagataagagagaagatggcaggaaataatcagacttggggctgggatcaataaaataaaaacaaagagaaaattacaaagaataagtgaaacaaagagttgtttctttgagaaaatcaaaaggatagacaaaccgttattcaaactaaaagggagagagaatagctaagttaacaaaatcagacacaaaaaagaggacatgatagatagatatccaggaagtccaaagaatcaggatgccatactttcaaacctttacttttcagaattggaaaagctaaaagaaatggataattttctcggtatttttaaaattcaaattgaagtgctgggtgtggtagctcatgcctttaatcctagcacgcaggggggagatgtctgtgagtttgatgctagcctggtctatgtagtgagttctagtccagctcaagctacacagtgagacctgttcttgaaaataaacaaataattaaaaaataaattcaacttggctctgaaaaggatttgttgcagagtgtggcggcatagggacatcccgctagagttctgctgcagttttatggtaataacaaggtacagcagcttcggctttcctagggaactgggtaaaattgtagtcactgtgaggcatctgaaggagctgaagtggagatgcttcacctctgtcctttaatcattttcttctactgatgacaaaatgaagagagccaaaactgtgacattggtgtcaaagcttgctgaatcatccccctccccccaaattggatgcaaggattttctggctttaggccaacacaaacctaagtttttaccagtaatttaaatagatttttgtattagacctgaaaatgttggctttttaattgaaaacttatcaattatttaaatcactagcagctcgaggctgttaattttatgagtgctgtaataatggcatacagtggtttttgatacatgtgaggcagtgagggtgcgtcctggcagctggctgtgtgtcgctaactaaccagcaacatgctgaaggctgccgtcgcacatcaggaccatttcctataagttatttagaagttgtattcttttctccattcgatatatttttaagagataatgagaagaaaacaaagctataataaattgtcttttaagaaaatgtaaagtaatttggtctccaaggagatatttaatgtattgagagacttcagcagccaagtgttattacagcagcatggtgatagctctctgcattttgttatgagtttgtgttaatcaacaatctgtttttatagcgtagtttcttgtaagttattctactagaatattccacttctgggatcatggcttctcctctgacactattgtatctttttaattcctccataaagtatttttttaattagaatttgaaatgctttattagaaaagcatacaacctacatattctgaaaactaaatacctgatcattgcgaattatttaaaggcccctgttaaatattcccttaatgtagtttaaattttgttgtttttcttattttcccatcttattttttagagagattaaaaataggtgggtgttgttctcctgtagtctgttgtattgcagtgtggcagtgccatggagtctttggtgaagggcttgtaacgctaacctcttcctttgggtggcctttcactgagaatacaacagcccactgtaccgctgtgaaggattgatatttagttctgctcagtcctgtgtctagcaaaggacgtctgtgcatcagattcccacactcctcctaggcttgtgtgagtggagcagagcactgacaagataagtcttcctttctcccattctctctctcttattccccacattgccagaagcgtacaggacgagctttgttgtagtgttcccattattgcagagacctttgtttccatggagtgtaagtattccctttggtatacttgaccactgtgtaccttgttagacagtgggtaccgtcagggggagcactctttgacctttggagcaccatgtaaattgggctataattatatttaccgtggtcttcataacttggagactgcctctaaaatcgtgttaacttgagtagagcaggagggcacctcagaggtctcgtgtgtgccttcctttcacaggtaaacacatgagcctttgacctcggcttcagaaatgtgttaggggcacagagttggaccaaggaggcctggacagagactccctggccgccatctgtttcaagtgtgtgttgtgttctggtagctagtaagttttactgagaaaattttgtacatactacttttttttttcttgattatttttaactacattgtttatgcagattatggtcttctgaaaattgaaatttcttggccaatttttatcacaaaatatgctgtccatttgggtattttacatataacaagtaaaccaaaagtaattttgttttctcatcctattcaagatacacacacacacacacacacacacacacacacacacattggtgagaaaataagaagaataaaacttattttcagagctagatcatcttactttttctttctgtattatcaaggacattttgggggagggggtctcttgaaatagagatgaaaatgctgtggcttcttctttttgcctaccttgtggcatagctggggcatgcccggcatcaaaaggggatttgtatgcagctttggaagaaagggaaacacagtaggctcagcctccaaaactctggatctccgctacagcttgagtccccagcattttgacattggtattgtttgttcatacttgatctctgtggagaatgtaaggagcgtatttataagggaatgtcccatttggcctgctgtctccatggccgggtagtcttgttatatcgaggtggacggcctaagtagcagtttagacccacctcttcagagaggaaagcagaagtttgaggtggcaagtgagagattagtgtggacactgcccacgctcatctcgacgagactcaggcttctgctgagaacacttgaacatattggacccattgctttgctaatggaattttctactaccagggcacactgcattagctaagctgaatctcacctgctgttggcttctcacacttctattaagaccatctggaacttcctaaagtcctttataattttgctagccaaaacaaatggtatcattactaaatgtggtcaacttgctattatgttccaaaacattactaggtacgtgtgcgcagtggcattagcctggaagcggacttagagttgttctctgttggtcttttcacagaaaacctgtggttttctttctccttatcatctcagaccatgaccacctatggacccttgtcatagagtaagttaggaacagtctccttgacgcagagctgtgagttgttagggaaccaggggacctggcattcttttaccagaggttcacaccaggctacatagcacctatcatttcaggaactctaaggattccctaaaggtctttgtctgttggaaggcgtgtgaagaagagatcgaggaaatcgccctgaataccgaagaaggccatctagcttttgtccgtgaggaagttaggaacaaggttcagggagactgcttaatgatgactccccgacctgatggctccccatttccttcctgtaagcaactgcttggtgtttgcataggtgttatgtgtaggcaccatccagtagttcatgaaggatatggaaatccaagggtttcattcttttaccagaggttcacaccaggctacatacatagcacatatcatctcaggaattccaaggattccataaagcccacagagagcccaagtggctaaacctgctgtgaaagaataaatagttgaggcctggctcctgccctcaatgagcttctggaagaacacaccacagtcttgtgtgcacctcttactcagggtgttattgtaatgctgtagggatgaggacaagggagggctgctgacacctccggggagacagagctaacccggctctgtagtgggccgagcagttgagcagccttattcagagctttctgtgtcgcctgctgtcagaaacattgtttttctgggttcagttgcttaatggtaagaggttcatagtgctgtgcctttttttttccctaagtactttatagaaggtttcctacgtacctttttttttttttaattttgatcttcctagtgactttatggtgagtgaggcaggtaatctccccattattacaattgactatttggacacaagcctgtgtgcctttccttaggtcacaactagtaaacatggctgcagccaaggcttacttgttctgtgattcactcactcattcacctactcagctagattccaagagccaggatattctgggtgataccacactgaccaaggagcatgcaggaggtgtgcacggtgatgtgcaatccaggtcctcccctcctctcaagacacaaatacttaccttccatgctgctgggcagcagcggagagaaacccagattaggactgtaaagccaacccttaccaggcagaatgacaagtgataaatgctggggcatagggtgcctgtgaatacggaaaagcactgaatccatctttgaggaaggacagtggaggcttctggaagaacttggtgtcctggtggggtggacagagcccgtgggactgggaagggtgttctgggcagaggagcggtgcatttaaagctttagaggcctggggaattcgggagaagctgcttgagattcagcctgtagggataacaggagaaggagggtgtgtgggagaagagttctaacacacagacatagtgtgggctgtttcagaccaaagacagaggtggctgcaggtgtaaaagggcaggagatcttgtagaggtcagatgtgtgaacccaggtgggcaatatggaaagggaggtggccagggccagtccaagccatctgttagagcacagcatggcttggtaaactcaggtggcagaaaaccagactagagtccaagggagggtagagaggcaggaaatgcagtttttgattgtagcatgggaggaggctctggtcaaccaactagatatgctccaaatctgagagagacatctaggctggaaataaagctttgtgactcggcaggctccagttagtctccatgactcctctggtgatggagacctggggaagtggggcaggggatacacagtgaaagggagggtgaataaggagccataggggccttacctccattaagggctcattctcaggaactagaatgaggctcgctgaggatgggggtgctgnnnnnnnnnnnnnnnnnnnnnnnnnnnnnnnnnnnnnnnnnnnnnnnnnnnnnnnnnnnnnnnnnnnnnnnnnnnnnnnnnnnnnnnnnnnnnnnnnnnnnnnnnnnnnnnnnnnnnnnnnntgcagagggctttgtgcccttttctcagccagggaagatggctgagctcacacactgtgggagcaatgaatgcagaagccagggctttctgctagctcagcagtctgcttggtgattctgtctgtttagttaaaggtttggcggatatgctacccacctactttttaattcttaaatagtaagcacgtgtttcatgttttaagcattgaactagaataaaacttttttttttattgttcactaataacctatgcttattggtaagccatttgtctcacctattaagcagttgattagggtagatgtatgggaaattagaaaaatgtatgaggtattcagtattgagtccaacatgtacaggcatttgtggggctgagggttgtcccccttcatagagaatctaaggcttgtaatattaaactgtgttgttttgaactcaggttgttgattttcttttttaatatcatagatttccattaaaatttgagttattgattgaattatgctgttataattagaattgggttcataacaaatagggacactgcttgataaacttgcaaacaaaggaagcaattgtacttgttgtcctttgctgaatctggccttcctttggagattaattatatttttggataactacactaaactctgccacattcttattaaaactgttaagggttttaaagaacatctcagagagactctgaaaccgatccaagcctggtgctagagattccattagctatcgtaaaactgattaatcttttacctggttagcatattgattattgctgcaattactgcttgtaatggattatgggagggacagctgaagcaagcgcactaactgctgcctgtgggattcgtttaggcacctgttctatagtttctgtatgtaatctgcgctttacatgcgagagtgcacctaaggtaggaagtgccaggctaagtgttgctgattgctgagccttgggaggtgatgggctgtgtggatttgagcgtatgaagtccttcactcatgctgctgctgctgctgctgctgctgctgtttagcctgggatttcacagtaacctgggtgataaggcaaacattctcactctcctttggaagccacgatgcctgaggagattgggtgactttctgagggctgtgcacagtagtgattggtagaatcagggtccagccccattttagtcagtacacacttcacaaacacctactgtgtgtagatcgtatgttgaagtaaaaatagctaacatgtggtagatgaccacattgtgacttttctgttcaactcatgttagctgtcttggtgtctgaggtctaggcttctctgttaggacttgctttttttcttttgttttggtcaagccagagtcttgtctctgccatcactgatgattttattactatttagaacaaaatgggagagaataaatgaggagaaggatgcaaagacagagggccagacttcattaaaaccagtggtttagttgtggtctttgctatttctctgtgaggcttacagcactcctctggctggaatccatcttacatcccagcagagtgagatacagcaaggcaaggcagcattaccccactggtgccatgggtcaggagacagccagtgtgaggttcccagggatgggccctccaggcctcgagcgcctttatcattcacctgggcagcaacagacctagcagcttggcagcctcgtagcctggtgagagtgctctgtgccaatgtcctgcacatgccccgcgtttttcccttgcctgtagggagtgctacataggcagcagcggcccacaagctcacagtgggttcacaccatgggcttggttgctacccagttctgtgtgtttgtccatctctagcctaatatgtcagcaggggaaaggcacttgagtttgagagagctgtaagaaagtaaaagtaaagccgaattaactgtttgagagaaaagtcttaatcagcacagtgtgtatcactgcagagggactctgttaatcatagtacggagagctgggtatacactgcctaaatttttcacagtggttacaaacatatatgcagttttccagttgatttggcacagtgctaagatgaaagtgaaagccttttttatttattttggggggtaaataaataaagctggaaaacaggtcaatttcatgcatgcaaggttttatagtaggggaaaggcactgcacctgtcctgaccctcacactcgaggttatttgttctcagacttgaccccgagcacccgtttcagacaattctataattagtttgttagataaagcataaggatatttttttcctgatttctaggaccatagcaaagtagaaacctactgtacatagcagttaattaaagaaaagcagtaactatgggcatggccacagtgctgtcttgtatcagtataaaaaggcagggatttctttgacagccactgattggaaagttgcttgcagccttccagaagcaagggtacatgctgtggatcaataaccggcaaatttcccattaaaaagaatacctgagcaatgttccaaatagccactggcatcttaattttccgcagaaacctcaagtacttgtgtgcctgccgaggacaagtcattttcggacaatttttccagactacttgttaacagttattgctgtcccgaaaggttgacagccgacatgattgatatttcacttacctgtcgtcaccgtgtgagtaatggcaagtgcactgtacttccttgcttttcgggagcagcctctgtggccctagtgtattccaacatgatttgcacatttttccgctgtgcgtatttaagtttttaggtccttagaaagagagaattgccttcctttacagtttgaaagccattgcaggagggctgtgtgcatcttggtcatcagccagctgtccctcctgcccctgccaccacggtcaccttcaccttccttgtttgcagtgcagaacagaaggccttggctttctcagcttctgatcttcacagtgatgcagaatattcagacctttgcatattttggaggaaaaagattgattctaaaataaccttaatgtatataacaccaataaaaagattccagtttttaaaatttatttttattttatgttcattgctattttgtcaggtcccctggaagtagaattacagatggttgttagctgccatgcgggtgctgggaattgaacagagtcatcttgaagagcatcctttggaaaagcagtcagtgctcttaaccacaaagtcagttctccagccccaagatagaagggttttttagaatgttagtaaaaatcaaatttcaggaatttcctgaaaatgtcgtagttaagtggtatgtgcatatttaaatataaaaacagcaaaaatgagaaatggggagagagtgtcctgcttttgataagcccttaaagcacaaagtcagggcgggagagatggctcagtggttaagaacactgactgcctttccagggaactggggtttgattcccagcacccacacagtggctcacaaccatctgtaattccagatctttttctggtctctgcaggtaccaggcatgctagtggtggatatatgcaggcatacacataaatacccatacacataaacaaataaaaaaacaattttaagcctagtcagtggttttcattgtaggtatttttcttcatgaacattattttcttgtttgttcagcttaaagaagtataaaaaggtacagaagccatctccacatataggcagataggtggagcaggcagtgttccaggaaacagtgtgcttagtattttgggcttattttatgagggacagtgagctgttgttttactcaagaccttatgctttatgtgcctagaattttacagtaagctttgatccatcttaaagtgtgcctaaagccaaattacgaatcagaaggagacttgttaggagactgcttttacatgggagttctgctgtccttggttgagtactatgttgttcactgggcccagcagtctcttcaacttcagtcctattagctctgtgctttatacacaaatgtgtgtgtttgattgactgacatgtgaattcaagccaaatattgagcctattcattttgctttacaaatttcagaggaaaagcacaagaagcaatttgagtaatttctataaaatgcttttttatgatttaaaatatatatcattttaaagtatgttaaatactaacatggggtcttagttaatactgttagtcttaaagataaatggtggtatggacgataaccccctactagacttccaaatcttgaatacattcactgtagcaattttgatgtgcaactagagacactgtgtactcaaggctgatgtgtgcataccagccatttacaagagtaccatgaattaaacagcccgtaagtgtctgtcccagtgtccatacattactgagtaatctctttctattatctctttgcagtattattccacagtaatggaacagcaagtaaatggccagctaatagagccgctgcagatatttccaagaggtaatgttgaacaaattctaatcaacagtgattatttcagcaaactgtttgatcaccagctatgctttccaaaggtttaaatgcacatagcatgatgtttagctcataatctgaaaaaaacaaaagaagtattcattatcatgggggattgcaagctacattatagttatagcagataaaatatctaatctactagagtaaattaaactaactagattgtttttttttttttgaagtgcatacttacattcgcttaaagaactctttgggagtccccatgattctaaagcaaggcagatggctggctttagttctggacttatgacttgtggctcataatgatggtgaaggctgctgttgagatgagagctgttagcttgtgtggaggctgtgagaaatggggctcagggacagggctttgggcagagcttgatatttgtcttgggatgggggaggtttttaaaaactaatggggccctcttcttcagtggcagttgatttacatgagggcgagactaagtgaatccctcctttagggtgggcagtaccagccctgtacgggctgtgattgttccttgtgtaaatatcctctcaaaatttgaacagtagtgaagagtgacttagttataccaaagtaagtttttaaccattatttttgccccacttgaaatccatgttttctaactaattgaacagaccaggaaatcctctaagtaactcttctagaaatagcttaattgaaataattaaaagttaaactcacttcgttaactaatactgtacagataatcatggtatgagttttccaattaaacattctagactttcattacctgtaactcagaagtttgaatggctcaattaaccactgggctctattgtagggatggtctcaaaggcagttggcttggccagctagggaggagatccgggttcaagtgcaatctacttctttgggcatttgcgtgggcagtagaaccagggggattatttcattattagtaagaacttaatggagggcaaagtaaaaggataaaactgtgctacttaagatcagtggtcattcaaaagaaaggtatgattaatcgcgttctgtggcgcttgactgaacaggcaaacagagaggctgccgtgcttttgtagctgtctcctgacagtgacccagattatttccttgttttctctgtgactttagagttggagcaaacttaaaaattatttccttcacaaagaatagtgttttaccagctgaaaatctctatccattgcttctgagctctgttatggcaatcccagagaatctagtcaccaggctggagggcttttctttatactaaacagtttccttctctccacaggaactcttctcagttcagttccctgtcactgtccaggcagtcttgtcagcaaggctgttcctgtgctaaaccccctgatggtggcagccattctgagacctcagctctccttcctgtccctcccagcagttccacagttaggtttttctcctcccgttgtatgggctcttaagaagcctgagagctataaagcaactaagcatttagtatactgcgagtgagaaggtgacttaaattacagtttgtttcttgggaaaggcatataacgtcaagttctagtgggtgtgtaaagggagtttgaggggttttgtgcggtggtgctcaacctgtagctcacaacccgtttggtggtctaaacaacccttttacaagggctgtcttagttatgttatgattcacaacagtggtaaaattacagttatgatgtagcaatgaaaataattttatggttggggatcactacaacatgaaggactatattagagggtcgtagcattaggaaggctgaggaccactggtttagtttaatgctataaagacacagctatgacatgctgtgatcacttcatccctggcataactaacccatgtggcttaatatgcattgaatgtagtctctccaggccacattgagaatttcaaaatggtagtccatcccccttctcggtgctgtgactcagatcttttgggctcttttcgattgtcttgtttggtacctgactacctcactacagatgtagatgcccccatgtgatgaaatacatatttgttcaggttatattttataatattttaatacggactagagactcttgggaagaaggagtctcagttgaggaatcacctgtctccattagactgtcaggttttgacttctgattgatgtctatagtgccagccctgggtatactatcctggactgtattaagaaaggtagctgcccatgagtctggaagcaagccagtgaacagccctctatggcctctacttttgttcctgcttccaggtttctgccttggcttccctagatgatggactgtaacctgtaagctagaaaaaaccctttcctccccaaggcgtttttttggtcgtggtgtttatcacaacagcagatgtgcatacttggacagtgtagttagaatgtgggcatggtaaaaggttccctgggtcttcctgattggtgagaggctctcaagccctagaagggtctgtgcctaggccccatgtttaaaagaatctttaggctgagcaagttgttgggtctggagacaaagattttactctgatcacatatcctcctcatttcaaggagcactgttgccttgaatagcattccagtcttagttcatggccaagtcttccctgtggctcagagctgtgttaaatattaataagtatgaaaattggttagcattatagtaagtgccttcttaacttcaggatctatgaggttgctggggttttgaatgcgacatggctgtttagatttctagtcacaaaggtttgatgggcagttgagaagcaagcagtgctgaggttagagaagacagctggaggccttctcagaccttggctcacccccatttgcctgcacaggttaccgcagaggcagtcgtctgagagaatactgaggcttccagggctgggcgtcagaagaaggcagccgttgttttgttaatctgtattttaaggaaagaagatttggaatcttaatatattaagtatcctatacgcttaaaatataaaaacatttattcatgtttatgtatttttggaatattaatgtaataaattcatttaaaatatatattcattttattttctgtgtatgtgtatgcctgtgtaccatgagtgtgtgggaactggagaaggtcagaagagatgtttgatcccctagaactagggttagaaatggttgtcagtcaccatgtgggtattgggaacagaacctgggtcctctggaagagcagccagtgttcataaccactgagctgtctctccagccctaataatataataaattcaaatttacttgaagctcccaagtgaaagtgaaacccataccttgtaattataatgcatgtcttcttaagcagcttgatttctgttgtcaagaaacaaaaagaaaacaaaatcaaattcatccttctctagacagagttgacagccccttaacagcctgctgtaggacactctagtatttgggcagaattggtgtagaacagggatagggagctcgtgtttgaaacgtgattacgaagcacctgctggactagaaatatctcactgtagcccacggtggtgctgggaaatccctgtcagttttcctagtcctctgttaccctcagagctaagtattcatggacatgaagattttctggaaacctcattaaattatatatctgtttaaatagtccagttgcttatggctttacaagacttgaatatacgcagacttgcatattccatcttggagttcccagcagtctttttggcattcaagaaccctttctccacccctccatgccttcaaagcaacaaaagcagaagcctgctgtttagcacgccctttgactgccttgtgcagttctgtagcgagggaagactgcagacatctgagccacgagaggaatctcatcattctagctcggctaatgttttggtgtgttttaagcagaaattggaattcatatgaagtggtgtcagaaagctctgtgcatttataaacactcactcctgcacgttaaaaacccagttcataattcccaccttgggtctgggggccacttttcaatcatttctctctgctaattttggtgtcaccctcatttctttttaaacgattcattttgagcaaatttgtaaatggccctgatgtgttctacaatttagtcaattactgtttcagcctgcaagcctcctggggaacggaacatacatggcctgaaggtacgaatttcaataattgtttcagtaaagttagatggatttgtaatgctgtgttccacttattgaaatgtcaaataaaactgcactttctcaagctctgacaagcaatctttctcctcttcccccgccccccattttcgagtggtggaggtggaagggccacatctgtatttgcttacaatgtgtatgtacgtggatcctggcctttggtgctgtattttttcaatgacttggagttgttttgttggtcagtttctccaggatgatcctggggtctgttgtccattaagattgatttgagtgagagcacagccttccttgtggtgattaattaagctcgtaagcatattgcacacaggctgcccttcctcttctctccacatatttatgcttggaaaacatgtctagttaatgtctcctcattgttctgcatgttttaaattctgaatttctgctcaaagcttcacatctgaaagaaaaggtggctattttattaggctcgagtgttttataattaattacttgaacctcattttctagtgaatgggatgcagttgtagagcctgaaggggtggcatcctgagggttgctactaataccagataagagcttactgtgcttgcatgggcagcctgcctttatgtcactgtagatagcaacctgaggtcggtctctctctctctctctctctctctctctctctcctccctatttaagtatttgaataatgccagggatatcagattatgcaatctccagattgtacacttctgtagcatgtatactgaatatactccagcagtgggtctgtctagcaacatgctaattaaccttcatagtgagatgagcattgtgtgctgaattataggctaattagaactgtgtcctcagaacacgagactgacccaacttctctcttcacttataggtgaatacacgggctgggccatctcaacacaccagccctgtggtctcagattcgcttccaagcaataggtaaggacaaacaagggacgtgtgctctgctgtgctcctctgtccaggtggctgtgggctgggaagacgctggtgcaacacacttgtctcttctgtaagataaaaagaataggcagctgtaaagaaaacttgagtagctagatagctcttgctacatattgactgcagagaaagaagacttaatatagaaagatgaaattagagacacatgagatggttcagttaataaagatgaaattagagatatgtgagatagttcagttaataaagcgcctgcgggcaagtgtgagggcctgagtttggatccccagcacccatctaaaatccagatgtggcaccgcatgttcgtgactgcttctggggaggtagagacaggcagatcccaggagctcactggtcagtcacctagctgaatccatgagctacaagtgcagtaagagggcctatcacaaaatgtaagactgtgactcattaaggaagatctcatacatgaacctctggcttccacatgtgcatagatatgtgtacacactccctacaaacacacatataccacacacacccatgcaaaatagataaataagtaataaagattcaaagatgaaattgacatgtgaaatagttaattctgttctaagcagtttttcccgagtctccaaattatttatatagcctgtttcaagtcttgatccagttacaaactgtgtgattcttattaagtgtttcctgcttgcccatcttttgacagtgttattatctgctggcatctttaccagacagagtcaggggaagagtcaaatggtgacatttaactagaccagcagtgctgctcattaatggcatcttgcattgtccaggagattaaaacgactgtatcaagaagatcgcttttgtcacttcatgctagcgtcaccccactctgggacagatcttaagcctttcatagtcttcttttatcccccaacttaactgctacaatatggcaatgcgcaggtgttcagttagcctgcctgtagacattcctcaccttgtgatgctgggaggtgcttgctctgtattgcagtcacagtgcggctggaaagctgacagaaccacaagagcttcttccatcctgcactgaagggccctggctttggggcttcagtcagtgtgtgcacagcctttaacagggtgaggtgcagcttaggcttctgctttcccttcacatccttctgtcttcctctgtgcagtcttgggtctttacctgtgggtttctggtttgactctggcttacagttttggaggttgagagtccatcttgcctggcccaggcagtggtgaggataccttgtcagtcactcgcctcatggtggggacatgtgcaagagtgagtgcacctaataccggagccacagactctggtcctatgctcctgctctcttctttattgtctttaattgaaacattttatatgtatgagtgtttgtgtgtatgtattagtatgtaacatgtgtataccactgccccaagaagccagaagtggtcggagctcctggaactggagttactcagatggcgatgagcctccatctgagagctggagaccaaaacaggttctctgtaagaggagcaagtactcttaaccactaagccaggtcttgcttgtattttttttctttaatttttgagactcttgctatctagctcaggtggaaatcaaacatagcagtccccctgcatcatccccccaagtgctaggattactggtgtgtgccaccacactttctctacaattccaggtgacctaaggtccttccactaggttcctcccccaaggctgcttccctggatactttactgtggtatcagtatctacccaggagccttcctgctgagaacacaggctctaaaaggcatctcattaacagttggttccatcttaaagtacagttagctagctagtcaccagcatgtcctttgcctggtcttgtgggggaggtgtttgcttctccacagagggctttggacctgccagattctggtttgcatgcactgtctccatactgcctggacatgtgagccgcggtcttgcagactagaggcgtataaatagaggactgcatgctcacagagttcctggcaggcagaacggttcactggggccactgatcccagaaaagatgatgtgcacacagatggccaatgagccctgggaagtcaagctttcccctggtattttagattacacttttcaacagaattgaaaagatttctctctctctctctctctctctctctctctctctctctctctctctctctctcttctctctctctctctctctctccttccttccttccttcctttctttttcttttgttttttttgtttttgtttttttttttgttgttgttttttgtttttcaagacagggtttctctgtgtagccctggctgtcctggaactcactctgtagaccaggctggcctcaaactcagagatccgcctgcctctgcctcccgagtgctgggattaaaggcgtgcaccaccaccacctggctgaaaagatttcaaatcatagaagcagtgttactttccctacaagtgaggattagcttggtgtaaaaattgtcatgtctcttcatggagtacagtaagattcttggatcagatggaactttaccacctgattatctcacgtttcatcttggtctcttcactacgggatatggcagcctcctagcttgtaaggatagtggttcctgtaatggaagaatgttaattgaaaaagtcctatgggtgttttaatgttaccctgcattggccatgttctgtgccccaggttgaaagctaatcagcagatatttgttgagtatctcttactcattagttgctgtcctaggagtatgacgtgtcaatagtgtcgtgagggaagcagatacatgcagagagaacagtagtcaggaacatgtttctgtttgaactgaatactcaccgctggctccttggggaacgtgattgcttccatgtagacctgatgcacaaggaggaccaagttacatcacaatacagacatctcagctaaaggtgaatgtttgtgtacatgtttgtaagtaggttgatttggcaggagcacaaggataggtgaggggtaggacaggggtgtaggagttggggagagcaactcaagtgctggaagggaaggatgcagatgggagcaggtcatgtggggcttggaaggcccatcagtgcctaccgttcttgtcctggcctggagaccagagagggctcgggcagcacagggcaagcaaagcccagtgttggtagaaactgtctgtggggagcagaaagagggcaaacacaacctaccctgcccttcttttatccttggcccccgttctttgccaaacagacatctgggttcttcccaacaaccctaggcgagggatgtacttcctgggtcaaggctacccttagttttcatcacatacatcttaagaggttcttcctttctgagctgggatttgtcactcttccacacccacttgtaaagattgggttttgcaccaaaaatgggactgttccttcttcaagttagctcttccttgtcatcttctctctcatcctaacagcagcctgtaccttcccaggagcgctacatttgcccacttgcagcatccctttggctgcacaggtgctccagagaatctccacagtctcctgtcagtctcctctaccttagctgggacatccttactaattgtattagtctcccttcactataatggaatacctgaaatagtgacatagcccattttgttaagataaaaagtttagttaacttttggggnnnnnnnnnnnnnnnnnnnnnnnnnnnnnnnnnnnnnnnnnnnnnnnnnnnnnnnnnnnnnnnnnnnnnnnnnnnnnnnnnnnnnnnnnnnnnnnnnnnnnnnnnnnnnnnnnnnnnnnnnnnnnnnnnnnnnnnnnnnnnnnnnnnnnnnnnnnnnnnnnnnnnnnnnnnnnnnnnnnnnnnnnnnnnnnnnnnnnnnnnnnnnnnnnnnnnnnnnnnnnnnnnnnnnnnnnnnnnnnnnnnnnnnnnnnnnnnnnnnnnnnnnnnnnnnnnnnnnnnnnnnnnnnnnnnnnnnnnnnnnnnnnnnnnnnnnnnnnnnnnnnnnnnnnttgggaacttctgagtgttcttatgccctcaggatgaagtgagacccccgcctcccacaggtctcgagtggtagagtttgccttaggtgaccgcacactgcagccttgctggtgagcacgtggtccctctcactactgagcctgtgcatctctctgctgctgcctcgttcttttcttcctcaccttctctctcaatctggctaaccttaactatcttcacggaccaaattgccttcttctttaccaaccaccccccatgctatagtaggtaccccgtgtggactcctgtatcttgccctgcttcttttgtctgtagcagggagctcattggagcacaattatctcggtgtcaggcagtgactgcagtgtacccactgcaagcccgggcatgaggtgtggtacgccatgcttgctggggtgagtgagtgactgtgtgtatacttatatccacattcggatttctctcagccttctttcaacttactctgcatttatgacatcatttctagtccccttacctcgtatttctttttagtttccgagacagcatcttgcactgtagaccagacatacccagaattcacctttcaatctatgttcaccttgaaaccagaggagtttttctgcctcaatcttcagagtgttaggattgtagatgtgaacaaccatgtccaactctaccttaacagaaactgtgggtgctgtgcctgtgcaccatgtgcatgcagtgcctctggagcccagaagagggcatcagatgccttgaactggagttacaggtggtcatgagcctctttgtgggtgttgggaatggaacctagatgctctgtaagaacagccagtgctctcaacccctgggccatttctctagcccatggccctctctttttattcttttatgctttggataaaagctggatgacgctttttggtttttcatgccaagacttgaaactaagaccccacccgtgttaaacatgcgctctacctccgagtgctgctctcccttccctttaaactagatttgcaaggctggatgctggcatgtcagtgggatcagtttcctcctgttactttcagtgtataagtcattctttggcatgggggaatgaccatttgttagactgagcttattaacccacatggtgttcctaggtcataattactgattcaagccccactgctgaggtctttctaaacagcttggctttctccttctgtaaaatgaggatgattaagctctctgtccgtccactggtagcataagattgatgaagctctgttaaggaatcatattttgtttcttggatgaaagacattttgtaaaggccatgaatcaaagtgttattatttaagcttatgacataatggactatctgtggagagaccacagtggaagctctggttggttgcttgtgtctttacagtaagcagaattatcaaatcgggagtcatttatggaaatacaaagacttaactatttctcagactgtgtgtgtgtgtgtgtgtgtgtgtattaatctgaatttagacaggatctgtgtcctttctctgtaagttaggaataataagcatacatgaaggagtgtagttcttgtggaggcacctcacgaggctacagtgtctgccattgctcagcattcttcaaatgagctgcatgaccaagttagtaattggacaggttctgagacagctgttcacgttttggtatgcactacatctttagttccagtctacaaaattcttgactgttcccctgggctgatcagcctctggagaacgttatcagcctagaatccttaggtgaaggcatagtttagacagttttaaaaagtgtgggaactgaggctcagtagtctgtgttggaccacagcagaattgtaaggagtatttagagagaatgattatcagaaagctagcttgagtctaagatcatattgaagatgccatgtggaatgccagtgtggttcagattaggtcctgagctccgttcctacttgacatattttgctctttatgtcttctcatgttaccactacacctgccacagagtaacagtagccaccatttcttgaacacttagcacttggttgttcgggagcaaggaaggaatagagcatgatagaatgaggtgaggtctgtgttctggagcttccagtctctggtgagagtgtaggggaggaaagagccacactggcaatgagcagatggggagtttatctggcagagagagcatagagtggacagttaaggatagagatggccagcttcacatttcaaagactaggagttggggaggtactgttcttttaaaggttgtttatctatctatctatctatctatctatctatctatctatctatctatctatctatctatacgtccctctattcatccacctatctaccttcctatctgtctatttttggaaggtgtgtccttccgtccatccatccatccatccgcttgtgttctagtgctttaactgcttgtgtgatgtccgtgcaccgtgtacatgcagtgcctacagaggccagaagagggactcagattcccctagaactgatgtttctaatagatgtgaaccaccatgtgggttctgggaacaaaacctgggtcctttgaaagagtatctagtgctcttaatcgctgatccatctttccagcctgtgagatggtattttatatcccttgctactcagtctggtggctgtggaggcttaacctcttgtaagtaaagcttgagaacttcggagctctttcttaagcattttcactaaacaggactaagctatctgcagaaatgtttgcataatgtattatcttctgctattgtaacaaattcctgagctaataaagaagaaaggcttattttggttcacagtatagagtttcagtccacagtttggtctcactgacttctgcctggtgcaacgacagcatttcacagtggcaccatgtgatggaagaagctggtcacttcctggtgagagaggcagagaaaggtaaaatcaaagcaggtagatatttcacagtctctgtggagagcacgccccccacaaacgtaaacatcctactaggctgcactgctcgaagttagtactgtggtcagggcctgtgggattcactctaactaggtagcacatagtcatatatgttccgataacattttaataattactatgtaataatggaagctgagtctcctagggaagcaaaagaaagagagggcagccttggtttattatttgactaataaaactatgcctgtagtgtacatgcagcgctgtttggtaatgtgtcacttgtctggttacctataatacagatatgctgcctattttatagaaagagtaattgactttccaagaggagaggtaatgggtcccaggtcccatagctgctgacaatggttactgtatgtttgtttccaggaagttaagtgcataactcttatctgtagtaagagaccagagcgtaacctgtctatcataagatgtttgaagtgctgtcatctttgctgcctgagaatattcttgaaaaagcatccagtgttttgtgcatcacaagtgtaaagtcacataaagtcattgtggaggtgcttccgcccctctccgtagtctgcttcctaactctggagactccttgggcttctggcctccatggatcctttggcattctaccagttacttaacaacaacaacaaaaccttcttagaaaaggcatgttttagtctggagtattattattattattaattgttagacaagttctcatatagccaggctggcctccaactcctgatgtagctaaggatgaccttgaactgcttgctgtccctcttgttcctcgggattacccatgtgtgccaccacactttacctggaactgaggatcaaccccggggcctggatgtgtgctcagcaagcagtctgccacctaagccacatcctcaccccttggtctggaatttgcagtagtattgagaggtgttggtgaccttgccactgacagtgtcatttctttgcagcttgaagaagtcctcagctgaactgagaaagatactggccaacggccaggtaggtattgttgcatactaaactccagagtagcactgttgctgtctgtccaaagtgtagccatagtgttgaatgatgaagagtctgcacatttcttcttgtcataaatgaatgcctaagcttaatttgattggcagaacaatctgcagcacgtttttcaacctgagctaatgggttccactcccagcagattgaggcgctgtgcacacagccacactgccatttcagtttaaagaagccaatcagcttggaacaagtcgtcatcccgtcggtggctgacagggccctgggtttggaagtgactgtttctttcattatctctgggggcgaaggagaaaactgtgactttccagccttagcttctcttttgtccagagaccagccttggcttttatggggactgaagccagatcggtcagaccgtgacacatgtgtccctgggcttcagggaaccttggtttgacttgtttattgggccatctgaaactgaatgacccaacccagccagggaaggacaaagaggcctgcgagccactgatttttcactaattttgattcaagtaaatggacacttctgaaatagtatagtacttttaaacattcactggtgaatgaagctacctacaggggctgcagttcctcagtagcaacataaatgcgttttcatgtttgttacagtgaagccctttgatagccttccaggcagcggctgtccattgcgatcaagcctgcctattaggctctattgactgagacatctgtgtcactgcaaataaaagactcttattgattttcttaactgctgttcacttccgtccgtgtttcgaaggctgagatcttaattatctcagatgcttattcagtgccttcgcatgctgacctctccaagcctcgttggcatttcatgaatcaaagacttgtagtgcagcatgtcaagaggacaaagaggggtcctcacgcgtgtcctttaatagcacctgtaacattgcacctaatagacgtgcgccctaaaacaggactcgcggaagaacttctggaagcatggcacacaatcttttgaagagttacaaaaaattgagttgatctggttctgacagtctgtcagtcagtgtgtgtgagctctagttcttaaatgttccacgtacagtggaagagaatctggcatggtgttgattgtgtgtctaattctggtagtctcaaattctgcgataggctgtgcttgctagggatcaaacccagctcctccaacattttgagccggtgctatatcgtcagcctccaactgttagatagcatttaccgacacctgttaccttgaagcaccaaaggtgtgcttaggctgaggtctggctggctcccctgtgcctggttcacactggcagcagtgtgaacaaaagctgggacactgagccaggccgtgtgcagacacatgttcagcctgcttgcattctagttactaattacagtttatggacaagtcacttgggtttctcagctgtaaaatatatttcaaaatagacataaattaagaagttttaactacattattcaacctaggcagtggagaataagtagcctgtcatacagtcttctttcctaaatgaaaaacacttcatgttcactgtgcgcacgcatgcacacaagcacgcacgcaccacatcagcattctgaaatagagccccacaaatatcagagtagtgttatgagggtctctgtagtggagattggcacagcaatggttttgacacttaactattgtttattgctttctcttggggatgtgctaaccccatagtaaacaatgtgacagattttttttctttttaaaagaaagcttatcttgtgtttacttttgctcaaaaataaatcagtaaaataaataaataaataaataaagatgagagacaaggaagggtattgctccctcttaagctttcagaacacctgcttgtcctcggccctcccttggtgctgtggagtaactaagcaagggtgagattgcattgcagtgaagtaccgagggtggcgtgggcatcagtaaatctcacggatgaacactgacaccgtttgctatggaaggtgtaagtcacatttaacgatacttgaacacttgaatgtagttttattttagtggtttaactctcaagcattaataatgatttgccttcccactagcctccacttagatttcataaggaattcatattaatcattaacagaaagggacatgattcttcaagataatcaaatattgacaggttagaaatagctttctgcctgggttcattgatataggttatgtgatataaatatttatttcttttctgtcactcagagtaaatgccaccaattgattcagcattgatagagtgtcaacagttcataagaaacatttgactggcttgtgttttccgattagtctctgctctataaagtgggatttactaaatctccccaattgtctgctcatggagtgtgacgccttctgaaaccattattgcttcgatttgtgaagcaaacgtctcatgctaggactcagttctgtcaggcttttacatataagataggattcattgagcatttttattttaatgatttataagcgatgcatacttattctctttaacacagacagacaataaacaaagaacatattctttgctagtccataattaaattccatttggctgtctccattaatttcattaatatgttaaatcaagaaccacttaaaagttttcctttagtctttggtacagagctgttcttttcttggtagtgctctttggtgggagattccagttctcccgcttaataaataaatcaaaagctatttgggccctgtctttctgagacctctgactcagactcactgcagtatttttagagtatgttttccccgctcagagtccagtgtggcggcgctgtctgtctaatgttgggcctgggtttcaaattgccttggaaagaacccagagggtcaattcagagaattttataaaagagccagtagtcactccacagacctatggcttttacctcagtgtctctaaagtggtttctcttcaggttaacactctgagaagtcatactggccagtccctttcctaccacaccttcgttgtgtctagaccttcagatgcctttagaaaactcctgggagtaacctgggagggtaggaatctgctgtaaaaactatctttaaaaacccagtcagccccagcatagtgcactcttctccattgtgaagcctgaggcagaaatgaagctccaagtgagtcagaactgcagagtccctctttctgtccagacacagccaggcctcagtgctggctgctggccctgctgctttctcggccctgctgctttctcagccctgcttctcttttaagcagaatggaggagtcaccagtcattcctgtttgtggctatgtagtgactgtgactcctgggctcgctcttcctcttccctcatgtctgttattttactactgctttgcattttacagttaaaaccaagaaaatcaattataattaaaaactagcatcttcttcgagttaataaaaaccaatctcacatctgtacagtttgaaaaccatgtgaggtatgtgtgaagagaaatgcatgcatgtacatgcatggcattgtgcatacacatagaagtcaaagatcggctgaactgtccccctctattgctgaccactttattttttgagacagggtctctccctgaaccgaaggtttgctgttttggttagtttgcttgctagcaaactctgaagatgatctccctttgcctcctggccctgagggcacaggtgtgtacctcggtgccccactttatatggatgctgaagatatgaacacaagtccacatgcttacatggcaggcgttttgccaaccagccatttctctagtacttgagctacacgttttgtttttaaattttccttccttagaaataaatgaaatttcctttgaaaattgcctttcggtcagtggtttgcctgtctctgcacaatgactgttggcagtcaatgtccccacactgcaccagagacagagtgttgatgttgaactagagtactgattgacaagttataaagtgacttgggttcaatggcctaaaatgctatagaactaagcttttatgatacttggtcctaactaccctagtcacatgaatccctctgtaggcttaggaatcctgcctccattnnnnnnnnnnnnnnnnnnnnnnnnnnnnnnnnnnnnnnnnnnnnnnnnnnnnnnnnnnnnnnnnnnnnnnnnnnnnnnnnnnnnnnnnnnnnnnnnnnnnnnnnnnnnnnnnnnnnnnnnnnnnnnnnnnnnnnnnnnnnnnnnnnnnnnnnnnnnnnnnnnnnnnnnnnnnnnnnnnnnnnnnnnnnnnnnnnnnnnnnnnnnnnnnnnnnnnnnnnnnnnnnnnnnnnnnnnnnnnnnnnnnnnnnnnnnnnnnnnnnnnnnnnnnnnnnnnnnnnnnnnnnnnnnnnnnnnnnnnnnnnnnnnnnnnnnnnnnnnnnnnnnnnnnnnnnnnnnnnnnnnnnnnnnnnnnnnnnnnnnnnnnnnnnnnnnnnnnnnnnnnnnnnnnnnnnnnnnnnnnnnnnnnnnnnnnnnnnnnnnnnnnnnnnnnnnnnnnnnnnnnnnnnnnnnnnnnnnnnnnnnnnnnnnnnnnnnnnnnnnnnnnnnnnnnnnnnnnnnnnnnnnnnnnnnnnnnnnnnnnnnnnnnnnnnnnnnnnnnnnnnnnnnnnnnnnnnnnnnnnnnnnnnnnnnnnnnnnnctcagaaatccacctgcctctgcctcctgagtgcggggattaaaggcgtgcaccacccatgcccggtggtattatttatttgggtattactatatagccttggatagcctctaagtcattatgtagacaaggctggcctcaaactcacagtgatccccctgccttttcctccctactcctagtactaaaggagtgccccgccatgcctggcagttttatttatctgactttgtgggtatggctgcatgtctgtatgtacaccatttgcatgcagtccctacagagaccagaaaagagagcatcaggttcttctggacctggaggaacaggtgatcatgggcctcccagtgtgggttttaggaatagaacccatgtcctctgtaagagcagcaagtgttcttaaccactgagccatctctccagccattggtgttttatatttaatattataaaaagaaaaaagaaaaaaaaagaaataccatcaattcattttctgggcaaagacttgtataccttgaaacagcatacatcgtttcatatggatgtcgtcttttaaagaaacacactcttagagcctgtaattcagaaccacctctgtgtttatggtcttgcatagtcttcctcattgtctgggggattccttagtttcatcttaatctttagcactcactcatatacacatgcagcatcaggcttcgcctcccttgacttcccacccacctccctcatgagcctctaagcccctcccctataatatgaccccatttccctaatgaggctgacatgcatgatactggccactcctcttttgtgagtactgctgtgattataaatggtcagagacacccataccttgtcctttgcctatggggaggacctgatcacaactgttagcccagaggctctgtgttataggcctacttcccaactgcccttttatctcagtgctgcaaattcagaatttgtggacttgaccaggtggaattcctctctcctagagatttacttcaagccacagtgagaatgtatcttgttaggcaagttaatggcgcaaattagtttgttggaggcatgtttagattacctagaggaatgctctcagggaattggcttggtggcgggctgtacctgccagtagacactgctgtttatgaacccttcatcaatcagagtgaagcaagcagcaggcctgctggcatagcatctcagctcacttcctgggctgctgttgctaatgctgttggaaaaggtgccatttaagtccagagtaatgtggctttctttccttcatgccacatcttttctacagggtaaaatatcattttattatattagtagtttaaaggtcacggagaacaaagttttcctcaaatagtgaagcagttggcaattgttctgacttgtctgccagcatttttccactgaccttaaatattgcaattagctgattgtaaattgcatcaatcaggtagtacaacaattaaatctggtgctgaattgacccttacacaggagtctgtcgatactcttttaggaactggcaaaatggcttggcaaggaagctgtcgcttttgcttgcaccacacacttaattatcacagtcctctgaagcttcaactgcagaaatgcatagaagaaaactatttcccttgataaatgtagctcttgctttattcagttggtgggagtttagaacagagcagatatttaaagctttaccataataatggtccaaaagcaaactattattttccaagtgatattgaattaaggactccatccattttctgcccaatgcaaggtagtgcaattccctagaaattgatttttttcagggcttcctttccctgagccttagatatgtggaaaagaatacctttattaaacctacttggtgaataaagttggcagttaatttttatgcaactgtaccagtgcctaaagaattactgaatatatcaaatggagtcagattagccttaaaatcatttgataaatgattatttagggagtaccttaaagacttaaaaacattactttgtgggtgcttacacaacttacctgccagatacaattacaaagaagagtggtgttgttggtataagttttgtagaattagaaaacatgatgtcttgtacattaagttacaggagtagcattagttgatattacacacatgctcagtgtgttctctgtaggcctgtgatctgtcatttaccagcataatatgacttctattcagcttttgctatgcactaatttatcctttgcaaagaaaagctctttctactctaaaaaaattataaacattatttagttagtttgttcaatgttaattatagggtcaccagaggagtttttggggannnnnnnnnnnnnnnnnnnnnnnnnnnnnnnnnnnnncacacacagacacacacacacagacacacacacacagacacacacacacagacacacacacacacacacacacacacacacacacacacacacacacacacacacacacacgttagttctgcgccatgctggagaccgctctcctatcagtatctctgacctgacccttctgagctatgttatatcattccattttgacaccttttatcaaactttaatgaaatgacccaggcaaacaaattgtcattaaactttccatcactttgtcccttggtatcgtcttttataaattggacagcaaatgttgtattgatcctctcgttcttgcagctgaacttggaatgacccagcctgcttgttgtttatggcccagagttgctttccttgacatttccatccgcagcatgacaccctttttgtttttctttctttcctgtggagatgaatgaacaagacatacggtatcgagacacccttggtcatggcaacggaggcacagtctacaagtgagtagtcattctgtctaaacttgctgtttacttcgccaagtggtggggacccagggccctcatagcagaggtttacatagcaccaccgcttaggttttatttccacatttgacactggaattctgcaagacagcttcaattttctcgggaattgcctgaaaatgcatttatattgcctttttaatatttctgagtctgcatctctcctgggtgggtggtggctagtccccattagcaggtgtgcctgaagtttaacgtgtgctcgcctttgctctttaaccatcactgattattagttttggaagcttgttctcaccttgtgctggtccctcgcctgctcacagttatgcccagtggatgccaaactttataagtgccattgctgtgccctgtgctgacactgttattaaaacgcttcttcctgttgtgcttcctgccctctcgtgtccccccacccccaacccgagagagtccctacacacactgatgaatatgttaagtgagaaagctctcccaaattccagttgcggcgatcttaccctaaaggactgttcattttcatattaaaaaatgctaagcataaaaaacagctctctcgacagggaagtccctctcacggcagtgcaaagtttaaactacataatgtaatatgtggcacttaatagtctgcagtggtgtatgaaaaatattccactaggaattaacaaatccatcctctgtaagaaagccctcagggtaacagagctttcttccacacacgccagccccacactgcactgggctgtgctttgaccgtagctactgtaatattaaaaataattggggttataaaagaattaatttgtattctgattggatcctcgtaagcccagcacatccttgtgtactgatgctgccttggcatggaactggacatgggatgaagaagtccataagtcgtctgatctagctatctcctcagcctcagtccccaggcgcagcccggctgcgagtcctccccagaacataggtctttgagaactgaagcgggcctccacatcacgtgcacaccctcaatcccaacactcaggagccagaggcaggtgggggtttgtgagttccaggccagcctggtctatataacaagttcctggaaagccagagatgcagtgaaaccctgcctcaccatcaacaaaaacataacaaacaaaccaacaaaacactctttagttatgttggtcagtcctcaggatgctgggtcaagttgattgtctgaggtcagtgtaaacttaatgatgtgttaatggccagcatatgcaacagtgtgtggccatgactcaaaaaaaaataaaataaaataaaaacaataaaacaaaagcaaaagaaaagaatgtatgctcatcttttagattatttttcctatagacagtttaataagataaattgttggtctgaaattaagtcctgccacaattagaatcagagacaaatttgctttggggctagaattgaacctaggtccgagggttcctggaagctgtatcttcagtacagatgttaagaatttaatcatctaaaaaaaattaatcatctgtataattgttataggaaaataaaaaagaagggactctacagggatgtctaagtaacctgcccacctccccaaaggacactttcaatgtgagattacactactgttgttacaaaaatactttaatcatgatgaaatataaaacgtattatcataaccattttctataatttttttaagacagggcttcactgtgtagccctggctgacctgtatcttgttactcagaccaggccagcctggaactcacagagacccacctgcctcatcctctgagtgctgcgattaagaagagcgtgccccacatgcctggctttgtaagcaatttaatgtgtggtatagtggcttttagtgcacttctattcagcaggtgccggcagcccctctgctatctgtagaactctcctactcaatattctgccaaccctcttacgctacaaaactggactagcaatcctcttattgggacaggcatgtccaaggaatatttcaaataccacagacccttttagctgcatgccactctcagcttctcctaagggttcacttagccaccatcgtctgcacttaccgtgactgtcactgagactgccactgttactgttgggacagcatttgcttctggaaagtgagggcagtgtcttgaaggtaaactactttaattagtagatttctcataagaaacttcagggatcctattgcctacacagttctgttatgtgtattttttgttttgaaactgaatctgaccacattggccatggttctaaattccctggtccaagcaagccttttgccttagcttcctgactgtagatgtgtatcactgcagttggttcatatctagttcttaaggagagtgtgaagtggtccatggttgtgcctcacttctgggttttagtgtgcaatgttcttgtaaccctggctttcagtcctccacagagcagagctacagtcatcaagagctgagagtccactttcctgaagtctttaaggaacactgtgcaatgtgctgtggttgggtttctcttacaccaagtttacttttatagtgtttactataaaaattgtgagggttttttttttttttcagaaaaaaaaatgattatgttaggggctatgctacataaactagatgaagaaaatattggaaaatccactcattggtaacaaaactgcctaatgggtctatttaatttttttccattggaagtataataaagctactaagtgcttatcagaagcccagtgtttcggtcttttcgcttcgcttgctgggacattgtaaatctcaagtgatgtggtgcctcacggagctgcagtgtatctcatttaatagttggcacattttcatcttttcagtctggatactttgctcaactggcagtatgtaaactggctgacatctggacctggtggtagtgtggattccgtgccctgtcctgtctgagccattctctgtgttttcctaagcaggtggttttagttggtatttttttgtattactaatttgaatcataaaagaaattgagatttgaagtatagcctaagtgtagcaagaaaacaagtttgggaaaagaatatgggtttgttttcattactcccttaccccaaggcctgtctctgagaaacagtgtttttacagaaaagacagactttatttcctgattcataatgtacttcaaaaattctgtggctatagcaggcagtatgtgctgtagttaagtatgccccatgtgaatcgacaatctgtatatagtttcctacctcagcctttccctttgtagagtggggaaaataatagtacctatcttttcagattgctgcacatttaaatgagatgatccacagaatgccgagcccttggcttgcaccttccatggtggctgctggtaatgatagtactgacagtggacactacttaaaccctcattttctgcccttgggtggccatggggaaacagctataaaactaatctcagaatcatctttggactcagttagcttagagaggtcttcactatgctgcatgttatattttctctaattaatcctacaaataaaacattattatatcatattctgacactgtgcttttctgaatgcttcacagtatttgccgtgtatcacagtttgttttcaggttgtcccagagtggcttatatagtgtgcacctgttgtgccaatggaagtgagccaagccagagctccagcagcggatccttgtctttcttttttcccttctgtgcttttccctaggcagcactgtttctcaaggtcacaccttgtctcttgtgttcctctgtgtcctagcatcctaggagcagcgttatgaactgagtggctaaagtaagaatgagggcaggagcggcgggggctttcaatcaagttctgtaattgcccccttccctgtctctccagcttcagaggttgcttaatacattcagaacatttgcctagaagggggttcccagaccaaggatatctatgcaatgagtagttctcttgtaggtggtaagactttgatgacatagcatctcctgacctagccaactggtccctgtccccttcctttggatggtgtgtgatgttgaaacctgagtggttagcaggcacagtggctctggacacaccctctgctcccagggccactcagggcctgctttggatggagctgctgagcccaggcttcagaagtgcaggatgcacagtcttggggtcacactgggctgcctgttagctaacagttgcccaagtcaccagaggctcatcatttctgggtttttgtttgtctgttttctaatgcaagctctttaggctaagtcttagattgatcatgagttccagtctttaggtattagacatcagtagtgaattttctattccagctccttcctggggcccagcgtatgggtaaactttttagtgatacaataggtagcatatattccacccagatggtgtttaaaggattgaatatttatcattgtttaagatttttacctagagaaaataagaagaagagtaattctcaaagggttggtttctgctgtttcatttattttaagtggtgttcatgaagccctgggctgggaacagtccttgagggaggaacaaagatcatatgagtttcaaagtcttcttttgcccctgtgatatgactataaaaccaactaaaataaatacgtgcttagaagctgggattctaatagatcattatagtaatgtggtttctttattgaaaaacagaatctctgatgggcagttacataaaatacataagttacctaatttaaatgctgtttagtaggcaaaatacttcaaaaccagaggattcctgaaaacatagcagaactggccttgatggtgagagcgcagtcagtgctgagggcactgtcctgatgggcagcaggcatagacacgagtggtctgtggtgacatcgtagtcatctagagtagtggttctccaccggtgggtcgcgaccccttctggaggccgaatgatcctttcacagagtcagtataatttcatatatcagttatcctacatatcagataacatgattcctaacagtagcaaaattacagataggaagtagcaacaaatataattttgtggttgggtatcaccacaacatgaggaactgtgttaagggtcacagcgttaggaagcttgagaaccagtgctgtagagtgtaagttggaggtatctttcccagtatatgcacaatctattatgtctgtataacgctaaaattgcctgcatgcatccattgttgagtgaggcattgaggttcactctgggcgaattgactattactgaaattatttatttagaaccacgtgacaccccagaagctttgacttccactctcgccagccagcctgcacatgtcagacgaaagcagtgaccctgctctttcatattccccccaacctgtatctcgtatattaaaagtagtttttaaatggtcttgatattgacctgagaggcagggggcttgtttgatttatcttgaccttaaatttccaatgaaatgaagagcgttttctttgcagccaagatcatattttaaacaagcaacaagacatcctcctaatgtaaaattaaatacttacatatggctgggttgcgttatggtatcacttggcaagcagggatattaatgttttcagaaaaatcaatgagtatttgtcaaataaaattaattatgtatgtgtcccctcttccctggcagcccttacggttctgggtttgtttcctgcagtcgtgtgcactgtgctgctgagatgctgaagatcagccctgtacctgggcttctcactctatgccttcccaccgtggccccagccctccctctgtacatgcgcccatatccattatggcaatgatagattattggcatctcaccaacatgacagggtgtcacaggtcgctgagcagagactttcagactgtgtttccactcgaattaactattattgaaatagtttattgagattgaagtattgatcttttcccccctctaaatgtagcttaagggaaggaagaggaggcagtggtgtttttgaaagacactaaatttcatttttaaaaatctcatttatttagccttttctttttcctgttttatagcccctatagttttattgcttggaaaagggtatcttggctttatttttatgacagtataattatacttcagaaatgcacttgattactatgggtaacaaaattgttctactatattggtttggccaatattgctatacaaacaacttttcagtcaattgagcctggtaaaaatcaatacattatggtaatatttcaagtaagaagttgctgaatctaaatgttttaacacattctctttcagggaaaaataattctgagatagcaagactttttgtaatattttatgttaatgaaatgctttgtttatggagaaatttaagtccccagcgagggtgtttatgcgcaggtgcaagctttacgttagcagcatccattagcagacttgggagggatgctgctccataggctgcatcaggtgaaatctgactgtgaatccatcctgtagcttaccctcttggcattcttgaggggatttttttctgccattaacttgacaaagacttgagttcaaaggacaaatgtgggcaggtaatacaggcctggcagtgtgcctctgtagactttcatttgttgacctgcaagttcttagcatgcatggtgtcaagtgccccatgtcctaagagccatgagtcctgtccacaggtgacacaggatctcaggctagactgtgtactctgtgtgggcctccagctgtggggtcatgagagacagaccaggaacagcctcatgaaggatctgaaacttggtagagttggcttttactcagtgtagagaaagtaaatggctccatagaagtgactgttgctgcacctggacagtttgctgtgttctaggctaatcgcttgtctccagtatctctctgagttctattctctccctgatgctctgccatcatgtggtcctttctgcaagctatttgtgtctgggtcatcttatagcagtcctcctcacagtgcttggcatggtgccttgtctatacgaatcaccaagagctttcaaaaccaccctgcagaagcagagccttcacacagtggtaatacaaggtggtgaccatggccgggtgctctaggaccacctattgtaagtagagagataaggccattgcccggaactgctgagaaaaagaactatccctcagacctgaatataagctgactgcatagatccctcctgagtctgagagagctaataaagggcctttaagtgtagtactagcaaccataaatatcttatgccagatccatttggttttgctgttaaattttaccctgggttatgtattcatttattcagggaactagcagttactgcctgtcactgtgtgctaagactattgtaaatacatgcagtcaactagcagacaggacagtcacaaagggtccttgaagaagtaggtgccaaagtaggatgatactcgaccatgcagttgttatgaagaatggacaagtgtgccagagaaagatttaactgaggaaatgttagttgagctgagacctgcagatagtcatgagaaaatcagggcgaagaatcttccagaaaaaaggggccactcaaaccaaagctctgcaatgggcacagagatatcacacctaggccagtgtgattggaacagagaactctctgggagagtggacagatggacaggaactggtcacagcaggtctgtagacctggtgaagaggccgtcatggttccctgctattttacaaacgaggaagagcaaggaggggtaaagtggcatgcccgaggctaagagcacaactcaaggtggctcaccctgggcccatgcctggggtgctgcttcccaagccagttccactctgtgccatttattctctgaattttaaattattaatgcaaatgctttattaatgtaaaatagaaactaatgtacgtcaatggtgaactctgtccagtggttaattttagaagctctttagtttcttggcccacagttacgacagcatgactagctgctggtctaccctttgggtctctttatttatccaaaggcatagaatttagtattgaatccctagattaattatttggttgtacaaatggaggtggcacatttcttgactcctaagacatactaaaattttaagtctattttgcagtagttgacatgttagaaaattatagtctctttgttggcatatcgcacaagtaaatatttgtaaactacagccgtctagggcctttacttaaattgcttttttggaaaataattcactggaaagtcccaaaggcatttactgtgtataactttgggccaccttttccctttcttgtgtttggctattttaatgtaagagaccatgttcctgttacatttctgcttttctggctctgttaaacatcttaacatgggattggaggaatagttactaaagtaggcaggtagcagtagagtctgggttataaatattaagcttaaagtgattttgtttgtttgtttgtttgttttagtattaatttgctttttcggtgcaacttagtataatatcctcctgaccataaaatgtccacggcttgcatgacagccaagtatttggtgtttcactcggagcagagtgcatggttttgttttgtgaattcacataataaaatgaaaacagtgttctgacaaaattagaacttgcttctgggcacaatcaatatagcactttaaccagcttttgtatttaggaaatacaaacatgttcactctcaaataccctgactctgttctagcccgtggccacagagagggtagggtgctcagtgagaaaacggaaaggcttgattaaaccataattaagttttgaaacggttagctaagaactctgaataagatatggttttagatgatttcaacaacaaaaagtatagcaaatgaaaccttatggtgtggtcgcaaatgaagcacaatctcagaatgactaccacaacatgtgcaccgagctaaatttgtatacaccacttatttcttcccttttaactttttaaaaaagataattcttagtgaacgtttgcggagcaaggcatctggggtaactgactgaaagggccaatcagaagtgtctcaacagcttatgaagcacaagcgaaacagtccaagggcctcctaccagcctctgtgcccccagggcccacagttagttacaggactttattgtacttcaccaggatgttggaagtggctgagcactgtaaggctccatcctcatttgattgcagacaagctgcaaccctgaggatgcagagcaactcacctctcaaactcagaccttgttattatttcttagtctcttccaagtgcctttccatttaggagcctcaaataagcagagtaggctgaagggtttgtgccagccttttcacggggcaagcactggagttagttattgctatttttttttttttgacttgggctcatgtttcatactgatggcctatgccaagtagacactgtctgccatcctgcctccttcctggaaaactgagctctttgaaggagcagatggagccagtgtcagacctgttgatgttgacctctgacccctagtcatttcatatggttccttgctaattttatctatagtgggtttttgtggttgtgacttggtgagtatttaatctttctctggaatgatgttagtgttttgggttttctgatctttatgaggcagtttgtccatccccaccacatcaccctttccctccttccacatatctggctttgaaaatgtgtgtggccaagttatgctgtgctttcttaaatggattagagactatgaccttcctttgactgatctctgaggactctgtagagcaaaatgttacctagttcttcaaagagaacattctcacgcaatttatatgttgttagaagtcactaaatatacaataaaaaatatgccatgttctcgaaggacggcaacacagagcccgtgctggggggtgggggagcaccctcatcccttcttgcttgtttgaaggtagtataggtctggtggtagtttgtgttcctttttatattaaagtaacaagtttctcctggtttattttgacctggtcatgatgtgtccattccacaaagtctgttatgcacaaaagtgcacaaaatgaagataaagtgcctcgctccagcctgacaaaagccattcctttgcagagtggtagctgcagtggaagtaaataaatgaatggacagcaatcacagcctagttgatggaactgttcaattaaagcacaggcatttacatggtgtaatttccctaaattgccaatgagcccctttagacacaaccagtgttcaaattgatttcagcattgattttggctgaagctgataaatttctgcttgttagttaaagtaattttgcagaagactttgtactgcggtattgaagtgttcatttagctgatggttaaaagaggagttatttacagaggcctgtactgttgttctgagatgggacaattccccaatcatcttttacttttaattttttaggcttcagtataccaatcaataggtgattgaaactgattaaaacttatccaaccagctgcctatggcagtttaattagaagccggttgattcttaaattaaacgtcttgttttcatcgcattgccatcttccagaagagtgagggctaaccgtgctgaaaacctaaaactgggcttcattaagatagctcatgagtgtgaagctgcccgagaatagctcctcgggcaatccaaaacacacacgggctttcggagagcaatgagggatggttttggttttaggtaagatgtagtccgtagtgtggtacagacaaagggccatctgtttgtgacatgtcaccgcacaacagtgggtgctggggctcaggtttaatacacagtaggcttgaaggggccatcagaatagtcagtgagtctctggctctgacacctcagatggagtatttgctattcagttttgaggtctcaagtaaaataactgtggcagggtagtaaacaaggaccttcacattcgcccatgttgacttcccgcaattgtgagcagggttgcaggacggattttagccatcccccacttccctcgcttccccacactcattttatctagtataagacagttcttgggtttgtaatgaaagcgggttgatatttctgtcataagggacatattgcatctggcactacagggaagggaataaatggctcacttttcagaggtgcatttactctttgacccactagggtactatttagtgttctagaagaggtaatttagtaaattgcaccccagtggcctggaaaagttaatgcaaccctgaaaagtgagccattcgatcgatttctcctattgctttttaaaaatcagcaccaaccatatccagggtgcccgggcgactgttggaaaagtgctctagaagcagccagttcacactcatgtagagcttggtctggcttcagagggcccagatccacttcctactctggtgtttatcaaacagaaatgtgaagcttccattcttgactccttgaccgtagactgactgacgaagacacctccctgacagattttcatgcaatagcaaatagcctctctgtataaaaatatttcctaaccaggtttctctctcgtgctccccactcccagctcctagtgccagcagacctggctgctctcagccttggtcagggaagcttagtttccaagtggacagcagataatggagagatgcatgactgaccagagtcctaagaatgagagactggccgagtgctcagcccagacttggactcctatctctcagaacatgggaggagcgacatgaagtgctggcttctgggcctggcatggccattgtgatcgtcactcacagcagctgtggtcactagcacctgatcaagccagcaaaacctctggcctgaatggggcagggtaggcggtctccaggcatactgaggggctactggcaggagcgtgctgctccttctttttggaggatgtattcaccaataggctttagtggtcggcactgcacccaggcacataaaggcagcaaagttaactggactttgtgggttatttaaaacaaaggacatgaagattaaaggtgggaaatgggagtacatatggtcatactcatatatatgtatgatgttctcaaaacaaggaaaacttgaaagattcttaacacacatgttataaaccatacacagctgatggtttggactctgtaaggaactttgagtcgcttctaacccatactcaaggcatgtccaggagagaggtcccgagctggttaaccctcagctgttcctgtttctcccacttgtattgctcagccactcaacctccttctgggcgtgttgtttctcgcctccctgctttgttcattgccttctctcagaacctttgatcgagagttcactgtgacgggagcttccgctatctcaaaggtatttaggccatatattaaaagacattactctagttaatgtggaaagtgttaaaggctggaaggagctgcttcaacttacagaagaaatatggacgcctaaccacattaacttcacaggaggtatgagaggaagagggggcatctcagccaactaaacagaggagccaacatgaagctgtttcccctttctatgactgggtctttttaacccagccaagttgcccgtgtcttagattgggttgatttatgaggcctatatttggtctggtacataagcagctgcagggtgttgcttaactcctttgacagtcggcagtcaggcttctgtagtggacttctaggcagaaggaaggtcggcctggcccatgatttgaagcttctctacagctgcctttgactttggattttgtgttgtaacagccagcacttggctaatgtgtttatctattatggaaggcaacgactgtcagcgtgcatttccctgacagttggattccttttctctccttgtgaatggctgtggctatttcagtgtgtgacagaactcctcaaacttctccagctgactgttactcccctcttccaaagataagatccaagcattaaggcaacattttcattggctgttcccacgagctgttttgcatatggttgcgggagatgtcattgcaattcaaagatgacttaagagagtacacttaataattgactctgaattggctgcttcttaactttctgtgctgctaagaataaagagtttcctaaataaactggattactaaggaatgcactggtttgtcttcctccaatcaaccgttctgtcaattctcctatgttttctctctgagcttaacttctggcatccagccctgagctagtgtgtgtcctgggaggcgctgggactgaggaaaggaaggcagatattcaggatacgcattgcctgaagaacagagaatctgctttattgttctggagagccgcctctgtctctgcagcctgttaacactgcagctggccttgtaatctgtacatatttttaaataagctttttctctttccagtcccccacctgtctgccctctgagacccaggaagcaaaatgagtaccttctcctgcttcctaacgcttccccatttgcttcctgttctctgccaatggccgggggattttcttggtccaggagaaatttccaccaattgatggctatctctaaataattcacaggatgatcctcctgcttttcactaactctgcaggatgctgtgtgagaagcagaactcctgttggtttatgaaagaagcagccccgccctcacagaacagtgacagtacagtcattcaggtgtctcctgtcactgtgacttggtctatgcatgggattactcttgagggctttctccaagacaggaggaaaaaaatcgatgcagaggtgttttcatgctcatttttgttgaatatttgctgattgattgatgtttatagtgtatgtgagtcatgctcaaatacaacgtgttgttatcaggttgtgggtcaccctgtcttaaacttcctctggtcaccagaggagctagatgctctccagaataaatcatctttgcgtatgagttaaagtaactttattggacttacgttcagaaactcacatgcaggaagtgctgtagaactcagatgtctgctttaattgtgtgagcctgcatgggattgagaaacgcatgttcggcttggggctatttattttgtaactagaaatcagctgggacaactcacatttttgtgattcttgtagaatgtgaaattttaagcataaataatttcagtaaacactgtaagatgggtgcgatgcgcacttgcatggcaggccagatgcaggactgtgaacacaggttgcttctccttctgtcctgggggatgcaggacttttcaacattttgttttcaaacttttcttctcctcacttaaagattattggagaattttaaaaaatatcttttatttgtgtgaatgttttgcctgaatgtgtctctgtgtaccacaagtatgcctggtgtctaaagaggccagaagagggtaccaaattccctgaaactggagttacaggcaattttgagtgtcgggaactgaacctgggtcctctggaagagcaggctgtgcttgcagcctctgggccatctctcctgtctgtggtgattattcttaaggtcgatgattctcattggaacttagatgaaggtcagcccacacattgcttcccttctaagctgcactggactctaaagtctgaaagaacaagcaatagaatcattcacactggtccccaagtattgcctttgtggtcagtcacatttcctgtctacttactaagtccttggcattaggagagacatgacaccagcattcatgggctctagggtctgttgtgagcttaccagaagaaccttctcatgtccttggctactattttcccctccctggcctcagtttagataggaagctgatcacctctcacccctacctctgtacctctcagctcaagtcacccttactccttgctggggacatttctcagctaaccctcagtttcaagctcctcatccagcagctactatgctttcttgaagtcagctttctgtttctatctgtaccttctacaatttggagtaaaggccggagacctgagtgtggcctaagtgacatgacagaactcggcttcccactgcccctttggctcatgtctctcacttaacctgctgttcattgtttcacacacatttccaccctgggccttcacacttgctccactgcttggacaaatgatgtatgaagatgtgagtgaggggtgtctggaattaaggcttttatattgtttagagggggatagaaaacagttaactttatactttgctaagtccactctgatttaaaaaaaaaaaaaaaaaaaaaaaaaaaggtctacctgacaagaatgcagtaggcagagtgaaggagaaaggtaaaaacaaatgaagaaagtgtgggagaaatcccaaatatatcagtagttacaacaaactcaaagaaagattgatgctcaatagatgaattagattgaggttttaaaagtataactgtttgctaatttagaagaaccacaaaaccacaatgatatactaaagtttaaagaaaaagccgggaaacgacatcggacaaaagcagtagtgccaacaaaaccttctctcttaaaagcttgtacattgatgtataacaaacttaaaagaaaaataattagtacgcataaggagggactcctatatgatgctgtaagaaaaacagactgacttagcaacaataagccaatatgtaattaataacataattttaaaatacatggagcaaaatcttatacagttacccagaacatttgataaacccacacagtgggagaatgtctcaacaatcaacaattgatcaatcagataaaattagtctttgaaagatttttaaattttttttattcatgcttattttattcgtgtttaagtgtgactgcttgtctatacaagtactacatgaatgcagttgcctgaggaggccggaagagtgtgtcatcccctggagctggagtggcatgaggttgcaatccacccagtgagggtgctgggaaccgaacccaggacctctggcagagcagggagcactcacccactgaatcctcctgccagcctcatatggaagatcttaacatcacaggcagagtgtgcacctttctacctcaaaagacctggcttaaaagtggatcttcccacttctaatgatttaattaagaaaaaaaataatccctcacaggtttctcatattcaaacattggcatctggctattattccttgtgccatcccagatgtctatgctgtgtgttcagttttgcaggggactagtccccaaaggccaagtggagcacacagggagaagagctaagaaacgcctcatacaaatgcttcctcccgtctctctttggaacaggtaattactgtggcaacaacaaactaatttgaagcgttagctgttaattaaaacattgcagaggtgtgtagttgtcttttggtgtaaccagagcctccattcagcctccattaatcactttacagttaatgtgctgaggaaggtcaagacaattgagaaagaaagtaaacaaactctttctccaggtaggatgctgttcacagagttgaggagttggcttggcttgggctgcttctgcctttgtcatccatttctccctgatgattaaatgtgaaatcggctctgtccccagactgtaaacccagccacaaggcatctttattgcttgaaatgggacccaaacttttcatgggtgaattagcctgcgtcataattaaatcatcaactctcccttttaattcacttggaaatgggagacctttcttttgggaaagagatcagctttcttgacaagctaattaagttgccaaactgcccagtgaggtatatgtatgttgggctctctgctaatcatgcttttattgctgcagctggtctcagaagtccatgtgtcacttatgttcaaagtatgacactgcccttcccacggcttccaatcatttgtctttatactttagtccttgtctcatgttctaatactcagggtttcaaacagttgaaataggaagtatctatggtctactggttgaaataatgttattatttaatcttatccattgaattatttatatttgcatggaaagggcatctaaattcttcacatatattttaaagaacacattccaacaacttctaaagccactggaggaaattggtctctaccagtgtgctgcaaagtttgaatatatcacaaaacaaactatgacctgatgtgtagctttccattaatgtagcttttaataaaagtcatatttacatagatggtaaataataatttcttgtaaaaaccaggataatatatgggctccatttgtaaaatgttgtatccttttatacgaagcctgaaagatttcatttattttttaaaagtgtgtgtgtgtttatttgtgtgtatatatgtatgtatgtaggtgtgtgtatgtgtgtatatatatgtatgtatgtgaatatatgtgtgtgtgtatgttcgtctattcgcccagttttgattgtagattcataactaaaccatttctataaatcagttgatttcaaaacatttgttggtgctagatatggtgtgcatatctccagtcttgttaatatttcttaacctaggttatgacctatttcagtgtagctgggtgtcttaattacttttctaatgctgtggaaagggccaaggcagctttaaaaagaaagtgattttaggcaattaaagtttatgatggtggagcaaaggtatggtggtaggagagcttacttacattctgatctacaagttgggaatagagcaagagagacactgggaatccttaaagccagcccccagtgacacacttcttccaacaaggccatgtcttctaatccttcccaaatagtttcaccaactaaaaacattgaaacatgttagcctaaaggcaggctttgggggaggaggggnnnnnnnnnnnnnnnnnnnntgttgggggaattctcattcaaacaccactcggtgcctaattctctaaggaaaagatgagccacatgctaaaacctcattggtgtatgtcttacatccgtcaatgttttattatagtaaagccgtagtcagagctcatcctggattggtgattattgatgaaatacagtaatatgatttctctttctgtgtaccttaagaaaagcaaaacccttccttttgctgcacatacacaactatagacacacatacagtgatataacagaggatctagggtcagaaaacctgatctagtttgaaggtttagttctgccgctgtgtagttgggcatcgagcaaactgcttaaattcctcatgctgcagagctgtctttaaaggaggataataatagcagtgtgaggtggggttttttttgtttgttttttttgttgttgttttttgttttttgagacaggatatctctgtgtagccctggctgtcctgggactcactctgtagaccaggctggccttgaacttagaaatctgcctgcctctgccttccaagtgctaggatgaaaggcatgtgccaccactgcccagctagcagtgtgacttttgagcagtattttaagattcataatcacttgataaaccttgtttagctccacagaaatagacattgctagcatgggccatttgccttgaaggtctatccccctttgggccagaagtgtttgggttcacaatatgtccttagccactctctaggttatctaatgacagcaagtaactttgtgtctttttctttttcctatagagcacatcatgtcccaagtgggaaaattttagctgtaaaggtaagcattgggtatattttatgcaagtttgtatgtgtgagtctgtgtgtgagtgtgggtgggtggtccatgccgcatatatacatggaaatcagcggaaagtgctgggtggcctgttttttcactctctaccttattcccatgagacacagagtttcttactgagtctggagctaggctgatcctccagtctcctcctcccacagtgctggacttagcgaagcaggcagccatggctggtattggagatgtgtgcatcaggtgctgctgcctgccgggccatctcctcagctctgtgttgtaagattcttggtgctcactgattttctttctcctctcaactatgtcactggtgcacaaccacactttgcagcagtaggctatttgctgaaacgtggccagaccctcttgcagtctggcagtgatctactttacagacacgtgctctgctcctgcctgccagctagtgacttcttgtcatgcctctgggcctttagtaatggaaggttttagtttttgaatagctgctgtgtgccaggtatcacactacatgttttgaacagtcatatttaatccttaaaactatgaggtaattctcaccaattttagatttgaaggaagagggactcctgggggctgatttgtgcaaggtcatttggaagaggcaaggttaggatgttcaccttacctgataaagctaatgtctaccagtgctttgtagcttgtgtacagtgactgctgttcaaccctctcttgtccactcagcctcacagttcatctctgagatgcctttgtaacgccatctacagtgagaaattggtttctttccctaatgtttcagtttgtatttctgtgccttatattttaaagaaattaagaatttgcataatggttgttctttttttattgaagttaaactagaaccgaggctcaaatcttcggaattctagtgcgttccatggtttctttctgatctcagaccgaggccagcaactccatcgtatatggcatcatgaggtctactcttaataacagatagcctgtatgaggaggtctagcagagttctctgaggatgcaaattatatccacacaggtgcagcttgggaggcaccattgggatcctcataggcctcacgttttgtacaggaggaagtgggtccagagagatcctagagtgctcactgtaggactaagctgtattccagtcttccctctgtgaacccaccttgatccatgttctgtgtctctcttgagctccctttgataagagatcacccactaagtgagcagtgttttcctgtctgcccagttatttgttcctttcatgccagaagtcttagattatgatagtgttgatatatttaaaaacactcaaatcttcagttatgccaagagagagagtgtgtgtcactacaaatgaatcatagcccttggccttgcaaatagaacataaaattttcataattccatacattttaagttgtgcttaggataggctaatattaagattcttagccatgattatttaactgggtgtggcaaaggaccagcagctctttctggaaaagagttaaagtttacttgataaaaatagctgttagatttttactacatgagaactggtggggtttacaaataagccattctccagactggacctttaaactgggctttctagcaagaactgtattgtgtcttcaaactgagtcaaatggtggctgatttttgtgtatagacttgatcttgataaccaaaacaaaaatcatgtagatcatacaccagtacaatattggcggaaaagtaccatttcttcaaaacagccagaatggtaaattagttattagaattttattatttagtttttaattatttggaaattttctaagtatttttcagttattgacttctatttaattccactgcagtctaagaacatactatatgattggaattattttaaattaatttggctcaaatatggtctttgttggtgaaattttcctgtgcccataaaataatatataatccaaagatatgaaagtgtggtgtaaaactttgttagataaaattggcttttagtttttatatctttcatatctgattttttttctacatgttccatcaattaccaaacaggaatgttaaaatctccaacacttagaccttggtctggttgttttttttacatttctgtcactctctgtcatcgtttttgaagatgtactgttagttttggtaaggtttttatcatttggaagaattggcctctttatagtaatgtggtgactattttgttcacaacagtctgtgctctgaaatccatagtggttcattattaatctagctacagcagctagctgtttactaatattggccttttactttgaacctagtatgtctctatattggaaatgagtttcttgtagacagtatatagttgggtcttaatttaaactctagtctgatctttgctttttaatttggctgttggaaccatttacattttatgtgatatgatatggttatatctcttgttctgtgtgttgttttccgtttgttctggttgtgtacccattctccctccactgtttctaaggattgtctagagtttatagcgcccatcattagtctatcatataaaatccttacaataagagctgtgctagtcagtgttctattgctgtgaggagacaccagacccaaagcaactcttatcaaaggaagcatttaattggtggcttgcttacagtttccaaaggtttccaaagttctgaaggaacaagtctccacgatcatcacagactgtggggatctagactgtctgggcttttcttctgaattttgaagatctggtttcattgctggctttttattttccagccaggtgctggctgtcctttgtgttcattgctgctccatgcgtctgccctgacatctcagagttctttctttgttacaggtggtggttatagtttacagtatatggttatgctgggcttggctgtgatgcttttttttattattattattcaatatgcttgaggtttgtttgttgaaaatcttgaatatgtgggattttagccttcatcaaatttggagcactttaacctttcatcagatcatgcttccacatgggaactttgcttgccttgttggcttcacttctcagtctttccctgtcttagttttggatagtacctgttccttccatgtcttcacagatcttttctcctctttggctaatgtgccattcctcctacctactgtggtttttcatttataatgttctttttatccctaaaagtgtaggtaggcttttttgctttaagaacaattttcatgttgttatttgatgtgctcaaccttttttctactttctagagtacatataataattattacaactgtgctgggtagttttatgtcatcttgacagaaagaagcttaagtcatccaagaggagggatcttcaactgataaaatgcatccataaaagtgagctgtgggcaactttgtatggcaatttcttaatttatgattaatggggtacagtccagcccactgtgagtggggccatctctggtctggtggtcttgggttctacaaaaaagtaggctgagcaaatcatgggaagcaagtcagtaaggagcaggcccctctatggcctctgcatcagctcctgcctccaggttccttccctgcttgagttactgtcctgttttcctccagtgatatggaggtgtaagccaaagaagccctttcttccccagattgcttttggtcatggtgttttgtgatagcacagtaaccctgaccaggacagacaagccagccagtagacatacctagtagctgtcatgtaccttatttctgggttacttccagtgcatttttttcctcttcattttgggttgtatttcttttttataggacattgataatatagcatgggtaggtagatttgcattcctatattcttaaagtgttctgagatgttagcaactttgaaacaatccaattttttaaagacttacttttgaactttgcttaaagggccaacctagcagtcagcctgcagtgaatttccccattctgctgaggtgggactcttgctctccaatgatggagggaacacaggccgcggggttagggttgcttcctccggttctctcctcctatcctgggtaacctccagcttctacagtgaatcactctactgtagactctgatgtctgtcacactccctctggtgccctgccagctgacactggcacccttggactcttctgccccaggctctgtcttctcagcataaggagactgagttcagcctgctttctctccctgtacagggaccagaagactctgtttagtcagtgaactgagcagcctaagattggtctttatcaccagtctctagatgtagtgttgctctggctactgcccagtacctggagacctattgagggttgtgtgtgtgtgtgtgtgtgtgtgtgtgtgtgtgtgtgtgtgtgttggtttgttgtcttgtgaattttgtttgttattttgttgagacgggactcaccatgtatccctgatttgtgtataactttctgtgtggactgagctggcttcaaattcatagggatctgcctgcctctgctttgtttcctttcctttttgtaagaccgttggccagcttctgaatggttctctcagtaaagacaagctgcaatttactgatgatttatgctgctgtatattatatatatatatatatgcatatatatatatttattttagacttttgctactgctcctgcttttcatttagcagatgcagaacctgagacagcacagttagacaacttacccaagtttctgcacctagaaagctagagaccagcatgtaaaacctgcctttgctcatctatacccctagattagcttcccaaaagcatagttccctcttaaaaaatattaaaaggcccatgtcacttctgtcctggttgcttctgcactggttactattctcacagctatgagaagatgccctacaggagcagataaagggaggacggttctctttgctccacagttgagtgtctagccatcatggcagcaggagtggaagagagatggaaactgccattctcttccttttctctcttatatttggttcaggaccccagccctggagtgatgatgcctactgtagggtgggtcctgccaactcagttaacccagtctgacgccctcacagatacaccaaaggtttatgtcctgggtgattctggacctgtgagattagcaatcaccatcaagcgtcacatggcccagacaaactaaacacactccacaatgcattagcagtctgctgctgcttctgtagcatgttcttacatttcctggtctctgtgcactttgttctgttttacttgaacttgtcaccttgtctgaacctggtttgttgttggaattttttttttcaacaagttaattcatgtgcacctctctaattagaatgccttcatctgtgtcttcaactgttagaatcttagcagccttcaagggcctgctctttggttctggataagccctgtcgcatgtgttgtatgtgccagtcacctcttgggattctctgcatgtgattcctaaaggcagtcatgtgccatcttgcacatagctgttagtttcatgtccatttcctctaacgtatcaaaatctctttaaaacggagaacagaactgaccactttcttgccttacctacagtgcccaacgctaaatgcagtgtcttaatacataatttactgattgaaaacagttttgttgttgttgtttaattcattcatttatcttttgaagtaacattctgaaaataggtttaacagcatacaaaattcccttaatggcctttgtatggaccgttacttgcccccggaatatttctttgcttcctttgttattttaaagggtgaaatggaaggttaagactcagaagtgcatttgatcttttcctgaccctctcttgacttttgtgtgacttgaagcatgtcacttgaacctctcagtgaccccagttgcctggtgtcacagggggaccgtgcagagcagcaaatcttagtccttgtctgagcagattcacctgcagggccctgctgccagcctagagccaagggggatctcattctgcaaggcagtggtctattggaccacactgaggctgtctgggggccggtttggtgagagccctactcatagctttcccaatttttatacattcccgactgaggcctctttttcacagacaaacaacacattgctgctcttcttttctctgatctgagatacgataagagaactttacaagtttttgtttttaaaaggaagatcattttaggaaaaatagaaatgtgtctataccatgcaatctagaaaattttctgcttcacacagcacatttagaaaattatgctaaccacatgttagatactgtctgataatcacctgcacacttgctagctcggatttgaccagcttttgtttgtttggtataggtagcaagaccattgcaaataagtagagcagaaaacaaacacaaatactgctagccatctagaagcagaacctctctcttccattactgcctctgtaaaatctttccagtagtaaagctcagggaatttactggactccccaggattgttttctgattggaaaagaatccatctagcgggatttcttagctgtgtatgtagcatgcattgagtatcattcctggagtgctttggatttctgcagcttttaaagcagcatttaaatggaccatttgattaatcatttgtatcctggctgtaatcctcccaaatttcctttctgagttgtacatactgtaaaagacaattatgtctccacagattaaataagtgaattaaaacagaatagtggcttaatttgacctgtgattttgttctccttgcctttagtagagcgcatgccactccagcaaataaatgaagtcatccatgacagctcgtgatgaattgccgtatttatactgtatattttaatagtctcacactaatttaaattgagcacagagtaaattataattcagtcacttgactgcttgtatttaacttgacagcgcatccttgcgcgtcctgtccgggagatgtagcagagagagagagagcggtgagaatgcaggcagggacctccatcctggctgaacccttcctcccagagctgcttccagctccttctcttcattccctcttaagcacttggctcagcctgaggagagaagattcaggcagtccacactgtgctggagcttcaaagggaaaaatccacactcgctgtaattttctccctagctttcagaggaagaattggtctggtttatttttagcatttttaaagctcactggcaggaatgcccgggggaagggagtttacctctcacgaaatgccaagctcccagaaaacagagctcgtgcacatgcgctgtgacagcatggagtggtcttcctctctggaatttgtagaaatgacctgatttgcttttcgggggttatggactcccagtgctctggactacagcaagtctcgagagatccaaaccaatcagaccagtgggtgagcctcacgaattcatcagtcctagtcgagttttggttagtgtggcactttggtttgttttggtgtttgcatctttggtttttggtttagtggcagacatcacacgatccatttcccttggataacagcacatctggaatactgcttgtaaggaacactttaatcaggtccatctcagtgactgggtgctgctctgaggctttgtcctgggtgctaaggagtcatggctactcaaaccctgccttgccctggccattctggcagcttttaggagatgctggggcattaaagccagttgtggtaaagatgaataagggtcaagtcagagatgaattctgaggtaggtgtctggaggtggtgaagcattcaagctgggtctaaaaggtcaaaccagctttcataatcagtgactgtggagtggaaggaggaaacatgtgcacggccgctagggtgggccggaaggcagctgtgtaggaaggatgagaggagggttagcaggaactccagagttgcagcttactccacatcatgggaactcaagcaaggttcttgttcaagggacagataaggtctcggaaattgccatcaactccaaagcgttggctagccatgtgcagccttagccttacttcttacttacgtgactgctaccattagaaagagggatattagaatagtcattttctttccttgtggtttacataactcccgttttttgctttattcagtataatgatacatggtccccgtctgagatcggaactgtaactcagcactgtaaggtgtggattgactgctgtagcagtcctgacggttaggctttactcagaagtgtttacaatcaaactctgctacagttcttaaggattcttctccacctattttatgttcttactgccttttacaaatatattttttaaaggttttttaaaacgtggtttcactgaagtacttagtcgttgagccggatggggttctgactctttggtagggtactcttggtacctgcactcgtgagaaggttccagatcagtccccagtgcacacagctgcctaagggaagcggaaagtctttgaattaaactcgagcctgccctgggcaagagcgttaagttcatatacttggacatttctgtgttataaaatccaccttggtggcagatacttaaggaaaaccacaacccgtcaggaggtcctggctaagcgtgggagtcaggtgacgtgaggacctctccagctctcaagtctgtcagcatttataaagaaacattacccacatgggaggaagtaaggtgacagggtttttaaactcccatttcttttatttctgaaaatcccattttaaaatgttcttttatttaccatcccctctgcttatctccgagtgcctgctcacagggctctgctcttttaatgatcttcttctgaaaatagccggtgtggctcaaatagggcacataaattgagtgttataacttaactgacttttaaagccattaatgctgacctctgagacctggctccttccagggttccatcaatcacctctgtaccgcctcctccagcgcagaggcttagcttcagagacagctttttttttttttttttttttttggtgctggggttatggggatgctgcataaagaaagcacggtatttctttagttcttgtatctcacgtgctatgtaacttaaggtagacgaatgtgttgacgctgctgtgtctcttcaggttattctgttagacattacactggagcttcagaagcagatcatgtctgagctggaaatcctttataaggtatttttttcttggtcacttttatctatgtaaatgcacatggtgtcagcatctaggtgttaaactacttttgtcttatttttgttacagtgtgactcatcgtatatcataggattttacggggcatttttcgtagaaaacaggatttcaatttgtacagaattcatggatggtgagttgttccctttaaactacattaaaaatgattttttgaatcgattgacgtaaatgtagtcttgacacagatgtccattccactttggagtgagtggcatgtgttaacaactgccttctttacactggcagttctcttctgttagggttcctgctattagatatttgtagcttgagtgtaataacaagaatgcaagttaatctccttttactaaaaatttgcactcgggtccagtcggcgcgaggtccctgctgcctctgtgcagcctgcctttgctgggaacagatgctctgttcttttaatgtttcagtcaccaaaacagattttcttctaaagaaatctattaacccaatgtcctgtgtctttcagaaagaaataggttcttaattgctagacaagaaattgtttttcaacacagctgtttagccgagctgcgtttggctctgtttggacgtcaggcctgtcctcctctgcttctcattcatggccatcagcagcactcccttgatctgaatattgtgacaggatatagagctctggaaatcctctcactgaaatgtcattgttactctttttttaatgtattgtaaatttggacacgttcccaccttttacaaggtcagtttcagtatctagcctccattaaaatgtagcatatgtgcctttctactttcttaggtacatgcacacacaaaacagacataccatacacatacatacataccacacatgtgcaccactcacacaagaaatataccaccatacatacatacacacactacacatacatacatacatacatacatacatacacaaatgcatacacgtttttacttctttatgtatacacaccatgcagccacatatacacacacaccacacatattctacacaatacactccccacacacatcacacatatacataccatacacatgcatcatctatatacactacacacatgcacactcacacataggcacacctttcaacttctttaggtaaacacatatataccacacacataaacatacacagttacaccatacatatacacacaccataaacacacacaggtacacacacacaaacacatacccttgataaccacataggtagtgtaatggacaccggttaggaagcatgggtttgtaatcccagtacagctcactcttgtgaacgtgcatcctttgagatctgtataacttcagttacattaaaacactttttattaagatagaattaagatactataaaactcacccttttgaagcatacaacttaccattgttgtctaatttcaaaacatttctaaagagaaatccctagccacattaagtgacttaatctcatccccctccctctacccgctggcagtcattggtttcctctctggatgtcatgctgcacatcagtggagtcctgtagtcgacagcctttgtgcctggtggctcatgctcagaacagtttccaagttcatgcgtaaccgcagcagtagcacccaccacccctcacgtcactagcagtagtttattgagtggctatacaacatttgcttgtttttcttcagttgatggtcacttgggaaatttccacttcttccttttacatctaaaagatgtttaattttattgtgtgtatatgaatgcatgcacacataggtgtgcatgtgtgctactgcctgcctggaaggccagaggacagctttaggagttgactctccttccaccaagtgcccccagggatcaattcaggtgatccagttcgctgggagtgaggtgtcaggtgatccagctcgctgggagtgaggtgtcaggtgatccagctcgctgggagtgaggtgtcaggtcctgtggcaactcttaatttttgaggaagtgtcaatctgttctagtctgtcagtgctcaaatcatttgcagttactgtaagtactaaagaaatactgcaacgcaacgagaaaaacaccagtcactctttaaaaaaaaaacagacaatagattggttatgaatttctcaaagaaagacacaatggtcaacagccacatgaaaatacttatcaacagtggttgtcaaggaaacctaaatcaaaaacacatacatattcatacctgagaccacatacacacaaaacaaaatcaaccacataataagtgtagacaaaggcacagagaagttagaatcctcagacaatgttggtgtgaaactgaaatggtgtaaaatagattagaacagcctgacacttcttcacaatttccacagaaccaagtgagtccactgctacagaaacccaagacaactggctagcacatgcacattgtagcctgctgctgtgtttatagcagctcacaagtgaccaagatggctcagtaaatagaggggcttgctctttatagcatctttcttctgccttcttagggtattggtccctgtgccagtttcagtacactacat

SEQ ID NO: 1529 - DNA, 2259 bp, Mus musculus
ccacctccgctgccgggacgcgggcctcagtcggacgatcctgcacgcgccgcgccctccggttccggctgcggtccgggacccgccccttgaccccgcggccctgggcccccctgcctggttggagggcaggcgccaccggtgcacctccgaaacagccccgacccagcccgcggcgcccggccaccgtccccttgcccaccgagacactcaggacggcaggaccctggccactgtacctgccttaaaccaggccgttgctccgctgtctcctcttactcacaaggactacagaatgcttgtgggttctgttttgtccacttttgtaactccaggaccttccgctctctactaattcctcttggccggtcccccaacagtgcatcctctcctagggacactccacacgacctgggcctggttttgggcctgcaagctccctcctgatcgctcctcttcacttctccccatcttcttgctccctatttatcgcctgccttctgtctatcgttccccttgtcacttcttggggctcctcctaagtaggggcaggtcggtaccccttcgccccaggatgtgagaccctttaacctgtaatgctgtggctggcccttggccccttctgtgccatggagaaccaggtgctggtgattcggatcaagattccaaatagtggcgcggtggactggaccgtgcactccgggccgcagttactcttcagggatgttctggatgtgataggccaggttctgcctgaagcgacgacgacagcgtttgaatatgaagatgaagatggtgataggattacagtaagaagcgatgaagagatgaaggcaatgctgtcctactattattccacagtaatggaacagcaagtaaatggccagctaatagagccgctgcagatatttccaagagcctgcaagcctcccggggaacggaacatacatggcctgaaggtgaatacacgggctgggccatctcaacacaccagccctgtggtctcagattcgcttccaagcaatagcttgaagaagtcctcagctgaactgagaaagatactggccaacggccagatgaatgaacaagacatacggtatcgagacacccttggtcatggcaacggaggcacagtctacaaagcacatcatgtcccaagtgggaaaattttagctgtaaaggttattctgttagacattacactggagcttcagaagcagatcatgtctgagctggaaatcctttataagtgtgactcatcgtatatcataggattttacggggcatttttcgtagaaaacaggatttcaatttgtacagaattcatggatggggggtctttggatgtatataggaaaattccagagcacgtccttggaagaattgcagttgcagttgttaaaggccttacctatctgtggagtttaaagattttacacagagatgtgaagccctccaacatgcttgtaaacacaggcggacaggtcaagctgtgtgactttggcgtgagcacacagctggtgaattctatagccaagacgtatgttggaacaaatgcttacatggcaccagaaagaatttcaggagagcagtatgggatccattctgacgtgtggagcttaggaatctctttcatggagcttgctcttgggaggtttccatatcctcagattcagaaaaaccagggatctttaatgcctctccagcttctgcagtgcattgttgatgaggattcgccggtccttccgcttggagagttctcggagccgtttgtacatttcatcactcagtgcatgaggaagcagcccaaggagagaccggcgcctgaggagctgatgggtcacccattcatcgtgcagttcaatgatggaaactccactgtggtgtccatgtgggtgtgccgagctctagaggagaggcggagccagcagggacccccgtgagacctcagcaggacactgaccactgaggaccagtcatcatgacacagcaagccgtgacccctctgtctgctgtactggcccagcctcctgctcgcacctcctgccctacctaggaagccctccagagggccagcctctgctgagcgggggaagtgggcactgactacagcaggtggagatggtgcagggcggggtgatgaggttataaaactatggaacctcctctggccccacccccttatctttccctactgttcattgtaaagggtcaggccctatcagcagcactgatgggaataaaagtattattgctttg

SEQ ID NO: 1530 - DNA, 1347 bp, Mus musculus
atgctgtggctggcccttggccccttctgtgccatggagaaccaggtgctggtgattcggatcaagattccaaatagtggcgcggtggactggaccgtgcactccgggccgcagttactcttcagggatgttctggatgtgataggccaggttctgcctgaagcgacgacgacagcgtttgaatatgaagatgaagatggtgataggattacagtaagaagcgatgaagagatgaaggcaatgctgtcctactattattccacagtaatggaacagcaagtaaatggccagctaatagagccgctgcagatatttccaagagcctgcaagcctcccggggaacggaacatacatggcctgaaggtgaatacacgggctgggccatctcaacacaccagccctgtggtctcagattcgcttccaagcaatagcttgaagaagtcctcagctgaactgagaaagatactggccaacggccagatgaatgaacaagacatacggtatcgagacacccttggtcatggcaacggaggcacagtctacaaagcacatcatgtcccaagtgggaaaattttagctgtaaaggttattctgttagacattacactggagcttcagaagcagatcatgtctgagctggaaatcctttataagtgtgactcatcgtatatcataggattttacggggcatttttcgtagaaaacaggatttcaatttgtacagaattcatggatggggggtctttggatgtatataggaaaattccagagcacgtccttggaagaattgcagttgcagttgttaaaggccttacctatctgtggagtttaaagattttacacagagatgtgaagccctccaacatgcttgtaaacacaggcggacaggtcaagctgtgtgactttggcgtgagcacacagctggtgaattctatagccaagacgtatgttggaacaaatgcttacatggcaccagaaagaatttcaggagagcagtatgggatccattctgacgtgtggagcttaggaatctctttcatggagcttgctcttgggaggtttccatatcctcagattcagaaaaaccagggatctttaatgcctctccagcttctgcagtgcattgttgatgaggattcgccggtccttccgcttggagagttctcggagccgtttgtacatttcatcactcagtgcatgaggaagcagcccaaggagagaccggcgcctgaggagctgatgggtcacccattcatcgtgcagttcaatgatggaaactccactgtggtgtccatgtgggtgtgccgagctctagaggagaggcggagccagcagggacccccgtga

SEQ ID NO: 1531 - DNA, 96587 bp, Homo sapiens
  misc_feature (9475)..(9958): n = a, g, c, or t.
  misc_feature (58300)..(58319): n = a, g, c, or t.
  misc_feature (91094)..(91113): n = a, g, c, or t.
ccattatattattaatttatcttcgatgatatttatagtatcaatttaaaagctgtaaaacttcatgaaaagtagcttaaacaaggattttgataaacaaaagctttcagttttaaaagcaaatcatggaaacaacttcttaaagaagatttgaagtttttgttgttgctgttgatagaattatgaaccttataaactcagtattttttagttaacctaaatacataaatctatttgaattcatcttatgaaaagagatatgtcactagatatatgatcattatatgctttagtgattcatggaccttgttacatccatgctttgtaatgtatgaattatttagcaagaaaaatcacaataattttgttgttactcaaaaatttatgggttagcagaaacaattacgcagcccctgaagctggtatgttaaggtaacatcattaacactacgtagtataatttttttagtacttatttgacataacctttactgcttctgcaagaatatatcagtaattttataacaatctgtctgtaaacagaacattgaatttattaaccacaaagtgattcattttactctattttcatattagttcataatttaaaatcagacttaaaaagttgtctactcaaaccctaacggaagaataaaaatatacaaaataaaaaattaatactctagcaaatagatataaatgtaaaactccacttaaagtggatatttttatttcagaagatatagatgtgtaagaacgagatgaaaatagatacctttgttacctttttacacattgtatcaagacccttgctatgagatgaccaccaaaattttagtttcttatgttttcaaatctctaaatttacaaaatgaaggaagcaagaatttgaaagtttgaataaaaatctagtgtcacttaattttagatcacatttcaaaatcaacagtcatttattcatccaagaaatacttttgccttgacggtgttgaaggcacttgtcaatgttcccttgacagtgtggaaatcctagtaactttccctgccaacaaaatctagcagttctaaatctatttacagagtccattcaagccatactgaaaagactgctgtccacaactgggtgagaaccatgtgttatgaagttttctttccagcacttgtcatataataaaggctcaatgtttaataaatatgtgatgattcaaaattaaaaggaaaacttgcctttgtttttaatagctttttaaaaaacaggatactttaattggagatcatatggattctttacaagaacagcaataagttttgaaatattatctcagatgtaatgaattaactatgtatgctgaaagataagagattgtaatcttgttgaatttccttttgaggtatttcaaatggtgccacctgttttctcatacaataattttgctattttaaaatcaaatttagaatgatgtgtagaagtaaatgaagtgaaacatgaaacagaaagtcctagaatcagttagacttactcttttaaaacagaactagaagtaatgtgttagtaactagaagacaaaaagagtgttttaatcctcagaaaatggaatgggttacctcctgagacagtgagtcttctgttgttggagctgttcagaagctacatgtcaattccttagtgagatgggtagggggcgggtaaaattcttgaatgggaaggggattagattggtgattttttaagtcccctttaactcagaaattttataatcattgctgcatgtctatgtctggttcccaaccatgctatttagtttggtacttaccgcttttccagtatatgtggaatacaaagaaccctgctttgaagagaaaagatatggtttcagttcttgctctaccactgctggtagagtaactttgagaaaacttagagctttctaagtcttaatgtcttcatatatacaataagaaatgtatctaacacttacacagcatttacttgtgccaggtcctcatctaaggacctggcacatatgaactcacttaatcctctcataacgaccccatgaattaggtacggtttttatgtttatttttcagttgtggaaaccaaagggtcttgcccaaggccacgcatggtaagtgttcttcccatctgtctacagagtccacattctcagcctctcctctacacttgtcgtaagatgcacaagataattttgtcagacaatggatgcggaagtgctttgttattatgattaggactacatataaagaaagtaatatagataagtttaaacaacaagaagagagaaaaaataaagtttaagtgatttgtaggaacaccagtctactctactgaaagaaaaacgtgcggccgggcgcagtggctcacgcctgtaatcccaacactttgggaggccgaggtgggcggattacgaggttaggagatcgagaccatcctggctaacacggtgaaaccccgtctctactaaaaaatacaaaaaaattagctgggcatggtggtgacgggcgcctgtagtcccagctacttgggaggctgaggcaggagaatggcgtgaacccgggaggcagagcttgcagtgagcctagatcccgccactgcacgccagcctgggcgacagagcaagactccatctcaaaaaaaaaaaaaagaagaagaagaaagaaaaatgtgttatgtagaaattatgtctaataaaattttaaattaataaattaattcattttagagtatttaaaatccataggcttagcatatagtggtggtccatgaatgacctgtggaactgtaatttctgcctctgtgtgagtgtactttcatttccattcctgccgaaacagaacagggcaactctcctgttacacttttgggagtttgtgttcattttttgtctgtctcttcatagcctttaaaaaaaattaaaagggctgggggcagtggctgactcctgtaatcccagcactttgggaggccgaggcaggcagatcacttgaagtcaggagttccagaccagcctggccaatatggtaaaaacccatctctactaaaaatacaaaaattagccagacgtgatggtgtatgcctgtaatcccagctactcaggaggctgaggcacaagaatcacttgaacctgtgagccggaggttgcagtgagcggagattgtgccactgcattccatcttggatgacagagtgagactccatctcaaaattaatagatatcacgcaacatgagaataattatgttattgtttgttattgctattatacattattttttccaatcaaaatttcaaagacattgctggtgtgtagaagggcaacttttttttttttttgagacagggtgtcactctgtcacccaggctggagtgcagtagtgcaatcatagctcaccgtaaccttgacctcccaggctcaggcagtcctcccacctcaccctcctgagtagctgagactacaggcatgtgccaccatgcctgggtaatttttgttttttttgtagagacagggtttcaccatgttgcccaggctggtctcgaacctctaggcttaagcgattggtctgcctcggcctcccaaagtgctgggattacaggtgtgagtcactgcacctggcctatattcttttaaatcaagattaatcgacatatattggagtgtcatctgcaagggcccatactgggtgctgaaggagacaggtgaatttcctctttttttttttttttttttgagatgtagtctcgctctgttgcccaggctggagtgcagtggcatgatttcggcttactgcaatgtccgcctcccgggttcaagtgattctcatgcctcagcctcccgagtagctgggactacagttgcatgccaccacgcctggcaaattttttgtatttttagtagagatggggttttaccatgttagccaggatggtttcgatctcctgaccttgtgatccacctgccttgccctcccaaagtgctgggattacaggcgtgagccaccatgaccggccaggtgaatttcttaaacataggaggcaatcaatattttaaataaaatgtactgtttaatgggagtctataattgttactgtggcagtcttggtagtggtggtggtggaaaggcaagggggcaagtgattgatgttcaaggcaggcaggggatgcaacatgcaatggaagttgcattcctattactcaacctactctgcgttcaaaactccctgttcagtcagcaaatattattaaagtgcccactacgttccagatactctcttaggtactagggatatggaagtgaataaaacacacaatttcatcccttcatgagtaaaacatgtggtatgttaaatagtgataaatgggcagggtgtagtggttcacgcctgtaatcccagcactttgagagacatgcagatcacttgagcccaggaattcaagaccaacttggccaacatggtgaaaccccgtctctactaagaatacaaaaaaaacaaaaatagctgggcatggtggtgcacgcctgtggtcctagctactcagggagttgaggtaggaggatcgcttgagcccaggtggtggaggttgcattgagctgagatcacaccactgcactccagcctgggtgacagagccagaccctgtctcaaaaacagaaagaaaaaaaaaatagcaataagtgccaggagaaaaacactagggaagaggattaggaattgtgcatgccttcatgcttgtatctatgggtttgaggatggcctgcaatctcaataatgtgccaagggagagcctcagcaagaaggtgacctttgagtcaagacctacagaatgtgaggtaatgacccatgcagatatctaggttaagagcaatccaagcagaggaaatggcaaatgcaaaggccctgaggtgggatgcgggacatgttcaaggcacagtgaggaggaggctggtaggagtgagggagattagtaggaaatgaagtttgagagtttagatgggatgaggggcagaatgtgtagagttttgtaggccaagaaaaggattttggcctttttcctgcacaagataagaagctgtttggagagttttagtcaaacaagtgacttgatctaactgtggcaactgggtagataatactgttggtagtaggggcaagggcgaaaacagaagatgaaagaatagtttggactggggtagtagcagtgaaggtggtgagaaaggctcagattctggattaaggattcgatactgggatcagggtaataagagatgaaagaaaacctctctgaatttataacagcaaaatgtaatttttctccttaaaaaaataaatcacaacaacaaaataaccctattaaaatgggcaaaaaaaaaaaaaaaaagccaggtgcggtggcttatgcctgtaatcccagcactttgggaggccgaggtgggcagatcgcctgaggtcaggagttcgagaccagcttggccaacatggtgaaaccccatctttactaaaaatacaaaaattagctgggtgtggtagtgcacgtctgtagtcccagctactcgagaggctgagggaggagaatcccttgaacctgggaggcggacgttgcagtgagctgagattgtgcctctgtactccagtttgggagatagagcaagactctgtctcaaaaataaataaataaatacacaaaatgggcaaaaaacttcaataggtatttctccaaagaagatatacaaatgagcaacaagaataggtaaagatgttcaacatcactaatcattagagaaatacaaattaaaactacagtaagatatcacattatacccaacaggatagctactataaacaaatatagaaaataaccagtggtggtgaaaacatggagaaattggaactcttatgcacttttggtgagaatgtaaaatggtacagccactctggaaaacagtatggtgattcctcaaaaaattaaacatagaaaatatgatccagcaattccacttttgagtatacatcccaaaaagtcgaaaggagagacaggaacagatatttgtacccccatgttcatatcagcattattcacaatagccaaaaggtggaaacaacttaaatgttcattgatagatgaatggatacacacaatgtgttatatacacacaacagaattttgttcagctttgaaaaggaaggaaatggccaggggtggtggctcatgcctgtaaccccagcactttgggaggccaaggtgggtggatcacctgaggtcaggagttcgagaccaatctggccaacatggtgaaaccctgtctctactaaaaatacaaaaattagccttgtgtggtggtgggcacctgtaatcccagctacttgggaggctgaagtgggagaattgcttgaacccaggaggtggagcctagatcatgccactgcactccagtgttgatgacacagcaagagtacatcttaaaaaaaaaaaaaaagtaaggaaatgctgacacatgttacaacatgatggaccctgaaggcattataccaagtgaaataagccagtcacaaaaaggcagatactggatgattctatttatatgaggtatctagagtagtcaaattcatagaaatagaaagttgattggtggttgccaggggctggagggaaggggaagtgggcagttgtttaatgaatatagagtttcagttttgcaagatgaaaatctggagattggctgtacaacaggatgaatgaatgtatgtaacactactgatctgcacacttcaaaatgagtacaatggtaaattttatgtgtattttatcacaaggaaaaaaatcactagacatctaacttttcagtaatgtgtctattttcagttaaatttgccagttaactgaagccaatataggccagttttcatattccttagtgttatcacactggtgcacttactgttttaccattttcccttctgatttcatttttctgttagcatttactactatctaacatatattttactcatttgtctgtgttccccatcagaatataacttcatgaggggagggattttctattacacttagtgaaaagtaaatccctcaagtaggaacactacaagtaagcacagttttttttttacagtaagtttgcttaatggctagtaaactatctcagccagtacctgagtgactattctgacttgtatcatttaacaagaaaaaaggcctggcgcgctgtctcacgcctgtattcctagcactttgggaggccgagacgggtggatcacttgaggtcaggagttccagaccagcctggccaacatggtgaaacctcgtctctactaaaagtacaacaattagctgggcgtggtggcacatacctatagtcctagttacttgggaggctgaggcaggagaatcgcttgaactgggaggtggaggttgcaatgagccgagactgcgccagtgcactacagtctgggtgacagagtaagactccgtctcaaaataaataaataaaataaaataaaatgaaaaaaagtactaaatgcaaacttcttaagatcacatgcaacttcgatgttaaatactaaatattccttaaatttagacagtattcaatttggtaaagatcagaaagttatattttgtcatttatgatatcaagtggaatgtattatcagtgattatgatgcttctcgcaatgagagttataactttctggaaaaatccttgctcaaatcatcaaagttaagatttcttactacataaaggctatgaagagctgacgtgtaattatattggctctgcaaatattggaacagaaatatgagtttgccattagtgtaagaaaagcttcagaatatgtatgcaaatttggcaaattgagttggttttccccacggtacttcgaataaaagagacattttaacaaatcacaggttcatagaaaatctctagtttcgtggtctattttctaaaataataggaaatgaacttttaataaaagtacatgaggacttttgatgaacggtttatttttcacagaagtgaagtgcaggtgaaaaggggaaattcctagaatatctgaaggatctgactaaatgaatttctacctaagctattgatttacagtaacttaaaatgtgataatttatctcctacaatggcctttcaaattaaatataaaagtaactcagagtaaagtatgcagaaaaaattttggtattgtaactgaaaatgaccaacattaatttttttctctcacattaatcaagcaccttactgttagaagggaaactgacaagcctcctcaaccgagtttatacaaaattcaaccccagaaagtaaagccaattcgtgcaccttcataagaaagaaataaaggacgaacctacacattacaatttgtaaagaaacttctgtagaggcaccatcgttctacaaccttatgcactttaaaatctgaggtaacaaggcatttgaagataaccaaggttggccgggcgcggtggctcacacctgtaatccccccagcactttgggaggctgaggtgggcggatcacgaggtcaggagtttgagaccagcctggccaacatagtgaaacccagtctctactgaaaatacaaaaatgagcgggcacggatggcgcacgcctgtagtcccagttactcggcaggggttgggggctggtgggggtggtagtgctgaggcaggagaatcgcttgaatccgggaggctgaggttgtggtgagtagaggtcgcgccgttgcactccagcctgggcgacggagcgagactccgtctcaaaaaaaaaaaaaaaaaagataaccaaggtttattgctacttccgtgatatcaccatatcaccaactgcgtaagcagtgctatttagttgaaaatacatggactagaccgaatatttctgcaacagtttaataagagacgatgatgcgactactgcagctgtccccaggcaattaaactcttcggcgaatttctttactattgcttttgaacagggaactgtttgctattttagggcactcgtgcggtaaagaacttcactgaaaaatgcaaatatgttttgctaatgtgggagaaagatgatgatcctctgaacctgtgacttggaaggggggataaaaaagaactatttcttgaattctcgccttgctcttgctgattcgatgcacacaaccccacgaacattcagattcatggcttgacaaagtggggataaccgggagctgcagccccgtctttgaagcttttgtaaagacaaacggtctgcaatgttaagccttaaattggcttttggcggactccagccttttacccttcgtttggtagatgttttcacctcgctgtcattaagcagggtcaggaaatggaagggccgtgaccgggtcgccgcgggcgctctgtgggcgatgagggtctcctgagcgagcaagaccagtctctnnnnnnnnnnnnnnnnnnnnnnnnnnnnnnnnnnnnnnnnnnnnnnnnnnnnnnnnnnnnnnnnnnnnnnnnnnnnnnnnnnnnnnnnnnnnnnnnnnnnnnnnnnnnnnnnnnnnnnnnnnnnnnnnnnnnnnnnnnnnnnnnnnnnnnnnnnnnnnnnnnnnnnnnnnnnnnnnnnnnnnnnnnnnnnnnnnnnnnnnnnnnnnnnnnnnnnnnnnnnnnnnnnnnnnnnnnnnnnnnnnnnnnnnnnnnnnnnnnnnnnnnnnnnnnnnnnnnnnnnnnnnnnnnnnnnnnnnnnnnnnnnnnnnnnnnnnnnnnnnnnnnnnnnnnnnnnnnnnnnnnnnnnnnnnnnnnnnnnnnnnnnnnnnnnnnnnnnnnnnnnnnnnnnnnnnnnnnnnnnnnnnnnnnnnnnnnnnnnnnnnnnnnnnnnnnnnnnnnnnnnnnnnnnnnnnnnnnnnnnnnnnnnnnnnnnnnnnnnnnnnnngctgcctcctcatacccacacggcggcagagaccttcaccatagcgttcgctcaactccagaaccttccgacctccgctagttcctgcgggcctttgcccgcttcccggtgcaccctccccgggagacacctcagacccccgacagcctgggcaggctcggtgcctgcgggtgcgttcctgatcacccctcccctcttccctccccctcatcctccattcccttgttttcaccctctgtcctctgcccgtcactccccttgtcacctcttggagccccctcctaaccagcggccagtgggtttcccataccccaggatgtgagcctctttaacctgtaatgctgtggctagcccttggcccctttcctgccatggagaaccaggtgctggtaattcgcatcaagatcccaaatagtggcgcggtggactggacagtgcactccgggccgcagttactcttcagggatgtgctggtgagtggtaatctcagtgtccggatgccagcaagggggactcagggacttgagtagtcagcaccttgaccactggtgacctgagccagtggcaatggctactgctggcttcctgtggaggcagttttattgcttcaggcacagcattgataaattgcaaccactaaaacctggcaaatgtctaggaccctggggagatagatcaatctgactgaacccctgccctcagagagctcatggcccgggctgggacacacatatagacacaaccacgcaaatgcaaactgctgaatctagaagagaggttttttccccccaagtgtttcggggaatgtccttggacagattccagccttgtttttctactgagttctctgaacttggtgaccagctgagaaagggaaaaaggacaactttaacttaccatgtttgagcacactgtttcattaatttattttgagacagggcctcactctgtcgctcaggctgcagtgctgtggcacgatctcggctcactgcagcctctgcctcctgggctcaagcgattctcctacctcagcctcccaagtagctggcacatgccatcacacctggataatttttgtatcttgtagagacgaggtattgccatgttgcccaggctggtcttgaactcctgcgatttgcttgcctcggccttcccaaagtgctgagattacaggtgtgagttactgtgcccagcctgagcaaacttaaagcatcattgaatgtaagacattttacttagaaaaaaatgctaaccatgacagtatgacacatcatccgttattaaaatgagtccagtttcagagacggtaaaagtaagggaaaatgtgcatcttagaattggtgatattttacattcagatttttcagaatatatttcaaataaaatgatggaattttagagcagagtgtaacactgtaggtggcctgttcagctgatgtttcttttttgcagatagttactgaggagcagtgaggtgaaatggcttttccaaagctgtgagctcctgagtgggagagtcagtaccagaactaaaattttgtttcattgacttagtaggtttctttccctacatgttgcagccgcttctaatctttctggtattcatttgagatagacagggtgccttgtgcccattctacatgcagaataactgaggcatggaagacagaagcggacattccgaaaagcacatcactacctgcaagttaagagtgggcaaggtggcaggatcttgggaagaggaagatttgtgatgtgatttttcattgtcttgggtaacttaatcaaaatttgatttctataacttcattttgagttctagatgttactgactgcccaggccatgcagatttttgggtgccttgaccaggagctttccatattgtgcatcaaatgccatccttctctttgtatccggagttctccacacagtcatgcacatacagatttcccctcatgataaggcccaggctccttcatgtggtcctctgggcacatctggattggcccctgtctgcctggcacctgtgtcatctctcttcacggccccataaacttctgtgcctcacttacataggttgattttcatttctcccaggtgtccaggctgtctgcactctgctcttcaccggtcaattcccacctgtccttccaagccaagttgtgctttttctctgtgtcattcttggttatgtgccccacctctgtgtcgtcacagctttgtgtgggtcccccagcaaagcacatgtttgatcatgattctttgtctcctccactagatggtaaacttctggaggagatagatatgtttgtttttgtttcttcataggaccccaaaatacttgtttaagaagggagcttaaaagaggatgcatgcaattatggttctgtggacagaacactaggtttagagtcaaggaatttgggtttaattgcaagctgtcccactgactaggcaagtcagtctacctctctgagccttagtttccttatttgtaaaacagggaaacttgtaccttcctcaaagacttggaaagattatgtgagattgtgactgtgatgagaaagatgggttttctcttactcatttaaaacaatggaaggttgattattatgtgattatattatttggttatgtgattatttcaagaatagcccagtgtttaagaccacaaactctggagccaggttgtttaacttgcaagttgtactactggggcaagtatcttctgtatctcagtttctttatttgtgaaaaaaaagttggggaggggtgaaagtaatgcctacctcctagagttctgaggactccttgagttgatacatgtaaagcactcagaacaacttagcacatagtaagcgctccattagtgttgttattattgatgggattgttattataagggattggacttgggtcttctgtttcttgagcatctctaagttgtacctggctcaaggctgactggcttaacaggaaacacgagtggccccaccactagagctcagcatgccaggtgtctgcacacttttggctaggtaagcccaggtggagcatgttttgtcagaaaggcctgacgaaggacctgtggcagtgggtgttcagtgctatctcctagtgctccattttagcaaatgttcaagcccagatcatggcagactcctgtgatctgttctccaggtttacttcatctcttcatcaagaaaaggcaagaaccaagagacacgtcagcatctctggcttggaaccttaaactttaaagtcacgtggaacctggaagaatcccctcatctaattcagactcatttcgaatgaagaggcatgaaccccacagggggaaaataccttgctaaagccacccagctaatttttggcagaacctgacacagatgccagaagcaggttgtagtcaccgagtcagccataactgagtgtctcggacctgaagtcagcagttgagggctccagtcactgtgcatcaaatagctgggagaccctgggcaagtcagtcggtctctctgggccttgtcttttgtctgaatcatcagggactggctgaactatggaggctgacctgaccctcaaaggtagagacatttgggtcttctgttttgcagctttctgtgtttctctttttccctggagactgagttcctagttttgggaaaactatacaagaggtctggttagtgtgtgatgagagagaatgcccaaccctctcccctcttctttttgtattctgtggtctccaagctcagatttcccctcatctataagacttctgggccaggagtggtggcttaggcctgtaatgccaacactttgggaggccgaggtgggtagatcgcttaaactcaggagttcgagaccagcctgggcaacatggcaaaaccccatctctacaaaaaatgcaaaaattagtgggggcttggtgacactcacctgtggtcccagctattagggaggctgaggtgggagaatctcttgaacctagaggtcgaggctatagggagctgtgattgcaccactgcactctagcttgggtcacagagcgagaccctatctcaaaaaagaagaaaacacacacacacacacacacacacacacacacacacacacacagatttctgtctaaactgagtctgtgattttttcctttctcctgagttaccaaatactattggctgtttatgtcttttgtttggtgcttatactcttaagtgttttatattactagtctttcaggtttgtctttatctctgtaaccagtttataatcttcctaaagtcaaggatcaagttttattgtcctgtagcctacagctttgtgatctttatgctcgtggcatgttgtagatgctcaatgatgttttggatctgtcagatatttgtctgatttattgaaaggaagaagaaaagtatcaaaaaatggtcatcatcaaaatatgtaaacttcggttttcttttttcttttttttttttttttttgagacagagtctcgctttgttgcccaggctggaatgcagtggcgtgatctcggctcactgcaacctctgcctcccaggttcaggtgattctcctgctttagcctcctgagcagctgggattacagatacacaccacacatccagctaattttgttgtatttttagtagagacagggtttcaccatgttggccaggctggtcttgaactcctgacctcaagtgatccacccacttcggccccccgaagtgctgggattataggtgtgagccactgcgcccatcccggttttcttttgaaaccttctttaggttagttaggtacatgttatattgtcaagagcagaagaaggccgcttggaaataagtcactttagctggaaaatgtatataaaatcatcaaatgtaccctgctttaaaatgactagtagatattactgatgtttaaacttcttacctctttgtcattatgattgccccactttatttgctttaaagaacaaaatggttggttgtgttcacatgattctctcactcaagtttgctttgttctttctcccttttcctcgtatcaggtgaggagcatgtgcagtgccttgtttatgtcgatgggctaaggcatgccattgccactgagcaggttttcagttggttgttagaactctgcactttgatggggtctgctattcctaagtaggaaggagcctaaattaatttgctaacactatagaggtacagttcacatctcaagatcggagtttcctggaaataactggtgataacctagacttagagagttggggatgaagcagttgttttcccctcgtttttttaaacctacactggctagaatgagtgttcaataagtactgctgaaggatgaagtcagtgagtgaatcaccatcctccactgattgtagggtgctggaatttcaaagtttattacgaagtaagctttgtaatactccagttattggtgttttgttttatttatttgacactaatatggcacttgccatgtgctagacactcttctgagtactttacaaatactaactcatttgttaggtacagctaagatctgatattacacatgaggaaagtgaggcacagagagattttgtgcactcagctgtgccagagagctagcatccagctgtagctgtttggctgcaatttcatgttttcaggctttccactggattgcctgtgtgctttattctgtactccctttacagtttcctgtcaataaatactttctaactatgagagtgtagaaataattttttaacactaaaatcttttatagatgcttcctcaaaaagttgatgtttcatttgtgaggactagactcagaaaaaaaaatctcttttggctgtaatgagcaaggactgcctaagatagtcctctttgatcagttttatatgcacagatttatttttgaaaaaaaaaaaaagcactatagaggcaagactattatgcaaattgccactgcagcaaaagcttctaaagaattgcctttagaaggaagttgcagccactctgctaagtgccctgcttggaaaggctgtgggctccctgctgagaaatactgcgagcggctttgtcagccggctgcctggtgccagttctgctgcagcctgggagggacactgtggcagagctcctggagagaaatgaggtttgcaggccattggagttggactggacatgatggagggtcactttccccagagcgtaggtgttctatgcttattcaattaagctgtctcagtatactaattttcatgtgttttcaactttatagatttatttaagcattgatgtcagattatataccctttttagatttttgttgtaggctagattaactttatttcggtgtcattaagtatgttttctgttgcttaagagtaaaggttgataagaactgtttgtgttaaatgtggcataatgggtttatatcgtcatggaaacttgggtgtcgaactcctaccatgatgagtgcgaggcacagtgttgcttgttgtatatcaggaactacatttgttgaatgtcttcaatgtgctaggtctaagtttatgtttattagattaatttttaagctacatctataagtattaccagacccattttggagggtaatcaaattgaagctcagagaggttaggtgatttttttcccagagattcagacctacgtcagtctgactctcaaaacccctctctctttcaactgtagtatattccacagcctcccatagaagaaaccaagtttttgtaaatacatgacggtttatttgtatatagactgttgaactgagaataaaatatgttattaataaaatgtggaaaagtttccttaaatatttttcttcctggaatagagctttaaactctgggtttacgttgctgggctaagtgtgattatgagctaatgtttttatagtttatgctaacgtttcaaaaatctttcccaggttctcatatttcctgtaggatttgccacatgttagcaataaagaagatggctaattgtgtttctttattctttctttgtttaggatgtgataggccaggttctgcctgaagcaacaactacagcatttgaatgtaagtctggcttgtatactttcttgactattcctttctgcagtcattttttaaagggtttatgggtggcattactttagaaactgacaaaaacagattatttatgaccatcatatggtacatttaaatatttataaattgatataagtttaatgatgatactgaactgagtaatattttcttatttaatcatatcttgggtgagcatatttctacaatatagctttaattaccagcatgacctttatctgctcttgctcctgattgtgataatattgcaggacaaaatgaaacgtgtaaactacctgtaggccagtgattattgattaagagattttaatccattgctgctttaaaacatagcaacaaagtagagcttttaccatgagcattacatggaataattctgttttagtggggcttagcagggatgctagatggtgacaggaacacttcaggtctttagtccttcctttttccccacagttggcctggggacagggccagggtgacctggggactagaaaactgttttgtcatgaaccaggtcattgcagaggacatcatggaatgagtcatgctacgatgagatagtcagtagcataagggcccggatgctgagagggatgaagtaagaactgtagttttttttttttaagatgagggctacttttttcttttctttttcttttttctttttttttttgccgcagactctcactgtgttgcccaggctggagggcagtggtgcgatcttagctcactgcaacctctgcctcctgggttcaagcagttctcatgcctcagcctcctgagtagttgagattacaggtgtgcaccaccatgcccaagtaatctttgtatttttagtagagacagggttttgccatgttggccaggctggtcttgaactcctgacctcaagtgatccacccacctcagcctcccaaagtgctgggattataagtgtgagccactgcacctggccagagggtcacttcttaatgtagaaaaatttcagtttttccacaataggatacttttttgtttctgttttttatgaagatggttacttacagagaatacaatgagtacttcctttttggaggataattaggcatttcttatcaacatataaaatgtgcaaaacctttgacttagcagatccactgtcaggaagcagttcaacagaaatagctacacatttgttgaatgcccatcaaacaaagtgttcattgtgagatcatgatgataattattgttatttttagagacaggatcttgccttggtgcctagactggaatgctgtggcatgatagctcactgtaaccttgaactcctgggcttacacaatcctcccacctcagcctcccaagtaactgggactacacgcatgcaccactatgcttggctaatttttaaattttatgtggagatggggtcttgctatgttgtccaggctagtcttgaactccttgcctcaagtgagcctcctgccttgacctccctaagtgttgggattatagatgtcagccactgtgcctggcccactgtgggattatttatttattttggagatagggtctcactcttttgcccaagctggagtgcagtagtgagatcacagcttgctgtagccttgacctcctggctcaggcttgtgggattattttcaatagcaaaaaattagaggtaaactaaatgcctattataatggattaataaattactatttgtctataattcaaagcattcaacagtgactaaaaagaatgagttaggattttttacatttgtacggaaagatatctgtgaaatattgttgaataaacaaataatgcatatagtatgatcccattttgtaaaatatccaaccacgcttccccaactttatgtgtgtattgaaagataggatctgaagagtgcctactacagtactttccagtgacttaccctgtaaagtggacttggggcctgaggcttgggttggtgggggcgggagggggtggatgaatgatcacactttttactttgtatgtttctctattgtttgaacatttttcaacaatcattgcctgtttttaaaagctataatgagtagaactcaatgtaattagtattttattagtcacattgaactctgtactatagaaaaatagtacatctgtctgaaatacatactagtgttgcaagctttattcagactctttgcagtaactccttgcaggttccacgggtttcatggacagtctgatagttaacattcggagtacttactgttgacagatgctttgctaagagcattccatgggttatcttatttcttttaaccatcacaagatccccacgaagtactcgttatttttttgagacagagtattgctctgttgcccaggctggagtgcagtgacatgatgatagctcactgcagccttaaactcctgggctcaagtgatcttcctgcctcagcctcccgagtagctgggactacaggcacccacctccacacctagctaattaaaaaaatttttttgtagaaacggggtcttgctgtgttgctcaggctggtcttgaactcctggcctcaagtgatagtcccatcttggcctttcaaagtgctgggattacaggtgtgagccactgtacccacgaagtacttaaaaggacattattagctctgttttttggttgaggaaaggaaatctttaagcaacttgctgaaagtctctcagctgttaagtggtaaagtggaatttctggagtagtttccagagtgtatattctcaaccactgtactggacttgttttgagagttgtcataattattgaaatcatatattctggttgttcttaagcatggtaaaaagaagtttactttgtactttttacttgcttttcggatccccaaagtggcttgatgtgcctgtgcctgcctcattggcttccagttagggttcataataataataatactgattattttaactatcattcattgatagcttgctctgtgccaggcagtgtactagatgacttgcctaagttgttagtaatctttatactgagtctgtgaaataggaaaattatacctgtgaggaaacgaagcttagaggcctgaaatgattgctgaatgtgattgcttggaacggtgaagcccaggttcaaacacacatctttttgactataaaacttgcactctttatccccaagtgtgtcaaaagcctgttaagtgtaaatatagataaacctctactactccaggtttacgttctgtgatatcatgctctttcttttgccccatcaatggcagcagctctgtgcccatcttcatgtgggccagttttaaatgaaaaacaataaatacaaaacatacccacagacaaaataatgacagttcttagttgttttgtgtttggattatcatgtactttccactatagacttgaaatcctaggctggcttttttcatgattattttgtggtgacttttttttctgaaccagaaatccgaaccaataaatggaatctatgtttaagaaatagttgaggccgggcgtggtggctcacgcctgtaatcccagcactttgggaggccgaggcaggtggatcatgaggtcaggagatcgagaccatcctggctaacaaggtgaaaccccgtctctactaaaaatacaaaaaattagccgggcgcggtggcgggcgcctgtagtcccagctactcgggaggctgaggcaggagaatggcgtgaacccgggaagcggagcttgcagtgagccgagattgcgccactgcagtccgcagtccggcctgggcgacagagcgagactccatctcaaaaaaaaaaaaaaaaaaaaaaaagaaatagttgagaagatatagcttataaggaattttggaaatatttcagtggcttatgggtataatggaacaacccttgaataaatacaactttaataaaagaaatacttatagtaatacatttttggtttttttgaaatggtctggctctgtcacccaggctggagagtgcagtggtgcgatctcagctcactgcaacctctgcctcccagactcaagcaatcctcccacctcagcctcctgagtagctgggactacaggtgcatgccactacactggctaacttttgtatattttgtagagatgggctttggccatgttgcccaacctggtcttgaactcctgggctcaagcaatccatgctcctcagcctctcaaagtgttgggattacaggtgtgagccaccgcacctggccttatagtaatacatttaatactgaaaatatacctaacactaattgatatcttatataaaagaaatggtgttatagttagtgatatgaattaagcaacaagagatagggtagctgtcaaatgtacctgttttgtataaatgtagagaaaaagagttgagtgagtggaaaagaggggaaaggtcaggtaatgttacagattctccagttctgagaaatggcgtctcttcaatgaaacctccggtgattccagatggcattaatctctctgcacctttactagagcagggaaccccttcaacctgccttctggtgtgtgtgtgcatgttaacttccctcattacattttgagtcacttagtgataggtacgatgttttattccactctttctctcttcttagtaatgagcttgctgccttagaggaacacacttgttgaatgagtggaacgttatgtgtgtccatattcaaatgaaaattataaaatgtatatggtctaaatctaaatgagtaatttgcgtttttggattatttgtgttatagcctgagcatgggatataattggttggtggtggacagttcaggcctccaaatcaaattcccacatttgactgacccaagggggtcaaacctgaggagctgtattctttctgatttctttttctgggtgtggtgtttccaaggggagttagggctggatgaggagagggacatctgtctgcagaactcaccttttgggctgatggtcctaaaccttgttttcttattaaaaggacctcttttaggtccttattctccattacatctagagctcacagttctacaggctgtacaagcatggcactagcatctgcttgcattctgctgaggaagcttttacttatggcagaaagtgaaggggcagcaggcgtgtcacatggcgagagagagtggaggaggtgccaggctccttcaaccaaccagtttctcacatgaaccaacagagtgagaacccactaccatagagagggcactgagtcattcatgggggatccacccccacgacaaaaacacctccttccaggccccgcctgcaacattggggatcactttggaggggacaaatattcaaaccatatcattgtggaaataaatttgtaagataaattcttagagttggaactactgagacaaagaatacccatatttaaatttcaatatctattactgtgtttgctcaccaaaaggtagaaccaatctacactcacaccaacaaggtatgagaaggcccatttccctccaaccccatcaactctggatattagcaaaccttttagtcaatgtcagtttgataggtgaaaatattactgtgttactgttttattttatattttttaaattgtaaatgagcttgaatatcttctcatttgtatttggctatttgtatttaatttccttttttttttttgagacgcagtctcactctgtcgcccaggctggagtgcagtggtgtgatctcggctcactgcaacctccacctcaggggttcaagcgattctcctgcctcagcctcccaagtagctaggactacaggcatgcgccaccacacccggctaatttttttgtatttttagtagatacggggtttcaccatgttgaccagactggtctcaaactcctgacctcaggtgatctgcctgtctcagcctcccaaaatgctaggattacaggcatgagccaccgtacctggccagctatttgtatttcatttctataaactatttgtcgtctttgcctgtttttctatttggttatttatctttttctaattgatttaagggttttccaatattaaggttggccctttgtcttgtgtgttacaaatgtttttgttcagcttattgctcttttcggtttgttctggtcttcttattctctcttcttttttccgtggagaagtttaaaatttttacatggtcaaacttacttattttcctttgtaacttctgggtttatgtcatgcttagaaaggtcttctacagtccaggatattgaagaaacattcattgatattcttttttccttctactttaatgaggttagacacacacacacagttatttatataaatttgtatgtgtcgtattgtgggtttttataaaaagcatgtatttttattacaaagttcagaatttgtttatttttctttttcttttctttcttttttttttttttgagatggagtcttgctctgtcgcctaggctggagtgcaatggcatgatctcagctcactgcaacctccgccccctggattcaagtgattcttctgcctcagcctccctagtagctgggattacaggtgcccaccaccatgcccagctaatttttctattttttagtagagacagggtttcaccatgttggtcaggctggtctcgaactcctgacctcaggtaatccacctgcctcggcctcccaaagtgctggcattacaggtatgagccactgctcccagcccttgtttttcttaattcttgcaccatcttcagtttattttggtgaaataaatcaggtggggatccaactttatttttcaagcagatagttgattccacaccagttatggaatagtttttcttttcccagatgtgagaacctttctgagatgaaggtaaattccataaccataaaaaatcctgtgtgtttgcatttctgggtcctacatatgctgtaagagcttgacattcatataggcccagagacccctgctgattttcacagtttcattagcagattaatgagtacaccaacacatgaggtgataaaaatcaaccgtgcccactaatgcatttcctgtgcatatctgttacttgtgttcctctgccagcattttctctagagaagtaactgctataaaatgactgttggattggtgttcgtggacagtaaaatctcactggtgacttgaaacatgcattttaagtccatgtagacaaatgctgtcttaaacctataaaaaccatgtggtttcacttttctattacactcatgtattctaatctgtagctctcagaagtatcttcacacttgtcaaaccgtgtgtctgagtttggttcagaaaacatggttatagaataaatatttattgaatttgtgcctttcttcaaccccattttatactctctccttattgcacagaatcattttcagctgttttatgaactgctggaagattattttgtatttagggtggaaatctttaaaccaacacattatgtctcattttaaatttggcatagtatgaccatttaaagctaaattgcaattctggaagttgtaaattctcagagtataggaaacaactatagctgataactggagtgacacctgtaggagatactcttgtgttcagctagccatgacaatcttgttaagaatagttgggtgggagcctctttttgcttcagagaagagtctaaatcataaaatatttggaagaaatgaagtttcatttccttaaactattgtatatgtaaaaatataaagggtcatttttaagtaaaactaggtaagttagtgaaaaatggtcacaataaacctacactgagcctgaaaattatttaacatgtaagagttaattatgcatcctagaatttggggcaaaataagagagctttaatttgttgaaattttggctggaaatattactgatgcaaaaagtccaaatcccttttagtcttatgagagtagtcatttcttattaatagtcttgctaatttgtatgaaaattaagaagtttgagtcctttactcaagcaccagactagttgttccttaaggtcagtggacagtgcagcttatttttgaatccctaccataatggtacctggcacgtaataggcactctatgtgtgtttctggaatgcatggatggttgaagagtgaagtaataaggataagctttctatatcccattcatcagcaagtcctgttggctctatcttcaaatttatccagcatgtgatgacttcttaaaacctcagcttggtttaggccaccatcatctctcaccgggattaggacagtggcctccaaactggtctccctgttctacttttgcctctatacagcctcttttccacatggcagccagagtgattcttttagaagtcaggtgacaccaccacgctcacaaccctccagtgatttccatctcactccaaagtaaaagaccaagtccttaaaatgccctccaaggctctgcattttcgcatctggcctcaacctgtcccaccattgtttctctgaacccgtgtgtttctccccaaacctctcattctgttctagccactctggcttcctttcggtctgtcaaacatgccaggcattcctctgacccagggcctttgtattagctgctgcctctgcctggaacagtctttccccagatatcagcaaggcccactccctcacctccttcagtctctttccactagagtgtatgttccatgaaggcaggattttgtttgttttttcttttttcactgttactgtcccagtgcccagaacagtgcccaccacatagtgggtacttttatttgctggaaggaggaagaaagcaaagaagtaaggaaggaatcaggaagagggaagcaagaagctaaattaaaactcatggatatgaagatgtggccatggaaagtacggcctctggtcctgcccacgtcattaactccgtgcctgagaagggctttaaacatgacatcttttccggtagtttcctgttgatgtctttctaacttctataattatgttttcatttcttttctcttacctgggaaaagtgcctttgcagtagttctaattgccacctggcacagaaggagtgtgacaaatgacatataatatattgccttaactttctgtagctctttgtagaagctagattgtttctcttgaaagccttcttgagcccctgtcactgcagtgggtgctgtttggctgagagctccctggagtctgctgtttatctgctgtttactcagtaggccattgtgaccgccccttacctgaggctgcctctcctctctattgggcctttatgtttctcttcttggtttttcttttggattgcatgttgcctcaaataaaattgctaacaacatatggcctgttatgattctcttttcccaaactctgccattttgtatatttgtgacacactgcagattttgtgaagattgcttcataatatttgtttaccatctgctgcactctatttggtatcttgctaggattttttcctccattttaagtgacattaacaaaatctagccagtacataggctttctggttctacttttgcttccctaatgtgctggaaaatcatattactatgctccaggcaactagagaagcctggaattctcattgtgaaccaatgtatcagatctgtctgctcccctacccccaccccttttgttggtcatatccggtaacgcttttttggtcagatggcaaagaacctccatgtataagatagaaaaagctcaaattattttcttgcttcttagtaccactactttctagtgttgttctctaacatatttgtacctctgaaactttgtggcagtttagtaagtttttatgatttatggttccagctagtgtaatttttacagcttatccagcttgataggcagctagcctgaatcttggctagatgggctgtatatatccaagtttttgttcagaaaagtattttaggctactgtcatagtaatttgcttagtatgtatttctgctttcttacccttcactaacttttcgtagctgtcaattcactgtctttagagagaagtgcatttttgctttacaggttaaggtgagtggtttgctcttgggctgccatcaaggggtcagagacagctcagcttttgccttttggctggagccaccagtcttctcatggatatggttacttttctaactcagtttcctcttggacaaaaacaaggagtctttaataaaacgactaagcatagatattaaagagcaaatcagacagtctcccaaagagcagtttgtaaagaaaaccaatacctatataaagctaggtatcctattaacccacaacaactattcatcagtatgccatataagcctgattttatccccagcctttattagaatgcctctttcaacttatctgaaatcttcttttggagtcagaccccctaaggggagagttccaacattttatcactgggttgatgtcaaaagctattctaaccttttggcttcagttttctgtccacttaagcaaatgctcttgtaatgtttcatagctactttttatgcaacttctcttcaagaaattattctggtagctgacttctttcacagatctttttcttctgaaataatccctcaagagatttcttagaaatttagaattccaaaatattttggtttaagtagccttaaaggttcaagctctagctttgagaagttgaagaactctccttttgttcttgattgtgatttaaatgatttttatgtaatcggtgcccccccctttttttaaataaattataagaagggttttcactcgttttaccaaaatataagcacttgcccatcctatgtgaacaataccttattcaggtcttgggtatattgaaattcaaatataagcagtctctttttaaccataatctctatagctagcttagttgcagaaatgagatttattttaaaaaaactactttattcaggctggaatttgtttttatgccaagttcagaacttcataaagaacaaatcagtttagcctacatttaaagagaatttgacctggttttaaagcaaaaatgtaaagtgctttcatgtgtggtgatatgtaacattacatcatttgtactttgttttttcctgtctcctgcatttttaagaaaactttcgccttaaccttgaaaatattagtttctagaacttatatatagacagactcctttcttctctctctacagctggaatggcatttctcccccaatttggctctagagattctatatctaaagcgaatgaaagaatctttatgtgtgtaacatctctcaggactgtgccttcttcattactgcaagtgaccagtgtatgccttttactctgaaaacaggcaactcttgatagcagaatactggtagtgactctcctagatttagacagtgtgatcttgatgataccgattcacactgagttggggaactctgcagcagtgaaccaggatccagaaacaagtgcttggaaagaaaacaagtgcttggaaagagtgagagctatgggtcactgaacaggactggtccaagtgctggtttcgatcatgctatcagattgctgttggccactgaagagataaagggagaaagtattttgcttgaaattaggctaattgtgaaagaacacaagcttcctcctagggtccccatagcctagtcaccaagcagggggatatccttggaactacagccagacaggagggaagacccactgacttgtggtaggggaagatccctgtgttgaactgaactccctctgtactttcagtaagcatcccctgaccatgttgggcaagcttattctcttcatgatgagagatttgtctgaggttctccaggcttgggatcagaacagtctttctatatgatcaaatcagcaattatatgcccaagagtgaacaaaaataataattccgattgttaacaccagaactgaggcatcctgctgagagcctgccccttccaagttgtccccttgggaggctctgtacgttgctccagacgtttttggcatttctttcaactgtgcatttacagtctactacataggctgtcctcactgttgacaaatctttatagaaggatgaagagttaactatatatttggaaatagccataagtcattcttagacatgcttggcagatgatgtgggtaagtgatcaggccaacaatttcattttgggttaaaaatgagatttaatattctcacatagtctatcttcaggtttttaaagcagttttgaagagatatttcaaaaactactttgaataagagaagtatcatgaaataaatacattatttctagatgtggcctctgatgatacttactcaaatttacacattctggttatgtagtttgtgaagtcttgtcctccagccttaagacttaaattatttcaaaatagcatgaatagcatttgaagctttctatggctggagagtatgcaaaacaagtgaaactgttcggaaaaagagctgctaaatagaatgggggagacctgtattagagctgctttacaagttaaccttgcactaggcctaggttctcctgtggaaagagaataataataatgatgttcatgtcgcaggtttgttatgaggttttcaaggaggtattgcatatgaagcatagatcacagtgcctcatgtattgtagtgttcagtaagtgttagccatttttatcatgctgttgtgagatgatagattgcctgggagagaggaagaatggagaaatcggggtatggtgctgtttgggagatttaaaaagtgtggatagtagaacaagactggcctctcgttggtttttagttccgctaaccaaacctgttttgtcatactccagttatatttactttaacctagagatatgttgtgaatgacatgagcaatattttaattttctgctatccctaaaagaaagttttatattgagattctgatcatattccaaatggaaaacaaaacaacaaactaataatgtcaacatacccccaaaatgtggtgttgagggttagaatatcacattgtaataaaccgtttatattatgttccctttgtgcattaaacaaatgcacaccttatcatttgcattatgtgcttttaaacagatgaagatgaagatggtgatcgaattacagtgagaagtgatgaggaaatgaaggcaatgctgtcatatgtaagtatacgacaaatgaagactattttttaaaatcttaacgtgattgaggatgctgtttcttgggcatagtgaagacgagtaaataaatcacagttgtcatacatttttctatataataggtaaaggtttcaaggatttccgtatgtgaaagttaagggcattattttcaaaagacacttactgatcatatcataaacattaagaataatgcatcttaatgacttttgcattaggtatgatgcagactaaatggactatcaatttcctgtattttttatgcagtacttaaagtaacggctcattaaaaatgaacccctgggctctaaaaaatttttcaaaatctactttcaactggagatctctctcacccttccagactatagtttacaatgtagctgcaggcttaatatggatacacgatttaaagatgtactgttggttatttatgcactacccataatactcccaccgaaaatgaactacagggctacttactgaatcaaagtgatctgaatatattctgaaacgacttttcttttgtgtttaaaattttactgaaaatctgcgttaacagttatctgatactgaagtaaacaagagaaaagggcatatttctaaagcttcaatactaagcttgaaaaattcagctatcatgaggagacataggttacctgagtcttgatttgtgccttcctctcaagttttgttttgttatatctgagtctgtaatctgtttacaaaaccttttcccgtggcctggtagaaagagcattggactggaagtcaggagaccttagctctactgtggtttcttggccctaggcaaatcacttaacctttcagtgctgtagttgcctcatctgtcaattgtggataataatacttgtcctttatactgcacagggccattgtaatgatcaaatagaagaatagatgtgaaagccctttgaaaagttaaaagttctatacaaatgcaaatgatggaatcatttggaatcatgtggaaatgatggaatcagggctcttgcttttcactgagaccctaatcttagtcaacagttaggttgtaggtttttgatagacttcagcttcagccaggatattgtttcattgtaatgaaaactgtaaactgtctgtatgggtttctgccaatagttttaatttagggtaggagaatagagaacaagaaggataggatgattaacagagcattgcattccaaccagcacagaataggaaaagtcaatttcccattgacttcgcattaacttatgtgagagtctttgtgtactgagaatttagagctgggctcatcagtaccttgaaaggcagagtaggattgtctgctgaaaaggtctaccactggtattgatagattggctaactctcctgagaatgtgacatgcttatttttagaaaacccacacacacagatgggttctaattttctcacatatgtccattgcagagaactgacatcaatatactttcattatgtattcaacttaaccacatgcaaaagatatgtacttttgggtatgatcttacaaattgtgctttttgaaaatgttagtgggtgtggtcacagtgataatgatgatttccatttctaagttactgctatatacaaaatgcttgaggtatttaatttttttagttttaataatcactctgtaagacagatattatcatccttattttttagatgaggaagctgtggttaagagataagcccaaggtcttagagctagtatgaatgtgaatatggaatttaagttcagtttcttttcatgcccaagctgttgctcatttactgttttacactgtctctcccccaccttcctctttgcaggattttttttatgtcatcactgttatttatttttttttctccgagatggagtcttgctctgtcaccgaggctggagtgcagtggtgccatcttggctcactgcaacctctgtctcccgggtttaagcaattctcctgcctcagcctcctgagtagctgggattacaggcacccaccaccatgcctggctaatttttgtatttttagtagagacggggtttcatcatgttggccaggctggtctcaaactcctgaccccgtgatccacccgcctcggcctcccaaagtgctgggattacaggcatgagccactgtgcccggcctatcatcatcattattaaattctgaataatttgggtttatataataccttagttgtgatttctgcaccatgtattccttacagcatatgcttattttctcaaattcagtgtttaattatttttgtgttgtaggaaaatatgattacataatcttacattacatgtccttagtttaaaagtttctgagattacttgggtccacttttttttatctgaatagaagtcatctatctcattgatgagataattttaaaaaattttttgtagagatagggtcttgctttgttgcccaggttggcctcaaactcctggcctcaagtggtcctcctgcctcagcctcccaaggtgctggaattacaggcgtgagccaaggtgcctggccaggttggctgtcattttgatctgtcttggttcttatgattgaaatttaaggagaaccatttggacgtaaccttacagtaggttttgattggtagtcctcatgattaccagcatgttcctacaaatttgcattggtctttattttgtaggttcaatttggctctgaagtttgagtccaggatttcgtataaaggcatagggaagatactgacagattaccacatttttattgttttttgcaaaaagctgtttttttcttttgtttttggtcttgttttgtttttgagatgaagtctcattctgttgcctagggtggagtgcagtagcctgatctcggctcactgcaacctccgcctcctgggttcaagtgattctcatgcctcagcctcccgggtagctgggattacaggtgcccgccaccacgcacggctaatttttgtactttttggtagagatgggatttctcgatattggccaggctggtctcgaactcctgatctcaagtgatccgcacaccttggcctcccaaaatgctgggattacaggcatgagccaccatacccggccaaaagagcttagtttttcatatagaattcagtacacctgtggtcatcttagtatttctttaaaagccatatgtgggaaagcaaaaatagaggcacttttaccattagtcctttaatcattctttttcattgattacaaaggttaagtaaataaacagcctatatctctgcataagaataaaaacaaatttgcaacctctgagttgaaacttgaagaattactttttccccctcttggatgcaggcattttctggctttgggccagtacaagtgtacatttttatcagtaatttaaatagatttttgtattagacctgaaaatgttgcctttttaattgaaaacttatcaattatttaaatcactagcagcctgaggctgttaattttatgagtgccataataatggcatacagtggtttttgatacatgtgacacgtggaatattgtattatggtaaggatttgtcatgacaataggttgttgtgtgctgttaaataataaccaacatattaaaccaaagtctgttgtcacacattagtaccattttatgtaagttatttagaagttgtattcttttcttcattagagatatttttaagagataaagagaagaaaacaaagctataataaattgtcttttaagaaaatgtaaagtaatttggtctccaaggagatatttaatgtattgaaagaattcagcagccaagtgttattacagcaccattgtgatagctgctctgcattttgttatgagtttgtgttaatcaacaatctgtttttatagcatagtttcttgtaagttatgttgttagaatattccacttctgggatcacggcttttcctctgacactattgcatctttttaattcctccataaagttttttttttttttttttttgagacagagtctcgctctgtcgcccaggccggactgcggactgcagtggcgcaatctcggctcactgcaagctccgcttcccgggttcacgccattctcctgcctcagcctcccgagtagctgggactacaggcgcccgccaccgcgcccggctaattttttgtatttttagtagagatggggtttcaccttgttagccgggatggtctcgatctcctgacctcatgatccacccgcctcggcctcccaaagtgctgagattacaggcgtgagccaccgcgcccggcctaaagtatttttttaattagaatttgaaatgctttattagaaaaaaaatacacacaacctacatattctgaaaactaaatacctgatcattgctaattaaatattcccttaatgtagtttaaattttgttgttgttgttctcatttcctcctctcattttctagaaagattgaaaatagcgtgctgcttttttccttccatttttttgtgtttgttgtctggtagttctatggaggcccagttctaggaggggattattttactgttaacctcttcttttgggtgacctttcattaagaaattcagccaatacatcttgcttttgtaagtagatttatatttgtttctgctaaatcctgtgtctagggatttattacacctggttctcttaatattgagaggcttgtgtgagtagaacacagtattaacaaaaataattttcatcattttgtctattctcactctttatatcattttttcccacattgccaggagagtatggcatacattttactgtagtgcctcccattatgagaccttgtattatatttagtacaagagtccttatatttaagtgaagtgtaagtattccctttggtgtatttgaccacagtgtaccctgtcagacgttgagtactatgagggaaaaatactttttgacctgtggagcaccttataaattgggatatgattggctttatcctaatatacataacttggacattgcctctaaaatcatgcagttactcaagtagagttggaaggtaaccacagaggttttgttcaactctttcattttacaaataaggacattgaggcccacagagaatagaagattcagatatcagttggaagtcacatggctaattaaaggcaaggcctggatacagactctcagtctctttgctcctggttgttttaaataaggtttttgttttgctctctattatagtcctgctcagctttgcaaatactgctttttcctgagtgtaaaaaataatacttattaccaaaatgtcactgtacttgagtttgtagagaaatgtaaaaaatactctgttggctgggcgcggtggctcactcctgtaatcccagcactttgggaggctgaggcgggcggatcatgaggtcaagagatcgtgaccatcctgactaacactgtgaaaccccatttctactaaaaatactaaaaattagccgggcgtggtggcatgcgcctgtagtcccagctactcgggaggctgaggcaggagaattgcttgaacccgggaggcagaggttgcagtcagccgagatcacaccactgcactccagcctgggcgacagagcaagactccatctcaaaaaaaaaaaaacaaaaaaaaaaaacaaaactctgtgggcgtctgaaggtttaaaagttttgtccttacctacaaggctgtgttttaccttgtttaccaaattcattgtccatttagaagttgaatatttaatagcatcagggccttagctattaggaagttttctttaaagaacaaagaggttagaagctcattttccacatggtgctttcaaatatgccacatattaaataggttctactttgaacttaactttgcaggtggcaaaatcagttcagctttcaatgagttgttagtcccctaattcaatgcaatttatccaaacaactgattacacagtatattcttcagagaaggtggagaaacggtgaaaagaatgagaaagggaaactgaaggaaataaattgttttggggatttgtttatttactcaaataatgacatgctgcaagctgtaagtaaggtttttgttttgttttcttatcctagtcaaaaaagaaaacttttttccagagacagattattttaattctcttctctgtttggaacacttggatgcctttgaaatagtgataaaagtgtagtgaccccttttagcccctgttgtgatctatgttggagcctgtttggtagcaaggagcagaagcatattcaagtttgcatcagaacgagggatttattatgtggctcttggaagcaaaggaaaagataagcacgagtaggcctcagtcttggtggcaccagggcactctggggaccactggaataggaggtttggaccaccaacattttgtcatttatatggctctgctcccagttcagttccatctctgtggagggttccgcttagcctatttataacaaaatgtctcatttggcttgctgtctgcatggcctgatagtcctgttttatttaagtggcaggttccctgaagctgctattaaaacttctactttaagaggaatagcacaattgctacagcctaaaaatcaggtgaaaggtcagtgtggacactaccccaagctaaccaaggtaataactctgaaagtttcagctgagaggatcccataaattttgggcctgttgctgaatacaaatttaaactccttctgccaacacatattaccttaaacatagccaatttgaatttcatctgctattggctgcccaaacttctatgaaggccatctggggctccttaaagtcctttatggttttaaccaaatggtgttatcattaaacttggccaacttgctgtcattttcactttcaagtcattaataaatacatctgtccaataacatgagcctataaatagggcccagagttggtccctgttgaccttcacattgtgattttctttctcatcatctaatcaatctgtgaccatatgtggaccctcggtcaagtcttttaaggaaaagcttgtacacattgtagtctcctcatgacaggagcaatgagttattgaggagtcagagcctgaagccaggtaagtaaatgtagctattaatttgatattcaaaatagattggcttcatatgttatttttgaccactggggcagttgtgtgctctgtgagaggtcagcatcataaaggaaaagcctcttaatgtaaagtatgagaaataattgaaagaaggtgtaactaatgacacatctgagtagcgttataattgaatttgtagccatttgatagagttaagattgttgagttcttcactgggaaaactaacaaattaactatggactgcaaatagttggttagtttattgattattgctgtaattactgactgagctacatataatagggtatgcttgcagtattgacaacaggaatttgaaaattttatcattagtatgaaaaaaacagcatgagtattccttataagtgaaatactgtaccaattatgttgtctgttaggcatgctaaggagagatttgagaaactctcctgttatagatgtatggaagaataataagtaggcctggtatctcctctgtacgtgagacttgctgctgaataagttggaaggtatgaccaatgagagtcgttactatgtctatatcagttcctctctggattcttcctgtaaacatttgtgccctgtctgtaatgtgctaggcactatatggcagtgatttctcaggtttttgaaggcatagtcctttttgaaaatctgtaggaagttgtttatttttttcccccagaaaattcacataatgcagcatttcaccagcttcaaggatctcctaaagcccatatagatcccaggttaatacctctggcataagaggaaataaaatatacaaggcatggttcctgcccttgttgagcttccaaaagagaaacagtgttccccacaatacctgtttactttattatttatagtactgtagtaattgaggggaagggaggggatactgactcaacctcaataaaccagttaaattctaccactgtactttgtccagatatctcagtcgccttgttttatggtttctgtgtcaccctattgttgcgaacatgtttcttctatgtactcttacttggaaatgagagattcaaggcaccatttcctatttcaagattttttttttcaagtactttttaagaaggtttcccatataccagctcctttaattttgatcttcttaacatctttataagatcagcaaggcaggttttttccccatttttacagcagaggatacagaggcataaacaattgtgtgcctttcttgaggtcacacagctagtcaatagagagctggggcctgaggtcactcactcgctggtttgtttcctcattcatccaatcagtttttcatgcagcaaatgtttattggatagcagttctctggccaagcactatgcaaggtggtgggggtgcagtgagcgtacagttcatgccctccaggagctcatggtccagtcagggagattaacaaaaaaggaaacagagttcagtgtgggaagacaagaaaaactcataattaccaagcggagtgataaatgatataatacacctaagcattaggtgctccatgagcacaagaagtgtctaatctagctttggggaccaaaaaggcttcctgaagagggcagtgtccaggtggagtaagttaggacaaggggactaggaaggatgtttggggcagaaagaacagtgtgtttaaagaatgcctggtgagtcagtaggagctgcctgtgattcagtctgtatggacagtgacgggggagagggtgggagatggggcttggaggaaggtgggttagaccatggagggccttagcccagggaagtgacatgatcatatctcatattgtcagaggcatttgagccatagcaactctgttagtctgttttcatactgttatcggaaaggggtcccaatccagaccctaagagagagttcttggatcttgtgcaagaaagaattcagagtgagtccacagtgcaaagtgaaagtaagtttattaagaaagtaaagtggtgaaagaatagctactcactccatagagtaggacgttcccgaaagtaggaggatgaatgtgcccaccctacgtatgatgtttgtttatgtataggataaaaaaggatcatggggagatgtgctctgctacaagggtttgtgataaaggattcattttcttaattactatattttgcaagaattgatattattattattatttttttttttgagatggagtcttgctctgttgcccaggctggagtgcagtggttcgatcttggctcactgcaaactcacctctcgggttcaagtgattctcctgcctcaacctcctgagtagctgggactacaggcacctgctaccacgcccagctaagttttgtatttttagtagagacgggttttcacgtattggccaggctggtctcaaactcctgaccttgtgatctgcctgcctcggcctgccaaagtgctgggattacaggcgtgagccaccgtgcctggcctgatattattttgtttaaagcaaaattaggaatgcttctgttttcaagatattagggtatcaggacattcctgaatctgggtatgtttagtaaacgttatcaatctgttcccttaatcataaatagctagagcctaggaatacctaacttcctgggaatgtagcccgggaagtcccagcctcatttttcctagccctcactcaagatggagttgctctggttcaaatgcctctaacaacattgctataaagagctatttgagactgggtaatttataaagaaaagaggtttaattgacacagttctgcatggctggggaggcctcaggaaacttataatcatggcagaagacaaaggggaagcaagtactttcttcacagggtggcaggagagacagttgggtagagggtggggcgggagttgccacacacttttaaaccatcagatctcgtgagaatccactcactatcatgagaacagcaagggggaaatccacccccatgatccagtcatctctcacaggacccctcctccaattaaacatgagatttgtgggcggggacacaaatccaaaccatatcagactccatcttgaatagaagctgggtaaaatgaggctgcgacctgctgggccgcagccccaggaagtcaggcattcttagttacaggatgtttagagttaagggaacaggttaatagcatttaccaaacagattcaggacttaacagaccaaggaaatgtcctgatgtcctgatatcttaagaacaaaagcattctgagttttgctttaaagataatatctttaaataataatatcttcttgtggaagacagtagttacacaaagatgaataatcctgtgtcaccagccttgtagtgcagcgcatctcctccatatggttttttgctttgttattttacatataaacaaacattgtacataaggtagatgtgttcctcctcttgcttttgggaacacccagctctgactgggtttattggtggagccattcttttattcctttactttcttaataaacttgctttcactttactctgtagaattaccccaaattctttctggcacgacatccaagaaccatctcttggggtatggataaggatccctttctgataacagtatttctcaagagtggcttggggtagagaatttatgaagcgtggaagccacttagggggctgttccttgtgaaagacaatggtggtcactggactggtgagaagttaacagatttgagaagtggggaggatgtcaagttaataaaatttagtaggctgggcatagtggttcatgcctgtaatcccagcactttgggaggccaaggtgggtggatcacgtgaggtcaggagtttgagaccagcttggccaacatggtgaaaccccatctctactaaaaatacaaaaattagctgggcatggtggtgggcgcctgtagtatcagctactcgggaggctgaggcaggagaatcacttgaacccaggaggcggaagttgtattgagccaggatcgcaccattgcactccagcctgggtgacagagcaagactccatctcaaaaaaacaaaataaggccaggtgctgtggctcacatctgtaatcccagcactttgggaggccgaggtgggcgaatcacgaagtaaagagatcgagaccattctggccaacatggggaaaccccgtctctactaaaaatacaaaaattagctgggcgtggtgtcgggcgcctgtagtcccagctactcaggaggctgagacaggagaatcatttgaacctgggaggcggatgttgcactgagccgagatcgtaccgctgcactccagcctgggcgacagagtgagactccatctcaaaaaataataataaaaataaaacaaaataaaataaaatttagtggttaaatacgggggagaagagaagagagatggtttggattacttccagatttctggtttgggaaacagggtcatagtgatggtatttcctgagaccataaacccaggcagcagaagacaggtctagggtctgataggggataggagaggaaatcagttttggacctgttgaattggaggaggctctgcacaatcaactggttatgtttcagaacttaggagagaaatctgggctggaaataaagatttgtgattcatcagctcctaattagtctcagtgattcctctggtagttgaaactttgaagtggctaaagtaactcaaggagagtgtaaaatgagaaggctaatgaaaaacagtgggggaaatcctgcatttaaaggagagatggggtaataaccacttacaggaaaccgaatggagtggttggagaagtaggaaaacccatggaggtggcggggcgggggagggcagtgggggagtggttgttgccaaagaaagagccagaggtcacctaggtcacccatcagcacagatgtcttcacactgcttcgccagcctctgaaagatcagaggatataacctaacctgcacagggtgtgagcgaagccacagctctccaccagctcagcagtctaccaggtaaccctacctatttaggtaaatgttttgaggtatgagaaatatgagataacctacttcttaacttgtaagcaataaatatacgttttatgccctgagtgcatggcatggcctagaatgaaaggagtaatttttttgtttgtttgtttactgataaaccatttgcttcatctgttaaatagaggtgatgatacttatagaataggataggattgtaaaaaactaagtgaataaatgtagatatgtagtgctgagcctaacacacataggtatccaatgagtgagggttagttctctccctctatctctatctctctatctctgtctctgttttctcttctttttttctttctttctttctttctttctttcttttttttttttttttaagatggagtcttgctgtgtcgcccaggctggagtgcaatggcacgatctcggctcactgcaacctctgcctcctgggttcaagcaattctgtctcagcctcctgagtagctgggattacaggtgcacaccaccacgcctggctaatttttatatttttagtagagacaggatttaaccatgttggccaggctggtcttgaactcctgatctcaggtgatctgcctgccttggccttccaaagtgctgggattacaggcatgagccactgcttccatccttctctctttcttaatagaaaatttgtgcctcataaacttaaactgtgctgttttggaactcaagttttttaaaaaatatggcagatttccatgaagaaaaaaatgtaattattgattgaattgtgccattagcattagaattagatttataacaaatatgaacactgtagtaaacttgcaaacaaaacaaagcaaaaaattgtacttgttatccccttgttgaatctggccctctgtttcaaattaattagatttttggtaactatgctaaactttgtcacatccttattaaaatgactgaagaattttgaagaacagctcagagggactctgaaactaatctgagtctagtactggagattccattagcaattgcaaagctgattgatcttttacccagttagcttattgattatcgctgcagttactgcatgtaacggattatgcaaggggtaacaggagaaaacacattttataattgctgctgatgtattcagtttggacacaatatttcatactctatataattatttctgcatttttaaatgctgcaacacttctaagatagaaagtttgcttaatattgtttcaatatgaggaggtgtacttttaaatttcttaactaataatgcattacagtttaccaagtgccttcactaattttattgctgcagtttaatttttgagcctcacagtaaccctatatatatatattttttttttttttttgagacggagtctcgctctgtcgcccaggccggactgcggactgcagtggcgcaatctcggctcactgcaagctccgcttcccgggttcacgccattctcctgcctcagcctcccgagtagctgggactacaggcgcccgccaccgcgcccggctaattttttgtatttttagtagagacggggtttcaccttgttagccgggatggtctcgatctcctgacctcatgatccacccgcctcggcctcccaaagtgctgggattacaggcgtgagccaccgtgcccggccagtaaccctatatattagggtaaatatttttatgctcatttggaggaaactgatgtttaataaagttaaatgtcttcctgaaggctacacaagttaatgagtggcagacttagaattcaaccccatttcaatcagtaaatgtttattaaacacctactatgtgcagagctttgtgttagggctaataaatgccaggataagattatagacctgaagatgaagttatttggataacttgaagtaatattatgaaggttactttgttacatttctgtccaagctattatgttcagtatcttagtgtacaaagtttaggggtgtttttttggtcgttgctgtttgtttctttgtttttttcttttcttttggttttggtcatttctgcttattttatcactatttagaacaaaattggagagaatccctttaaaggaagagtatatagaaatgacactaatagatccagatctaaaaacaatttgctggccgtgtgcagtggctcacgcctgtaatcccagcactttgggaggccaaggcaggtggatcacctgaggtcaggagtttgagaccagcctggccaacatggtgaaaccccatctctactaaaaatacaaaaattagccgggccagtggtgggtgcctgtaatcccagctacttgggaggctgaggcaggagaattgcttgaacctgggaggtgtaggttgcagtgggccaagattgtgccactgtactctagcctgggtgacagagcaagactctgtctcaaaaaaaaagaaaaccccaatttgttttgcagtttattacttgctgtcttctctgttttcccatgtgagcctcacagctatcctctgggtagagcccgtcttgattttacaaatgagtaacatgaggcacagtgagcattttgtcatggaggtcacatgcttggagacaacagttagtgatggagctcctgggtttgagccctctgattcattcatgtgccttgctcatctcactgagcagcatggacctggtggccggtcaggactgctctgtgctaagaggtaccatgcatggccctgcattttatccttatcccatggggaatgctccgtaggcagtagcctgagtttctaggcctagtgccttgttggtggctgttcctcaggggccagttgtgtagggcccacactgtggttttgattacctccctttacagcatgtccttgatggtgaattactttgctatgtggaacataagcttctctattaatacagacacagatcaaatgcagtagtccagcaggagaaaatatacttggatttagaggaaatataaaaaacaaaaaacacaacctaactactcgctttagagaaactgttaagtggcatacttgatatcattactgtgactgtgttagtcgtagtacagagagatgtttatagatggcttaaaaattctcacaatgattataaaagtgtatatagtttgccagttgatttggcacagacctaaaatgaaaggaaaaccatttttatttatttattctgtgaggtaaataaataaagctggaaaacaggtcaatttcatgcatgcgaggttttatagtaggaaaaaaaagcattgcacctgttctgaccctttacatttgaggttatttgttttcaaacttgaccccaagcaccagttttagacatctctataattaacttgttagataaagcataaggatattttatttgtctttatttctaggataatggcaaagtagtaactgaaattactagcctattgtacatagcagttaattaaagaaaagcattaactataggagaacaccaccactgctgttgtcttgtatcagtacaaaaaggcagtaatttttttgacagccactgattggaaagttgcttgcagccttccagaagcaagggggtacatgctgtggatcaataaccggcaaatttcccattaaaaagaatacctgagcaatgttccaaatagccactggcatcttaattttccatggaaacctcaaatacttgtgtgccgaggacaagtcattttcggacaatttttccagactacttgttaacagttattgctgtcccaaaaggttgacagcctacatgattgatatttcatttacttgtcatcactgtttgagtaatggcgagtgctgtatttctgtggttttaaggaacagaatctcctgaaagacatttgccttagtatgtattccagagagtgtttcacatgtttatgccgtatgtatataagtttttatgtctgtagaaggagagaatcactttctttacagtttgaaaccctttggagagctgggtacacttttatcagtgtgtagctatccaacatccaccttcactttatttgttattagtgcgaacagccttagatgtattaacttgtgattcccaaaatgatgtggcattttatagctcccctttattttcaagaggaaaaaaaaaacccttgctcttgtaataattttaatgtacataaaagcaataggaagatatatgtgatatcttctaaaaaaaaacttttaaagaatgtcagcaaacaatagtaatcaaggagggatttcctaaacatatcgtatttaaataatatgcacatgtttttaatatagaaacagtgaggatgaaaaggatgttctgctctttgacagcccctcaaaacataaaatcagcagttttcattgtggatatttttccactaggagcatcactttgttatttgtcgagcattataagatgtgagagcacagaagccatctccaagttaggtggacatatgcttacaaattagcggagtggtaatcaaaccacagtaccacctactgaataatttgtgtttactaaggagtgtgaaagctttttcacttagaactttattttttgtgtgcagaattttacagtgcaatttgatccgtactaaagtgtttataaggctaaagcataaaaggtatgtttgtttgaaactaggctacctttttatcatgttaatcctgtcatctttggatgggtcatattttgtttgctatttccacagtctctgtgatttcgatttccattatctgtgcattttatacacaaattgaataatgtttgattaactggcatgtaggtccaagcccaatgtgaagcttcttcattttgctttgcaaaatccagggaaaaagagcaagaggcaatttgggaaattccactaaaatgctttatgtgtcgtctaaatatatatcattttcaaatatttcttaaatactaatataaagtcttaatcaacacttttactcttaaagataaatgccagggtgaaggctaacacactggactttcaatcctaaatattcactatagtcattttgatgtgccagtaggggaaaagtattctcaaggctgatatgtatataccagcaatttacaaaagtactgtgaattaaacaacccataagtgtctgttccagtattcatacattactgagtgatctctttctataatctctttgcagtattattccacagtaatggaacagcaagtaaatggacagttaatagagcctctgcagatatttccaagaggtaatgttgagcaaattctaatcaacaatgattatttcagtaaactgtttcatcaacagttatgtttccaaaggtttaaatgcacataacatgatgtttagctcttaattcgaaaaacaaaagaagtattcattatcgtggggattgcaggctatattatagttatggcagataaaatatctaatttactagagtaaattaaactaactagattgttttttgtttttgaagtacatacttacattagcttaaagaactcttttgggggtccacatggtttctaaagcaaggcaaatgaatgactttaattctggatatttataaattgtggctcatgatggtggccaaagctgctattgaggagaaagctttcagttagcacagaagcgaagatttactgaggtgttaggagagaaattttggtggaatgtttggtatctggttttttgaggaggtattttctaaataattgaaattcttcataaatggaaatttgattatctccaaaaatatgagctgatgagagtaagtttcagtgaatcacttggtcagataattttctttttcccttttaggtttggcagtactatccttgtatcagatatgattgttcaaccgtgtataaatgttccctcaaaatttgaataatggtgaacaagaacagtttaattatataaaccattaagtctttcacccgttatacattgccccacttggaatccatgttttctaactaatggaacagataaggaaattctctaagtaacccttctagaaataacttaattgaaataattaaaagttaaacttaccttcgttaactgatactgtacaaataatcatggtatgagttttccaattaaacattctagactttcattacctgtaactctctgaagtttgaatggctcaattaaccagtaggctcctatttgcactgataaagtctccaaaggcagctgtcttggccaacccacaagaagatctgggttcaagaataatactgctcttccagcatatgtgtgggcagcagaatcaggagtgcttagtatattactagtaacttattgaagtgctaagtaagtacagttgggctatttaaggccagtgatagtccaaaacaaggattgtgattaatccacttctgttgtacttgaagattaagcaccaaaacagaaaaaaagaaatgttgctatttctgtttattagtccaatgattaggatgtagatgatttcttttttttttttttttttttcgagacagagtctcgctctgccaccaggctggagtgcagtggtgcaatctcagctcaccgcaacctctgactccctggttcaagtgattctcctgcctcagcctcctgagtagctgggattacaggctcgtgtcaccacacccagctaatttttgtatttttagcagagacagggttttaccatgttggccaggatggtcttgatctcctgacctcatgatccactcccctcggcctcccaaagtgctgggattacaggcgtgagccaccgcgcccagccaggaggcagattatttcttaatgtttgcagtgactggagaatttgggcaagtttcaaaattctttcttcacaaggagtagtattttacaaactgaaaatttccattaatttctctattgacattatagctctgccatagaaaaccctaattgcagtatcctggagaaatatacttccaggcagggcacagtggttcatgcctgtaatctcagcactttgggaagctgaggcaggtggattgcttgagctcaagagtttgagaccagcttgggcaacatgtcaaaaccctgtctctaccaaaaaaatacaaaaattagccgggcgtggtgcacactcctgttgtcccagctacttggtgggctgaggtgggaggatggcttgagcccaagaggttgaggctacagtgagccatgtttgtgccactgtactccagcctgagtgacagagcaatacattgtctcaaaacacacacacacacacacacacacacacacttccaatgttgtgggtcttcatttgtctctaaaaaattttttttagttatcttcatccaaattctttcaagttttgtttgttttctttccttttgtgagcagtcctgtcattctcactgttcatcgcattatgcttcttcccatgataatcacaaccatttttagatgtctgctctgttaaggcattaatattgctttacgcatcatcatctgtaatcctcctgatagttctgcctattaggtattactgtttccaatttatagatgagaatattgagattcagagaggttaagtaacttcagagtcacacagcttataagtgcttactatgccctttgagtaagaatttcatttaaattataatatgattaaaatggaaaggcatatatattaaaatataattagagtgtgcatgggagtagtttggagggcttgttttggagtggagaggagtatgttatggggagaggatacttaaaggaggaaattatatgagatgtcattgtcatatgtagtcttagcataaaacccactaggctgcaataaattgttaaacatagtctttctaagccaaatttaaatatttcagaatatgagactgtctttttatttctgtgtttttttaatatgctatggtgtaattgtttctagtttttggtagtcttttgctttttgctacctgtctacatcgaatgtacattttatcatatgtagataagtgaaattatgcaaatttacataatcgacatgtagacatactgggtatatttcctgtgtctacctagttggttagaggccctcagatcttaaattttatggttaggccccatgttaaaaagaatctttagactgaacaagtaggaaggataggagaaaatgattgtttccttatttatttatttatttatttatttattttggagacagagtctcactctatcacccaggctggagtgcagtgtgtgctcactgcagcctttatgtccccaggctggagcagttctctcgcctcagctcctgagtagctggggctacaggcatgtgccaccacgctgggcatttttttttaattttttaatagcgacaaggtatcacagtgttgcccaggctggtgtcaaactcctgagctcaagcaatcctcccaccaccacttctccaagtgctgggatgaaaggcatgagccaccatgcctggccataattctgatgtaataacatgttctcctcattccaagtagcacagttgccttggatagtaactcccaggtcatggctaagtcctctacattgttaaaagatatgttaaatattaataagtgtgaacattgactagctttatagtaattcctgacccgataactttaggaaatatgaggttactgggttttttgactgctgtttacatctccagttataaaagtttgagaagtcaattgaggagtgaggcagatgttaaggttagagataagagttgatgtttgtctctgattccttggctagccactttgtttaaatgaaatttatgaatgcactgcttacttcagtggaaatattttgaagtgttgtcttaggaagtattgatggtccctcaaggaccagacgtcaaatgcatgtgactgtagttcaaaaggttaatttccattttaaggaaagaagattttgagtcttaattttaatgcattttagaaaggcaagtaaaaacattttgttatggtttagatatattttctaggaaaaataacataataaatttgagtatatttggaatatacaaaatgaaagcaactgcagtgttttgtaattattacccatatcttctccttttttttttttttttttttttttgacacagagtctcgctctgtcgcccaggctggagtgcagtggcgtgatctcagctcactgcaagctctgcctcctgggttcacaacattctcctgcctcacgacattctcctgcctcagcctcccgagtagctgggactacaggcgcccgccaccatgcccagctaattttttgtattttaggtagagacagcgtttcaccatattggccaggttggtcttgatctcttgacctcatgatcagcccacctcagcctcccaaagtgctgggattacaggcttgagccactgcacccagtcattacccacatcttattattaaacagctctatttcttgttgtcagaaacaggaaaacgacatgtacatctgagagaggagcaaaaaaaaaaaaaaaaaaaatcaaattaattcgtccccaaacaatcaatcaaaattgatggccccttaacatacaatttgtagggcactatagttttcaaatagaagcagtctataacatgggcaggaggcttttgtatttttaacatttgttgaagaagcatttgctgaattggaaaagtactaacctgtaactcaagatggtgtcaggaaattaatattcttttttcctggcactgccttatctctaggactaaatcttagcatatgtcaagatttgcaagaaatgtaataaaattagttatatatctgtattttaatacatttgactgcttatggctgtgcaaagtagtattcaaactagaatgttccatcgtagaatccctagcaatctttttggcattaaaacatccttttctcaccccgcttgctcacaaaaaaatcccttagctcttttcaaagtagtttaagtgatagcagatatacaatgtaatagaatgaggacagattgcagaaatttgaattatgaaaggaatctaatcattttagctcagttaacttgatttttatatgttttaagcagaaattggaatttatatgaggtggtgtcagaaagctctttgcatttataaatgctcactcctgcaagttaaaaccctggttcataattcccactttgggtcttgggagccacttttcaatcatttctctctgctaattttggtgtcaccctcatttctttttaaacgattcattttgagcaaatttgtaaatggccctgatgtgttctacaatttagtcaattactgtttcagcctgcaagcctcctggggaacggaacatacatggcctgaaggtacgaatttcaataattgtttcagtaaagttagatggatttgtaatgctgtgttccacttattgaaatgtcaaataaaactgcactttctcaagctctgacaagcgatccttttattttttttaaatgggaggtggagggggattcatctgtagtatttgctcagtatgtgtatatatttgcatactgggggtttggtactgtattttcaattatttggaattgttttgttggtcagtgtcttcaggataatcctaggtgctggtatctacaaagattttagtaagaatatagacttcatttcagtgattaattaagcacataagcatattgcacatggaataccctctcttgacatatttatgctagaaacatatatctagttaatgtcttttcattctgtgtattttgaattctggatttctgtttagggcttcacatctgaaagaaaagctggcttttgtattaggctcaaatatttcataattaattatttggacctcattttttagtgaataagaaacattctacatacagtgttctgcttggttgcagagctggaaggatataacttgaggttcactactaacccctgggtatattcttaatgtactttttgaacatactgtttttatatgtattctagacagtgagttggattttcacactgtttatgtctcctttttcatcactgtttaagtatttaatggaataatgacaggaatagaatattatgtaatgtatgggttatacggttttgtaacctatatactgaatagactccaactgtgggtttgtctagcaacaagctaattaaccttcatagtgaaatgagaaatttgtggcaaattataggttaattagaactgtgtcctcagaacacaagactgatcaagattctttctttacttataggtgaatactcgggccggaccctctcaacacagcagcccagcagtctcagattcacttccaagcaataggtgcgagcgagcaagtaaagtgtgcccttgatgtgatttatctacagagttggggtggggtggggaagaagctagaaagaaatttgaccagttagataacctagctacgtattgaccaaagagaaaggacctcatatggaaagatgaatgtttagatttagactgggtgctgagaaggctctctggggagagtgacgtttctgttttgacctgaagaagcagagaagggcgtttcagacggagggaagagggtaggtgaaggccctgaggtggagaaggagctcagcatgtttgtgagtaggccagtttggcacagggaggggtgctgggttggggaagggatttggagagaggagatgagagagcaataggagtgataggagctaaggaggtagacaggacttatcatgcggggcctcgtaggccctgtaatgtttgaattttccttttggtgcactggctagcagttagagggcttttagtaggagagggacatggccagccctgtgtttttaaaagatcctctgcctgtggtgtggcgaatgagcagaagctcccatctaatcctgccctcctttgatgtttgacttcctactccttgccaaatggtcatcaaatctcttactgaacatccctgtcggaggaatgcactttatcagccaacgcagctccttcccttttttacttggctacatctcagaaggctcttttttgtgagctgagatttgtctttctatagcgcccactcataacgttttagttaagccctcagaacgtggttgttccctcttccaggtcaacagctcttccagttgtcttccctccaaacacagttctagattttctgtctcagtaaattctcccacatccagtccattgctaactccagataacttgtcagtcctccttcactgcttcctaggcctccctcagtgccacaccctgtcagtccccacacttgtgggttctaccttctgagtagctctgcgtctttctactcgccagcatccctgctgctgtgtgggtggttccagctctccagatcactgccacagcctcctgagagtctactccctccgttcttggcccattcagcccctcctccaccctgcagctggagccatcttgccagtgtacagtcctgagctgcagtcattccctgctttaaaaccttcactgctcttcatgctttcaagatgaagtgtaacctccatagcaggtgagcagtgaagagcccttcacatatgggtgctctgtgtactccagcttgctggcccacctctgtaccccatcccacctgacattccagctttgctgatgaacacatagtgccctgaatggatcactttcttctctctactgggcctgcacattttcccgttttcctgtttcttttcatccccaccttgaccttcagtctggctaaccttggttatctttgaggactaaattatcttctgagaactgtccctgattactacccatccccagtgcacaccagggacctctctaggaattcctatgatactcccttcttccttgtattgtagtagtgagcacattgtattataatcacccctgtcctccagtagattctatactatttgagggcagtgactgtagcatattcattgacaaagttccaattcccagcatgatgcttgccacatagattatagtcaatcatgtttgaatgaatgaatgcatgaatgtatgtatgaattacttgtatttcttttacatcttacctctggactaaattctcccagctctttcatcttttctgatatgacattatttctagtcccctcatccttttctcttctttggatatctcagtgtctctcttcaggtgttgtactcaagttacagttgtaacacatttaaattttaaaatgtttttattttattacttttttagagatgggatctccctctgttgtccaagttagagtgcagtggcacaatcacagctcgctgcagccttgacctcctgggctcaagtggtccttccacctcagcctcccaagtagctgggactacaggcttgcaccacaatccctgattaagtgttttttttttatttttttaaatttttttaatttttagtttgtagagacggggtctcactgtgctgcctaggctagtctcaaactcctggctcaagcaattttctcactttggcctcccaaagggttgtgattacagtcatgaaccaccacagctggcctttaaatgtttttaaaagtgatttttggatagcttaggtcaccgtgaacatgcagatgaatgaaatattgagtaaagtgagtcacagagaaattgccaggatacaattttttcttttttttttctttttaaccagacaaagttgatagccagatactagcataatgaatgaaacagtattttcctctattactctcaaagcatgggttgttttttcttttgccttaggtgaataactgtttattaaactgggtttactaatgcacatggtgttcctaggccataattactgaattcaagtcccattgccaaggcaaggcctttcctaaactacttagctttctccttctgtaaattaggatgattaaactttccatctatctactgctggtgttagaaagattgatgaagctgtattaggaatcacgttttatttcttggatgaaaggcattctataaatgcaatgaatcaaaatgttattaattcaagtttataacataatggaatatctatgtagaaaccttgcctgggctttgtttggttatttgcgtctttacaataattggaactatcaactgggagtcatttgtgggaaaactaggatctgaatgtttcccagaaaaaaatgtgtgtgtgtgtatatgtgtgtgtgtgtgtgtgtgtgtgtgtataagagatagatggacttcgagcaagatctgtaccttagaggtctgtattttagtatcctttataaattagggataataactatacctaaagtatagttattataaggattaaattaggataataagcatttagcacaatgcctagcacatggtcatcacttgataaatagcagctgctattattatgttaactggactgattttaggcagctgtgtattttttccatatatgtttcagctttcatcctattctacaaaattgttaattgccactttagtgcatcgattcttagatgtggtgggacattaaagtcaagaacccttggatgaagacatgctttataaaatctaggaaaatagggactcagtctccatagtttacatttgaccatagcaaaagtttaagatgtatttagaaagaagagtaattataacttgaagtggtaaaatgtgatcaaacttgaagtctgagattctctcaaatgtaacctattaaaggtaccaaatggaatatgtgtatttcatattaggtcttgagtcctttctctttttttccttttcatttcttcctttcttgctccttccttcctccctctctccctccctccctctctctccctccctctctctctctctctctctctctctctctctctctctctctctctcactctctctttgtttctttttgagacagggtctcattgctgtcacccccccattctggagtgcacaattacgggtcaccacagcttcgacctcctggcctcaagtgacccgagtagctaggattacaggcacatgccgccatgcctggctaagtttttaattttttttagagatggggccctactatgttgcccaggcttgttcttgaactcctgggctcaagcgatcctccttccttggcatcccaaagtgctgggattacaggcttgagacgctgtgcttggccccttttgttttctgatgtatttatgatcttaatgtcttactgcattactactactgccaccacagtataataataaccagagcagcgaccaccatttatggaacccttagcatatgccaagtcattgggctatatttaagggtgagaagagagtggagtatatagaatacgtaagatgtgtctgtgttctcagggagctcccagactctcccctgttgggggagggtatggtaggaagaaagacatctatactgacaactagcatgggtaggtaggtaaagggctaaagtggataggttaagaatagagttggctgggtgtggtggctcatgcctgtaatcccagcattttgggaggccaaggtgggcagatcacgaggtcaggagtttgagaccagcctggccaacatggtgaaaccctgttttcgctaaaaatacaaaaattagccaggcgtgatggcatgcacctgtagtcccagctacttgggagactgaggcagaagaatcgcttgaacccaggaggcggaggttgcagtgagctgagctcacaccannnnnnnnnnnnnnnnnnnntttattattattataaaaaaaaaactggagtctcgctctacatgataggctggtgtgcagtggtgcgatcttggctcactgcaagctctgcctcctgggttcacaccattctcctgccccagcctccagctgggactacaggcgccggccaccacacccggctaattttttgtatttttagtagagacagggtttcaccgtgttagccaggatggtctcaatctcctgacctcgtgatccacctgcaccagcctcccaaagtgctgggattacaggcatgagcaccgcgccggccccttaacaggctttaaatctcaaatagaacattgctgggggaaggtgctattttaaatgctactctactagtcaggtagatattcacgggtataactcattataaagctagacgacttaagagctccccttgactaccatttttcttcaataaggactttcacgccaggggtggtggctcccgcctgtaatcccagcactttgggaggccgaggcgggcagatcacctgaggtcgggagtttgagaccagcctgaccaacatggagaaacccccagcttactaaaaatacaaaattagccaggcatggtggcacatgcctataatcccaggtactctggagactgaggcaggagaatcgcttgaacctgggaggtggaggttgtggtgagccgagatcgcaccattgtactttgcactccagtctgggcaacaagagtgaaactacgtctcaaaaaaaaaaaaaaaaaaaaaaggactttcactaaattcatccatatgagtgttaacatagtcatatatgttcagaaaacactttaatacttcctaaataactctgggagctgagtctcatacccataggaaaggaaaaccagctaaaatttattaattttatttgtaaaaacacacctgctatggacaagacacagtgctagattttttgtaatatttaatttttctggttaccctataaaattggtattttccccattttacagaaagaggaaattgaggttcagagaggataagtaacttgtcccagatcacacagctagtgaataccaggatttatttgtactacatatttgcttcccaggaagctgaattataacttttaactgtgtaagagaccaggacttaaattatctattttgtcttttgaagttctataatctttatttgctgtgaatattagtgcttagcagatgacattgtccacatgaaattgcctctgaaaggctatctaaaggcagtagaactaatgaccataaaaatgtcactgaagtagttcataagatattgtagcttcatcttgactgtaggcttctttattgctttcgattactaacagggttttagtctctttatttgataccttttgcatttggccagttacttttgaaaaaaatttacattgggagaaggatgtgaagaatatgctcaatccctatatgtaaaagcaaaggtgtatttcagtctggaattttcagtggtgttcagaggtgttgatgatcttgccactaaaaattatctttccttttcagcttaaagaagtcttctgctgaactgaaaaaaatactagccaatggccaggtaggtattattatatattaagattttcacataataataacatattaccgtccagtttttgtatccataagcttattaaacagataaagagtctgtgagtttcctgtcataaatgaataacatggcttaatttgattggcagaacaatttgcagcccgtttttcaaactgtgctaatgggtttcactcccagcagattgaagtaccatgcacacaccctgctgccatctcagtttttaaaaagttaatcagttctgaacaagtgtgtcaactcgtgggctgttgaaatggccctgcattctgaggtgactgtttctttcattatctttggggagaaaaggaaaaaccattactttctcaccttagctccttcttttgtcctgaaactaacactggctttttagggaggcagagtgacagcagacctttggcatataaaattcctggccttcaggagaccttagtttgcctagtagactggccatctaaagctgaatgacctaacccagccagtgagggacaaacgagccttcaggccagttatttcttactaattttgattcaagtaaatggacacatctgaaatagtagagtgcttttaaacatacactggtaaattaagctacctacagggtcctcgattcttcagtagcaacataaatgcgttttaatgtttgttatagtggaagccctttgatagccttggaggcaggcgcctgtccattgcgatcaagcctgcctattaggctgtattgactgagacatctgtgtcactgcaaataaaagactcttattgattttcttaactgctgttcacttcccgtccatgtttcgaaggctgaaatcttaattatctcagatgcttattcagtgccttcacacactgacctctccaagcctcactggcatttcatgaatcaagtacttgtagtggagcatgtcaagaagacaaagccaggtcctcatgcctgtcctttaatatcacctgtaacattgtggcctaatagatgtgcatgccttaaaacagtgctgtatggtaatgcttctggaggccttgcttatttagcacacaattccttgaatacagttagaagaaatgaagttgatctgcttctgacatctgattgccatccagagtatgtgaattctagtccttaaatatcctatatacagctaaggagaatctagtgtggtgtatgtataatctttgtagtctcaacattttagatagtatttatcgaatacctttaactttcagcagccaaaggtttgtttagattgaggtccacatctgtatcacctcagtgccttatattttgttagaaccagcatatataaacaaaatctgactaaaagcaaaaatattgagcctaggatatttatgtatcttcaacatgcttgcattctagttactaattgtaatttatgtatgagtcactgtgttcttcagctggaaaatatatttcaaaattgacataaattaagaagctttaactacatttgtccagcccagacaatggaaaataacctgtcatagactcttctttcaaaaatgaaaaacagttttttccactgcaaaaaataagcattttcataatgttttgacaaaaataagcagtctcataatgttttgacagtaagcctagtaccatagatatcttagtggcttcagttatgaggttctctatatggtgggaggttgtcctggcaaggatttttgacacttaaatgtttattgctttcccttgggaatgtgataacctcatattaaataatatggctttttttttctttataaggattagcctttcttacatttacttgcactcaaaaaattccctcaaaaaccaaaaaaacccacctttggaagctttcaaaatgtctccttctaattccttaattcctcagtgctataggataactaaacagtgagtgaaattgcattgcagtgaggtactgtgcacagttgtaggcatcaataaatttctgggctgaacactgacaccacttgatagggaagataaaagtcacatttaatgatactttaacacttgagcatagttttttattttagtggtttatgctctcaagcattaataatgatttgcctttccactagcctccacttagatttaataaggaattcatattaatcattaaaagaaagggacatgattcttcaagataatcaaatattgacaagttagaaatagctttctgcctgggttcattgatataggttatgtgatataaatatttatttcttttctgtcactcagagtaaatgccaccaattgattcagcattgatatagtgtcaacagttcataagaaacatttgactggcctgtgttttccgattagtctctgctctataaagtgggatttactaaatctctccaattgtctgctcatagagtgtgactgctttctgaaaccattattgcttcgatttgtgaagcaaaggtctagtgatgggactagtttctgtcagacctttacatataaaataaggattaattgagcatttttattttaatgatttataagcgataggtactgattcttcttaacacagacaataaacaaagaatattttctgtgttgatccataattgaattccatttcattttttccattaatttcattaatatattaaatcaagcactttaaaaaaagtttaacacttagtctttggaatggagacattgttttcctgttatcactttatgttggagtaattccatttttccagcttaaaaaaataaatcagaagatatttttggcaagttttattgagagctataaatcagtctcactgatgtgttttctggatttgtttttcctacttcagttatagtgtggcatcatctgtttaacattggcccttgatttgaaactcattagaaatagcccaaagtgtcaatttgaagaatttaaaaagtgcacagttactccaaagatatgtgagtttggcctttgcatctctaaagttattttttcttttttttttttgttttttagattttataggagagggtggcagtattttcctattcctgataaatcaagtataaatctactcagatcagatctagaactaattctggtccagctgcatcttttggctgttattttgataacttcaaaaagcctctagaaaaactttttgtatttggctgggcgtggtggctcatgcctgtaatcccagcactttaggaggcccacttgaggccaggagtttgagaccagcctggccaacatggtgaaacctcttctctactaaaaatacaaaaaatttgctgggtgtggcggcccatgcccagctacttaggtggctgaggcataagaatagcttgaacccaggaggcagaggttgcggtgagccaagactgcaccactgcactccagcctgggcaacagagcaagactctgtctcaaaaaaaacccaacaacaacaggaaaacctttttgtatatagaaaaaaaagggagggggaatatatatctactgtaaaatttaaaaagtttaaaaactgtatcattactagtatatgtaactcttagattcttacagttcatcttggattgcatatgaagagtgaaacataaatgaggctgtgtatgtaagtccaaactacacaacagccctcctttacccacacaaacccaacctgactctgcccatgggttgttgctgtctctgtttcttttatggcccctgcctctctttcagcaggagcagagctcagtgccagtcatttctctaaggtcatttgctatcttggcagttgacatgtaattgtaactcctgtggctttttcttcctcctccttcacatctattattctgccttttatttacttttttagtcaaaacaaggaacctggactgtatttaaaaactacttggaattggccgggcatggtggctcacgcctgtaatcccagcactttgggaggccgagtcgggcggatcacgaggtcaggagatcaagaccatcctggctaacatggtgaaaccccatctctattaaaaaaatacaattagctgggcatggtggtgggcgcctgtagtcccagctactcaggaggctaaggcaggagaatggcgtgaacccgggaggcggagcttgcagtgagccgagatcacgtcactgcactccagcctgggccacagtgtgagatctgtctcaaaaaaagaaaaaaaaaagaaaaaaaaaaactacttggtattgttgttgaataaaaagctctccttcacctcttttcaatttaaagagctgtgtgattttaaaaacatttttcttcttaaaaactaacatcgtagctaatgaaatttcttttaacttgtgtctttcagttgattgtttaccatcctgtgggccagtggccattgataggaatgtccctccatacttaataccggagacaaactgctgagctatgatgttgaactggagtatactgaaagactgagtttttgactagctatgtaacttaagtaaagtggactaaatggtcttagaatgctgtaaatttctgtgattttttaaatgatacttgatcccaactataatatttaaatacaatattccataagcttctaaatagcactttcttatataatgaacactcttcctatgcttcattttgaaaagtcaaattaatatccttatctaaatgaaaaaagcagaaatactactggttgattgtagatccctttaatgattttttcatagttaagatcaattaaattagcccatttgataagagatatgaagttctaaaaatattttttgtaatcaattcttgggctctgctttgtttttcccatcccccccaaatttttttacatgaggagtatttgtacagcatataaaaattagaaaatacaaataagcaaaaagaaaaagaatctgatattttttaatattaaaacacagtcaggccgggcgtggtcgctcatgcttgtaatcctagcacttttgggaggctgaggcaggctgatcacctgaggtcaggagttcgagaccagcccggataacatggtgaaaccccatctctactaaaagtacaaaaattagccgggcatggtggcgtgtgcctgtaatcccagctgctcgggaggctgaggcaggagaatcatttgaacttgagatgtggagtttgcagtgagccaagttcacaccactatacttcagcctgggtgacagagtgagacttcatctccaaaaaaaaaaaactaaaactaaaactaaaaaactgtcaatcagttcacaggccaaaggtttgcataactttaaaacattgtagaaagacattataggaacacgttgctcactttttatagatactaagtgacatggttccagaacttgctcttcaaaaccatttttatctttatgagactcttgcaatcctcctggttatctgaaggattccatatttgtcttgattttttccattcttgaatttgtttagacagtgttaattaatgcacatgcacatacacttgaaataaacattctccctctcccctcctcctccctgcactccttccccgcctgtgccctgacagtgttggatgcttactactccttgttaggttggagtgctgggaatgtggattgggtagcttcttcccttctcttttccctgtagtggatgtaagtggtaaaaagactatgatgtcagaattataccatttgaacatgctcagagacatgccatacctacccctttgcctatgaagtggtggaggggatatgactgcagactgtggcccctccagagtgtagactctatctactacatagcaacttcctgcttactcttaaaccttagtgccacaaatgcagaatttgtgtacttgagtgagtgaaatgtctctcgtagaaatttatgtcaagccatgatgagagtgtagcttgttagttaatagtacaaatcaggttgttacggacatgtttagattacttagagaaatgttctaagggaattagccccagtggcctatttgtgcccaccaatggatactgctatttacgtttccttcattgatcaaagtaaaccaaacagcaactctgctagtttagcatctcgtcactttatgtgctacttttcttcatgctgctttaaaatttatcattcggtccagaataatgagattttattttgtttatgccacaccttttatacagcttaaaatattttttttctgtattagtagtataaaggtagtgatgaacagaattcccctcaaataggaaaatagttgccaattgttctggcatgtctttcattacttcactgaccctaaatataataattagctgattgtaaagggcatcagtctggttgtactacaattaaattgggtgctggattggcctttacacattaatctgtcaatattcttttaaggattggtaaaatggcttggaaaagaagctgtttctgttacctgcattgtactcctaattatcacagctctctgaagcttcaacttcagaaatgtgtagaaggaaaatatttcccttggtaaatgaacccttgctttattcaattggtggaagtttagagtagagcaaaatatttaaagctttgctatactggtctgagagcaaactattttttttccaagtgatattgaattaaaaactccatccattttctgcccatgcaaggcagtgcaattccctggaaattgattttttttttttttttcagggcttgcagtggctttccccaagctttagctatatggaaaagaacacctttattaaatccacttagtgaataaagttggcagttaatttttaagcatctggaccagtgtgtagaaaattactgaatgcatcaaataaagtctgactagtcttaaagtcatttgataaataattgtatagggagctctctaaactctaaaacattattttatgggcacctactattcataatacaaatgagagtagttatttgtggtataataggttttatagaaccttgaaaaacatgcaaacttatatataaagttacgaaaatgactttaataaaaattacatgcctatgtatttttcctttatgtattataatattcgactatatgtgcatcttaagtgcattgatttcgtgcttttccatcttcataatatgatttctgcctaattattgctgtatactagtttgttatttgcaaagaaaagctatatctactctaggaaaatcataaacattatttagtttgttaaatgttaattatgggggtcatctgaggagttttctagggctgatttatttacagatcatgcattagattactgagtgtgtgtgtgtattgtcttcctaagtttgactttggttatgtgcagtgctctttggcattggttatatgcagtactggagactgttttcttatcagtatctctgacctgacccttttgagctatgttgtatcattccattttgacaccttttatcaaactttaatgaaatgacccaggcaaacaaattgtcattaaactttccatcacttcgtcccttggtatcgtcttttataaattggacagcaaacgttgtattgatcttctcgtttttgcagctgaacttgaaatgacccagactgcttgttgtttatggcccagagttgcttttccttgacatttccatccacagcatgacaccctttttgtttttctttctttcttgtggagatgaatgaacaagacatacgatatcgggacactcttggtcatggcaacggaggcacagtctacaagtgagtagtcaattttgtttaaactttctatccgcttttccaaatactgagtatccaagttctctgtggcaaagatttttaaatgaccactaacacttagattttatttccatatttgactccaaaattctgcaagacatctattttctcaagaattgcctggaaagtgcatttatattgcctttttaatatttccgagtctgcaactctcctgggtgtgtagttaatagtccaccattagtaagtgtacctttaactggcctgaagtttaatgcatttttttcctttgctttttaacactattattattattttttaacttgctagtaccctacgctagtcccctgcctgtttacagttatgcccagtggaagccagaccttataaataccattgctttgccctgtgtcaacactataagttattaaaaagccttcttcctgttgtattttcttctctcctcaccctactcccctgagataatttctacacattgatgaatatgttaagttataaagttctcccaaattccagttgcagtgatcttaccccaaaggaatgttcattttcatcttaaaaaatgctagccataaaaaatagttctccgacagggaggtcttctcatgcagtagtgcaaagtttaaactacataatgtaatatctggtacttaatagtctgcaatggtgtatgaaaaatattccactaggaattaaaaaatccatactctgtaagaaagccctgagggaataataaaactttcctccagagagctggttttccatgtatacactaatcctgcatcacattatggttgtgatattagatcacaaccacagatactttaacattgatattaatatgtatttccagagttgtaaaataattaacttattttctaattggttacccatgttcttagaattttaagttctgactaaccacatgaatacacataaaaattgccctattctatgaccatgaaggttcacatcctaaaaatcccagaacatcccctactcattgatgcagccttggtatagaatttgatttctcaggcttagaagctcttttgaagtaatctgatccagtcacccattcagggcttcagtgccctttgcagatacagccaagatgtgagtcctttctcctgaatatagtcctttaagaacttatgttcacatgtttggattgttttttcctgcagatgactgagtattgtgaacagttggtctgaaaatgaagttcttccactatgataattcagagaaataaataataacatgtttcttacatgttccttgggccttgggcctggcccttaaaattgaggtccaatgtgtctaatgatttttgcggctactattctctttccctggatcatactagcgttccttcccacgcaacctccactataaacggtatcttttcatcttagtcttctcttccttacgatctgacttagatttttcctgtgttctgaaggtacttaagttcaggtacccatagaaaggaaagaggaagaaggaacatgtatactctgatttgcttctattgagttccctggagggagcacttttcaaagcttgaacctttcttcttaatgcctttatgctgatagccaaatataataaaacaggaaagatttctggcaactctttgtattccttttatttgcttcaaatggaattaaaaaatgtttatttagactcctaacctacttatctgtgttatttcaccaaacctttagttttatattaattgaaggtctattgtgaatttattttcctagcttatttctagaagggaagaagcataagaccatgaaaccccagcagaatttttacgagacataatattctagatgttgacattttaatcctttattttaaaacataggtttgtttgtttgttggttggtttgtttattttgagatggagtctcgctctgttgcccaggctggagtgcagtggcacgatctcagctcagtgcaacctctgcctcccaggattctcctgcctcagcctcccaagcagttgggattacaggcgtacgccaccatgcccagctaatttttgtatttttagtagagatggggtttcactatattggccagactggtctcgagctcctgacctcgtgattcacctgccttggcctcccaaagtgctgggattacaggagtgagccaccagacctggccaggtttattttttaaaagagggagtatacagagaagtggaaaaaacatgcccatcccccaagggaaaattacaacatgaaattatgttaatgttgtttttaaaattgttattttaaattgtggtgaaatacacataactcaagttaacattttaaccatatttaagtgtatagttagtggcattaagtacattcacattgttggcaactgttaacaccattcatccacagaactcttcgtcttgtgtaatcgaaactctgcacccattaaacagtaactcctccatcactctgttaatgttgtttttagctaagaagcatggctagaacttctcctttaattagggctactatgtcaaagggaccattcttctatatgtccttgccacaagttttttaatttgctagaatgctgtgtgtaacgttaggaatttatcctaagagctcatttagctaccgttgctaatgctcactgtgagtgttgtaagatgtaatgtttttgacaggattgcttatagatggtgaatgacagtatcctgataattttcattcttatatagtagatttcttataaaaagaaatttcatttaccttattgcctgtgtgattcttgagaggggcggtgaagataccaaattgcataaccgcttgtcattgatcattgggcatcatttttgctcaggcttcagcttgtattattgttcttatatccctggcttttagtacagtgcaaagaaatgatataatcattgataaatgaggatccactttactaaagtctctataaaactaagtgtttgatgtgttatgattgagtttcttctacactaagttcaccttaatggtgttgatgataaaaaatatggtttttcaaacagcatgattacattataggctatgctacataaactagatgaagaaaatattggaaaatccactcattggtaacaaaactgcctaataggcttattccatttttttctttaaagtgtaataaagctaataagtgcaaagcaaaagtttaataatgcagtcttattcacttcacttgatggaatgttgggaatttcaagggatattataatcgtgtaattacaatgtatatgatttaacagttgatacattttcctcctttaagtgtagatatccttcacagttgtacaatatgaaattctggccccagacatttaaaccaaatggtaatgtgaattctgtgtgctgtctcctgacgagctgtgctctatattatgagagtgacttaggcaggtaattttaagttggtatttcttggattactaatttgggctacatggaacataaaggaaataccttaaagtatggcccaagcctaggaagaagaaaagtttaggaaaagataatgaatgtattttccttgttgcctcatttcctaaagtgctgcaagttgctccaaaaaaataaattcaggaaagacacatgttctatttccctctgagagattcataatgaatttcaaaaactttgagaaagtagagaatagtatgtgttgtggttaagtgtgagggctctaagtttgaatcctgcctctgtcactaattagctacgtaacctttggcaagttatataatgtcttatgcctcagttttcccatctgcaagatggggataataatagtatctaggttgggcggggtgcggtggctcacgtctgtaatcccagcactttgggaggccgaggcaggtggatcacgaggtcaagagattgagaccatcctggccaacatagtgaaaccccgactctactaaaaatataaaaattagctgggcatggtggtgggcgcctgtagtacccagctactcgggaggctggggcaggagaatagcttgaacccgggaggtggaggttgcagtgagccgagattgtggcactgtactctagcctggcaacagaacaagaaaaaaaaattaatagtatctaggttgttgtgaggttaaatgagaagatccgtaaaaggcttagcactatgactgacacttattaaatgttaactactggtaatggtagtactaataatagaaaaattattcacattttgtacttcctaccttgacttggccatgggactcttttcttttttttttttgagacagagtctcgctctgtcgccaggctggagtgcagtggaaagatctcgtctcactgcaacctctgcctcccgggttcaagtgattctcctgcctcagcctccctagagtagctgggattacaggcatgtaccaccatgcccagctaattttctgtattttagtagggatggggtttcaccgtgttggccaggatggtctggatctcctgacgtcttgatccacctgccttggcctcccaaagtgctgggattataggcgtgaatcaccacccccagccagccatgggactctttttgataaacatctcacagaattatagttgtgttgaactaactttgagaaattctgcctttatattatacacattatacttctgtattttcttctattctgtagttgcttaatgaatcatgatatcttatgtattatcttaaatacaatgattttttaaagtttcaaagtatttttaatcctaatttattttcagattgctataggacagctgggttaagcccattttaccactgaaaaaactggggcttatcatgtggccattcagcagcaaagccagatttctatacagcatttcttttctttttgcttggtgttcttcccccaggcagtgttgtctcaaggtcaagcagagtccattttgttttcttgtgttttctcatgtacccagcacagttttaaggataaaatagacccttggtacatcttggctaaaatgagaatgaggcaagtggaggttttagtggggctctttcattggatcttcctcatatctagctactttgcgaggctgtacaattgttgtagaacattcacctagaagaaaaagaatatccacactgaggagattgatattcgaatgattaactttctttaaaatgttaaaaccttcagtgcttagtatctgttgactcactagttactgtctctttttcttgggtagtatgtcatatggaaataaaagtaattaacaggcatagttactttggaaacattgtttgattccaaagccagtctctcagactctgcttccttggcatatcatttgatggagtcactcaaactttggatctagaaatgaagtaatatttaacttttaggattaaatcatagtaagtcagttagccagcaatcactgaaagattatcttttatattattttttccttaatgccagttattcaagccaagactcatattttcagctttggggccagataatctagtctcaagatgtttgaaaactgaattttctatctccagctccttcccacaggatagagtaagagtctgatctggacttgaggtagaattttctcagtgatacaatgggtagtatatatactgccttcaaggtgttttgaaggttgaatgtataccattacttaggaattaatttgaacctatctagagacaataagaggagggaaggaattgtcattctcaaagatgctggtctctcctcctttctgttgccttatctaaaaagaggtatttgctgggcagtgggctggggatggtccttggaggtggtaactgagatcctgtggcctattaggttgtgttttgcacttgtgatttgactgtagaggccaactaaaacattaaattactgtttgggagctggaatcatattagctcattatagtaatatgatttatttaatgaaaattagaaggactgatggtcatttgtataaaatgagaaaatacataaattgtctagttaaatgctatttagtaaacagaatatttcaaaacatggaattccttaggggaaacagaatgaaaagagtccttggtggtgaaaatattgggaaccacatagtacccagaaaaccttgacttcctctttcaccaaccaacctgaaggtgtgaaacttaaagagggagcaagaggtctggacccagcttcgcttgtggctgtgttagtggccctactcctttatatatttttgcatgatgtgtatcttgtaaattaagagtagtttttaaatggttttaaaattgacctgagagctagaatgatggtttgatttattttgactttaaatttctaatcacttaaggagtcttttccttgcagccaagatcatattttaaagaagcaaacaagacatcatcctaatgcaaaattaaatatttgtatatgactggattgcattatagtatcgtgacaagcaaggatattaatgttttcagaaaatcaatgaatatttgtcaaataaaattaattatgtatgtttccttctctccttctctcagcattcattgttacaggtttgtttcatacgataatgtatattttattgattcgaatctaaggaatgaacctgagctcatggttctctgtacctttcccacctttgcttttccccacctctccatgttcctgtaacttcatacatgctcatatccattatggcaatgatgtattattggcatccagccaacatgacaggatgtcacaggtcgctgagcagagattttcagactcagtttccacccgaattaactattattgaaatagtttattgagattgaagtattgatcattttctgctaaccttggcttaagggaaggaagaagaggcagtagtgtttttgaaagacactaaatttcatttttaaaaatctcatttatttagcctttttttctttctgttttatagcctttattgttttattgcttggaaaagggtatcttggttttattttttatgatagtataattatacttcagaaatgcacttgattactatgggtaacaaaattgttctagtatattggtttggccaatattgctatacaaacaacttttcagtcaattgagtctggtaaaaatcaatacgttatggtaatatttcaagtaagaatttgctgaatctaagtgtttcaacttcatctcctctcagagaaaaaaatagttttgaagtggcaagacttctttctaatattttagtaacaattttttatttataaagacgtttaaagtccccagcaaaagtggttgtgatcaggtaaacattacattagcgcacttccgtgttgtagggtgtaagagatctaatttccatttgaatctattccctgccacaccaagaaggcataacatcagggactgacatagtgtctgtcacttttggattctggattcctgtatgtagttctgggtgctgagtttacagacatatggacagttcagagagcacccagaggagcaatggagagaataatgagggattggggaattgtgtctgttcagtcctccttcattcatctgtccagcagccaagttctgagcatgtgctgtgtggagggcgtgtcagatgttggggacagcctagcctcataaaacttgtgtctggatagatgaggaagttctgttctcaggtatgcacaggaccccacagtctggggccacctgtctgtgtgtatggtgcacagatctggggggctgaggaagaactgatggcttttagctttttcctcaggaaggatcaggaaaggcctcatggaggaactggcatttgagctgagaagtgtttgaaaggaattggctaacttttctctgagaaagagaagattaaagggctccatgacagctgacttaaagtctgaagggcatttctgtagatgaggagcaggtttgctttgtgttcttctgaatactagacacaaagggcctgtcttgaatgtctctgtgacagtcggcctttggttagagtgattaatgtactctttctactcttgttcccactgggttgtgttccctggaggagagtcatgtctaggttaccttggtgggagtcctcacagggccagcacggtgccttacctactgtaggcacttagtgagtgtttcaggaatttacctgcagaggcagattcttcacagcctaaggatggacacaatgtgttgttcattgctgggtgactctgggaagtggtgaactcctctaccttaagcagaatgatgtggctgttgttcagaactgctgagaaaagaattcccactttgacctggacatgagatgactgcacaggtgtctcccaagcctaaagtcccagaactaaattcagcattcagttaccataaaaaccttatatcaggtgttgcttggttttgtttagtctatattcatttttcactgaacatcctgtcactgtgccaaggactattccaagcatgtacagtccagttgtgaacaagataggcaaggtccctatccagaactcacactagtggggcaaacaataatcaagacaataaacactgaagtaagattatagaatctataggtctatagattctatagacctattctatagacctattctataggtctatagattctgtagacctattctataggtctatagattctgtagacctattctataggtctatagattctgtagacctattctataggtctgtagattctgtagacctattctataggtctgtagattctgtagacctattctataggtctgtagattctgtagacctattctataggtctgtagattctgtagacctattctataggtctgtagattctgtagacctattctataggtctgtagattctgtagacctattctataggtctatagaatagactttgcatattctataaaaaatgtagaagaggtgctcaggaagacctatctgaggaggtgctgtttgagctgagacctaaagacaggatggaatcagtatgggaaaatctgggagaagaaccttataggcagaagtaaccactcaggcggaagccctaagattaagataggcatgaacttgtgtaattggagtagaataagctctggggaaggtgtagagatggacagggcttgatcatgctgggtcttttagtccttagtaaatccttgctaagaaggtatgttaccctctttttacttatgagaaagataacgtttggaagggctaagtggcatgcccaagatcaagtcaagaataaaacttaggtcttctgacacctgcttcccaagccaaggtttttctgtttgccattcactctctgaatttcctaactattaacccaagttatttttggatgtaagatataaaattagtgtataaatttgaaagtcaatgatgtatcatctctaggtgttaattttagaggctttttagtagatgttaaaacgtccacttcttggctgacagttatgacaacataacttgttatttggtctaccctttgggtgtccttatttaccaaaaacttataatttaataattgaatccctggattaaatgtatggttgtgctagcaggggtggtctatttcttgatttataagacacgttacttttttatagctattttacagtatttgatgtgttcgaaaatcgtagtctcttggttggcatattgcacaagcaaatatttgtgtaccatagcatctagggtatttacttaaattgcttttttggaaaataattcactggaaagtccaaaaggcatttaccgcgtataactttctgccacagtttttttttctttgctctgtcattggttactttgatgtaggggaccatgtttctgttaaattgctgtcttactagagtgaaatatgtttaggttctgatttgtacactaacgttgaattggaggagcagtttgcaaaatttgagggggaatagcagtagagatttaggttgtgggtattaagcattaaatttttttaaaaaaacattaatttgctttttaaatgtgactttatatcatgttgtcttcttgaccctaaaatttccttacttttccttgtcagtatggcaaaaagaaagagagagtacagtggtattgctgaaagcagttaatggtttttgtcttgtgaatttaaataataaaatgaaaaatgttcacacaaaattagaacttgctttagggcacaatcaatatagcattttaacaagcttaatgtatttggaagatatgtattgtgtgaggttctcaaacatactgattctattacgacggttaactgtagcagcaaaatgtatcaatatacttagccaataaacataaaacttattaaatcataattaaattttcagaaaagttatctaaaaattatgaataaaatatattttacatggcctcagcaacaaaatatatagccaatgaaactttataagtggtggggtaaaatacatgggataaaattatagaatgaatttttaccatagacacatgtaccgagttaagtttgtgtacaccatttgtttctcctctcttttaacttcttttggaggtaattcttagtgagtatttgcagagcacaacagctggggtaactgaccgaaggggcaaatgagaagtttccctgctcctttggagtctcaagtgaaatgtttcaaagccctacctgcccttatacgtggaagatgccaagaggtactcagagtcactgtggttgcatttacatttctacagtgggcgccaatcacaagcttcatgttatggccccagctgtgtgggaatgtagctgagcacactaggtatcgtcatcctcatttgatttatgaagaaatggaaacacagataaatgaatggatttccctgaggattcagaccaagtcaaggataagatcaccactgaaacccaggcttttttaattcttagtcctttcccaatgccattcctggtaaataattacattttggctctaagaggagctagaataaacagaatatatgcaaacctaagaatttctgccagcaatctctagcagatatacttcagctgtactttgaatttttattttgtgcaccaggcacatgtatcttatagatgaccaatatgaacaaacagctgtctcccttcctccctccttccttggaacgtgtaatctctgaataactgattagctcaatgtcagaaatgtttgtgctgatctctgaacctcagtcagttcaacacatgacttcctggaaattttatctttggttttcttttttttttttttttttcactgccatgattttgtgagttagtttatgagtgtatttaaatcatttctggaatctaaatattttggacttgctggtctttataaggaagttagtttccctcctctcacatagacctctttctgctttctcctatctatcatattttaagagtatatgtgacaccgttaagttttaatcttctaaatggattggagaataacaccttcccttgactaacctcaaaggatttttaaaaacagaatgttgcctaatttttgagggagaatgttctaacacagtttatatatttttgtaactcaacaaaggtatctcataaagaacattggtggaattgggttttaaagtccaaatactttccttctgttgtccagaacatagctcctcaacctagaggcatagtgtcatgtgcagtgaagtcactcaaattccttcttattattggtttgaagatgactgtccctggatggtataagatatgatggtagtttgtgtcgttcagtttttacgttaaaggaaaaagtctctcctggtttcttttgaccctagtcatgatatgcccatttcatgaagtcttttatgcacaaaagtgcacaaaatgaagataaagtgcctctctccagcctgacaaaagccatttctttgcagaatggtagctgcagcgaaagtaaataaatgaatggacagcaatcacagcctagttgatgaaactgttcaattaaagcacaggcatttacatggtgtaatttccctaaattgccaatgagcccctttagacacaaccagtgttcaaattgatttcagcattgattttggctgaagctgataaatttctgcttgttagttaaagtaattttgcagaagactttgtactgcagtattgaagtgttcatttagctgatagttaggagttatttacagaggcctctactgttgttctgagatgggacaattccccaatcatcttttacttttaatttttcaggcttcagtataccaatcaataggtgattgaaactgattaaaacttatccaaccagctgcctatggcagtttaattagaagctggatgattcttaaattaaagttgtcttattttcattgcaaagccatcttccagaagagtaaggcaagaacagtgcagaaaacttaaaagactggctttgctaaggtatcttgcaaatgttaaatcactcaatagctattcctaagacaattcaaaaatgtatcagagagtttgcttttatggagattagaagtaataacatgcttacttgccagccaaggaatgtttgtttcattcggtcagagagattacctattgtataatgatacatgtgaaagaccagctgtttgggatatatctattatctcataagcaagatgaatgcttgagcttagttttaaacactgtaatgcaggatgaaactagccatgatgatatcctctgcatctgccccctggaaaccatcagctttgaatttatatttttattctgttttgaggtcttgattaaaataaatctccattgaatgaaaaacaaatatttttatataagttcatgttgacttgtcaacagtattgtgggcaggattatagaagagagatttttgctcctcttcagctccctagggaagcttctccatactcattttatctagtgtggacaatttcttgagtttttaatggaaacgggttaatatttttgtcataggggacatattacatctgatattacggggaagaagggaagaaatggctcacttttcagaggtgcatttactctttgacccactagggtactatttagtgttctagaagaggtaatttagtaaattgtaccccagtggcctgaaaaagttaatgcaactctgaaaagtgagccattcaatcgattttccctattgcttttaaaaaatcaacactgaccatatccagagaatgttgaagacaactgaaattagaggatctagaagcaaccagtttattttcacacaaagcttgttgggacatgcactggatttggcttcagaggacccagatctacttcccactccagtacttacagataggaatcgtgaagcattcagtaacctcaccaagccttggtttccttgtctataaagtggtgataataataatatttacctcacaaatttttgtggaaatcaaatagctttactatatgtaaaatgttttataaactataaagcacaatagaatattaattattagaataaggaggttttctgaagtagccatttatgtatctgattttggaaagtaatttattgttagttttcccagaaactgtgagcaaagattagatggttatcacgttgtttcaagagagagtttcctagctagtcaatcctcagggtatttctattttcccccacatatattgcctaacaattccagttctttcattccttctcatcattaggctttatatctcttgcttctctgtttgcccactacattatttcagaatccttgatcaagagatcagaatgactgtagtttccttgatctcagaggtatttagaccatatattaaaagacattactctagttgatgtggagagtgttaaaagcttgaatcaggccacatcaacttgtggaagaaatatggaggtagtgatgaccacattaactctgaggcaggtatgggagtaaaaaggggtatatagccggagtaaacagaaagaagaaatggcaaatgtagagttacagtagctttctcttattgaaaatctttctaatctagccaagttccctatatcattcattaggttgatttatgagccctatgtacaatcagttatcttgaaattaatatctgtgacctcataacatatttgacttgagacctaaacagtatgaggggctctgtttttttttctttctttctttctgagacagagttttgctcttgttgcccaggctggagtgcaatggtgtgatcttggctcactgtaacctctgcctgcctggttcaagtgattctcctgcctcagcctcctgagtacctgggattacaggcacgtgccaccacgccctgctaatttttgtatttttagtagaaacagggtttcaccatgttggccaggctaatctcgaactcctgacctcaggtaatctgcccgcatcggcctcccaaagtgctggaattataggtgtgagccactgtgcccggcctgtttcttaaccacaaattattttgtaatcagtagtcaagcatctgtaataggtttttaggcagaaagaaggttggcaaagactgctatttgaactagtatagtttacataaaagcttctttttacaactgctgtttactttggatttcctgttttaacagctagagcctggctaatgtgtttatctattatggaaggcaacaactgtcagtgttgatttccctgaaactatttgaagtatttctgtggatggctactttagtatgtgacagaatactaaaatttcgaagcttggccattagtcctaaacgtgttaataaaatctaccttcaaataaacctaaaaagaccaagcaattagaggattaaattttaatttaaaaatttaaatttatttaatttaaaatttaaaaattatatttttcattagctgaaccacagctggtttacatttagttactgaaaccatatcattgcattaaaaggtgacatctagagggttttaaaattaatctcgcaaggtactaaaagatttttgtttgtgtcagtatttgtgtactcatgagctttatacagcagagaagcgttctgcatgttttgtattggcttcagagttgttcagccttataatcttttgggaaaatgtaatacaatcaactctcagattccttgttttaagtaggagacttatagtctcatgtgggtatctcctaatagtttaaccccctcgatttctaccatcttctttctttttgttttagttttcctttgtgccaatgctataaagtctttgaaatggaaacttctaagttgaggaaagacttgtatcttgttattctaaatttacataaaagcaggggcttttttggttaataaataaaatgtcacacaaagagcaaagaagcatcatctgtaagaatagaagcatcatctgtaagtatagaaactgatgatcctacagtatattagctttaaccaatgccatgttttaataaggaagtagatttaataattgaacctgagtgagaccaactcttaactttctgtgccaatgaggagaattaagaattgcgttttagacaatgatttatttgtcttgtctcgatcaaactttttcataatgaatcagatctcagagagctttcttttcctttgtctttttacctctgccatgtctctgatggacgtcctataaatccctagggcattcagagaatagagaatcagggaatacaggatatctcacaagctgtgaaatctttgcatggaaaacaaagaactgatgttattatttgagagagtgaactatctctgcaatgagctaataacaaatacatttgtaacttttatttattttaaaatagcctttgttcaccgtttttcttgtcttctacctgttctctgagagacatagggagcaaaataaccatcactttctttcttgcttacctagaataagaccatctctttttaattactggttatttcttgagccaaatcctaaccattgctttcactattttagtgactggattattttcttaggtttcctatccatttggagaacctttcaacaattgataacactctataaataattcacagagtaattgtgtccctcttttcactaaccttctttgaagtacgttatgtgagaagtagaatttaagtcagtagcatttagttcatgtggttaatgaaggaagtgccctgtgtccttcatagaacagtggcaatactatcatttcagtgtccctgtgttgccattatgaataaaagtcattatacatgcaattacgctccaggtcttttctccaagaggcaaaaaaggggtatttccgtgctcattttgataactattttgctaataaattgacatttatgacataggatattgtcagttatgctgaaatctgaaatatttatagtaagattataggccagcctcccccattctttctttaattatatcctacctcacaatcactaggaaagcacatatgctccctattataaattctttctgctcataatttaaaataatttgattggaatatgtttagaacttaatatgcagaatagtaccatagaaaatagatgcctactttaattgtatgagattgtaccagctttatcagaaaatgtatgatcagctctaggttatttattttgtgaacaagagtcagctgggatgattcatattttttggttctcctagaatttgaaattctaagcataaataattttagtaaacatggtaaaatccagatgcagttgatcttatgcatggcataaatttgtgtgggagtccagatgttggaatgtgaacacaggttgtttctcccttctgtcttgtgtggactttttaacatgttattttcacatatttattttccttacttttatttattttttgatacagggcctcactctgtcacctaggctggagtgcagtgatacgatcatggcttactgtagcatcaacctcccaggctcaagtgatcctctcacctcacgtcccaagtagctgggaccacaggcatgtgccaccatgcccagctaatttttttaaattttttgttgagatgaggtatcatctatgttgcccaggctggtcttgaactcttggactcaagcaatcctcccacctcagcctcccaaagtgttgggattacaggtgtgagccactgtgccctgcctattttccttacctttaaagattattctagaaattcagtttattctttgtaacgatgtatcttttaataaattcgcattaacagtttagatgaaggtgagcacacctctaaccttttatgtattgtactagactcatctttaacatttcaaggagtaaataatataatcagttggatttatccctaagtattgcttttgaaatcagtcacatgttttctgaacactttgtgcaaagtacttcgcttggcagtgggggagatataacatcaactttcatggcctcagggaccccattctttggggtctgttgttagcttactgtttgtaccttctcgtctcctttactgttttcttcgcatctttctgacctctgaatttagagagcctcagttccagtccttacacctcttctctgtttaattcacttcctaagtgagcgtgtgtagttccatggctttacatatcatctgtatgctgaggaagtccagatgtatgtctgtagccctggcctgtgtcctgaacttcagactcatatctgattaccagttggatgtcctctaggcatttcaaaattatctaaaactgagctctttatttctttggaaacctgcttcatttacagcttctcccatctccgtaattggaaactctattctataggatgctaaggacaaaaactttgcagtctttcttcctccttctttttctctcagattatgtatacctttacccacaaatcttgtgggttcttcctcaaaaatatttcaagaagctgaccacctttcatcactgttttcttgctaccctattcaaaaccactattactgcttgctaggattttactgcaaaagcctcccaactagcctcccagtttctatccttgctttcctgtaatgtgttctcttcactcagcagccaaagtgatctttctgaaatattaggtctccccctctgctcatgacctcttatatcacttggaataaaagtcagagtcctcaccatggcctaaatggtgctacacagtctgttttccttacctctctgacctcatctcccccagctagccctcttgcttattctacttctgcatacatgtcaagcacacatttccaccttgggcttttgaacttgctgtttcctctacctggaatccccttcccctagatgtccgaatggtgtgcccccatactgctcacatgtaacctgaaaagagaggcatttcctgacttcctccccaaccctaatatcaaatagcatgtccctaatgttgatcagtctctatatccttacctttatttttttcaatgcacttacccccacctcacatattgtatatttatttgattattgtcagtcagcccctattagaaggtaaacttcacaagggcagggacttggtctcatttgttctctgctgtatccacactgcctagcttattgcctggcaatcagagacatgcattaagtattaaatataaaaagaggatctaggaggagaatatatcatatactgtggaagaggtcaagcatatagtaatgaacaaaatggaccctgaccttccccttgaaacttacaataaagtagaacataacatagaccctatattaagaatttacagcatagttaggtaattagagtctacaatatagttaaataaagtgaacaccatttctgtaatcccagcactttgggaggccaaggcaggaggatcacttgaggccaggagttcaagaccagcctgggcaacatagtgagaaccttgttctaaaaaaataaaaataaaaattagccagccatggcggtactctcctgtagtctcaactactcaggaggctgaggcaggaggatcatttgaggccaggagttcaagaccagcctgggcaacatagtgagacctccgttctgcaaaaaataaaagtaaaatttagctaggcatggtggttcactcctgtagactcaactactcaggaagctgaagcaggaggatcacttgagcccaagagttcaagtctgcattgagctatgattgtcacactgtactccagcctgagtgatagagtaagaccctgttgcttaaaaaaaatatactagtaggccatgtgcagcggctcacgcctgtaatcccgcactttgggaggttgaggcgggtagatcacctgaggtcaggagttcgagaccagcttgaccaacatggtcaaatgccatctctactaaaaatacaaaaattagccaggtgtgatggtgggcacctgtagacccagctattcgggaggctgaggcaggagaatcgcttgaacctgggaggcagaggtttcattgagccgagactgcaccactgcactctagcctgggtgacagagcgagactctgtctcagaacagaaacaaaaacaaaaaaccactactgataaagtatatacctgtgaatttaaataactgttgaagagaaatagtaatttataacacgaacatataaggcaatagagtagttgatgccaatagataaatgaaaccacagggtaggaaatctagtaggtagggaagtaagtagaaataaaagaatggaatccaattgaattcaggaaggaataacatgaaagaagaaatggtgaccatttaagtaaatctgactgtataagacaacgatagtaataattcaaaatgaagttaaaaagactggagaaaataatatgttaagatgagaagggcttgattgaagttaaaacattctaagatttttatattgtttaggagaaggatatagataacaattaactttatgttttgttaagtcaggtatgattgttaaaaattatacgggtaactaaaacagtgaatagaatgtgtaacttcaaaacaaatagatggaataaagggagaataattcagtataatagaggaagagaagtcgataggtgtaaagtaaatgaattaggtggtagaaataaatccaaatatatcaataattacaaaaaatataagtagagtaatattagcagctaataggttaggttgcattttttaaaatacagttatgtgctattttagactgtattgggagaaatttctaaaataccaagacacagcaaaattgaaaggaaaagggtaggggaagatacctggcaaaaactaatcaaaagaatgctgctactgtggttatattaacataagacaaaatagactttaaggcaaaaagtattactagagaaatgttatgaaaatacaaatatttacaactgaaccacaaataccatgtattaatatgaaaactcctgagatgcaccaaagtaattcttaaaggataggtttatatacacaccttagtaaagaataactgggtatgatatgcttagaatctaactcaagaaaatcaagaaggtgggacagggaataaacccaaagaaagtggaaggaaagaaatactaatgaacaaaagtttgaaaaaaaaaaaaaaaagaacaaaagttaattaagtgaaaattcaagaaacaattcaacaaaaccaaaagctggttctttggaaaaacttaataaaatatagcagtgagaagcagaaataacaaaattaggaataaaaagggaacataattctatacataacagtgattttaaaaataataggatccagtgaataactttatgacaataaatttgaaaacacaaaatggccagtttcttagaaaaacttaatgaaattgtcttaaaaataaaaaccaaaatagacctagagcaatcaaatgattatttgtaaaatgtgcctgatgtagttttaggcactggaaataatagcagtgaacaaaaaaaacgaaagtgtgtgttttcatggagcttcctttgttgtggagggagacataataaattaataaattttatcaggtgttgctaactctgtgaagaataaagaaagtggccgggtgcggtggcttacgcctgtaatcccagcattttgggaggccaaggtgggtggatcacctgagatcaggagttcgagatcagcctggacaacatggtgaaacaccgcctctactaaaaatacaaaaattagccgggcatggtggcacacacctgtaatccctgctacccagaggtggcagtgagccgagatcacgccactgcactccagcctgggcaacagagtgaggctccatctcaaaaaaaaaaaaaaaaaaaagaagatgaagggagaatgtgctgaagggagaatgtgctgttttatgtaggaaagtcaaagaaacaatataggacctgaaggaagcaatggagcaaaccaggtatatattggagaaagtggcccagccctcaggagtaggtgcaaaggccccgaggcaggagcacgtttgatggaacagagttgagtattgtgcataagggagactggaagaagcagagatcagtgaggtaactaaccagggcccagatgatgaaatccttataaagacttttgattcagcagttagaaatctacccatgaaatggagatgagtataataacttctactcataagattatgaagttaatgaattaaatgcatgtggatttttttttttgtaaaacactatccaggtgattatttttttcatccagaagtagtaatttgtcaaacatttatgaagtgaggagcacctaccatgggccaggacatgtgctaagcataaagaatagaaagatgattaaaacatggcagcgctcactgcccagtactggggacagacacataaatacttttctgtagtgtgccaagggcaataatagagcatgtaacatttgaagagtaggagaagcatcaaagtttaactttatagcgtttataagaaagtgtatgggctgggcgtggtggcttacgcctgtaatcccagcactttgggaggtcgaggcaggtggatcatgaggtcaggagattgagaccatcctggctaacacagtgaaagcccatctctactaaaaatacaaaaacaaaattagccgggcatggtggtgggcgcctgtagtcccagctactcgggaggctgaggcgggagtatggcgtgaacccgggatttggagcttgcagtgagccaagatcatgccactgcactccagcctgggcgacagagcgagactccgtctcaaaaaaaaagaaagcatattaaagggaggtatataggtatttttagggtagcttatgcctcatattttcctgttaacccaaggagaatgaaaacttggccttctcatgattgtttagtgacgtttctgctgagattaacacctgaatggcgtacttaccacacctatctgtagtgtgaataaacttatagtagtgggcaagagataaacatggtaagaaatctagaagttggaacatggtatatccataccagatggctcttttaattgtctccaaagttggttcaacatgaagtaatactacgtgtttaagtttttcttaacaataaatgatatattgcaaacttttgccagttctttgttgttaaagctttattagagggtcatttgtagagcatatagtctaactagcacgtagagacactactgctctttaagtctgttttggcagctttcattctgaaatcactcagccagtttgaaaacttactatcttcctttttttttttttttagacggagttttgctcttgttgtccaggaggctagagtgcaatggtgtgatctcggctcatcgtaacctccacctcctgggttcaaatgattctcctgtctcagcctcctgagtagctgggattacaggcacccaccaccacgctgggctaattttgtatttttaatagagacggggtttctccatgttggtcaggctggtctcgaactcccaacctcaggtgatacgcccacctgggcctcccaaagtgctgggattacaggtgtgagccaccgcccccggctacttcctaccttcctaacatttaattcattagtcttatctcattggatcctcacaactctataagggagagactgctttccctattccagactagagataactgagacttggtggggcttactgacagtcaggttcacatgtttaagacgtgggagagctaggccaggcgcagtggctcacacctgtaatcccagcactttgggaggccaaggagggctgatcacaaggtcaggagatcgagannnnnnnnnnnnnnnnnnnnttgcctggagcaatttggatataatggtctttggcctgattgaaataggtcagtacctttgtaagttttgaattatatgtttccctgccctagaatacaggtaaaaaaattaaacatcaccgatctctttgtgtgtgtgtgtgtgtgtgtgtgtgtgtgtgtgtgtgagtgtgtttgacggagtttcgctcttgtttcccaggctggagtgcagtggtgcaatctcagctcattgcaccgtctgcctcctgggttcaagcaattctcctgcctcagcctcccgagtagctgggattacaggcatccgccaccaggcctggttaatttttgtatttttagtagagatggggtttcactatgttggccaggctggtcttgaactcctgacctcagggtgatccacctggcttggcctcccaaagtgctgggattacaggcacgagccactgtgcccagccaaacatcaccatctatttcctttaggtcctaaaatatgcatattctgtcgcggctcatcttggctttgccactgactgtgtgagcttggataagttatttaacctggcttttgggtgcttctgctgtgaaagaaggggattaggttaaataattttctctgttttctactagctcaataaattatctgattctgtaccaagattacaagttaagaccaacttctttgtctggtcatctataacctattgttacaaatgaaataagaaagtatggatagaaagtattcgcttgcactgggctctttgttattttaaatatttgaaaaacttacaccaggcgactaacttttgccatggtaaagtgtatgtgtgtgtgctcaattttaagggctgagactgttcccagaaggcctgtgctggtcacaaacaaaatggaacactcaaggaccaagcactaaaaatatctcataaaaatgcttcctccatgcagtcattgaatcaggtaattactgtggcaacaacaaactaatttgaagtgttagctgttaattaaaacattgcagaggtgtatagttgtcttttggtgtaagcagagcctccattcaaacttcattaatcactttacaattaatgtgttgaggaaggtcaagacaattgagatgtagtatctgttgaaagtaaacaaattccttttctctaagtaaataccatttggaaagttaagggacacactcgactcatgcctggcattgcctttgtcatccagttctccttgatgattaaatgttaaattggtactgtcattgcactgtaaaccaaaccacatagcatctttattcctcgaaatcgaacccaaacttccacggatgaattagcgtgcatcataattaaattatcaagcctctccttttaattcacttggaaataggacacctttcttttagaaaagagatcagctttcttgacaagctaattaagttgccaaactgtccagtatggtatgtatattagactatctgctaatcattttcttatcgctgctgctggtctcaaacgtccaggtgttgcttattcgaagtaacaacactgatctttttacaacttttgaatcctgtgtatatatttaattatttgtctttatatttcagttcttgattagtgattcgaatatataatatttttaaaagttggaattggaagaatctgtgatgtggagggggaaaaataatatatcacaaagtcttacgtattatgttacttggatttacgtggaataaacttactaatttcctttaaatcacatttcaggccaagtgcggtggctcacacctgtagtagtctcagcagtttgggaggccgaggctggtagatcacttgaggtcagaagtttgagaccagcctggccaacatggtgaaaccttgtctctatgaaaaatacaaaaaaaaattagccaggtgtggtggtgggctcctgtaatcccagctccttgggaggctgaggcaggagaattgcttgaacctgggtttcggaggatgcagtgagccgagattgtgccactgcactctagtctgggcgacagagcaaggctccatcttaaacaagcaaacaaacaaaaaacataatgtaggggatagggttccacttataaaatgtgtatcactttgtacaaagtataaaaaattattttgctggcacagtggctcatacctgtaatcccagtgctttgggaggtcaaggtgggaggatcgcttgaggcttggagtttgagaccaacttgggcaacatggcaagacttcatctcttaaaaacttaaaaaaaattagccaggcatggtggtatactcctgtagtaccagcggtttgggaggctgaggtgggaggatcgcttgagcccgggagttcaaggtcacaatgaactaataagatcacagcagtgcactccagcctgggagacagaatgagacctgtctctgaagaaaataataattgattaagttttattattattttctatatctttcagacagagtctcgctctgtcacccgggctgtagtggagtggtgagatcatagctcactgcagcctgacctggactcaagcgaccctcttgcctcagcctccctgtagtccctacagggggactatagaggactacaggcacgcaccacgatgccaggtaattattttattttttttaaaagacagtgtctccctatgttgcccaggctggtcttgatctcctgggttcaagtgatcctcctgcgttggcttcccaaagtgctgagattacaggaatgagccactgtgcccaacctgattaaagttttataagtagtatttagaaataaccaatgaggttgttatttgagaatatctttagacactttcaaaggttaaataattctttggtaaagtaaacagttgtcacccggtttttgtaatcttgctttttctttaaatgaaatatacttgaatttctgtataattaattgatataataaaagttaagtttaccttccatgactggcttgacctttgtccactcaagttggaaaagcaaaatgagtaagttcttataacactcatatatttggataagtatatacatatgctttatatatgtagtttcctagtcttgcctgaatttgtaacattttacttgtaaacgatattacaaatacctatatgctcttaataactaaatcatttctataagtcagtcaccttcaaaaaactcttgtcagtgattgttcaactctgtaaatttactaaaaagtagaatgtacccttaaaacaagtgaatgttatcatatgtaaattatatctcaataaagctgttaaaaaattttgtcagtcctttctgctcgtggacgccacagaggaaacatcattaaagtctctgttctccctgctgtcatgtctaagtcagagtctcctaaagagcctgaacagctgaggaagctcttcattggagggctgaactttgaaacaaccgatgagagcctgaggagccattttaagcaatggggaacactcacagactgtggtaatgagagatccaagcaccaagtgctcctggggctttgggtttgtcacatatgcccctgtggaggcagtggatgcagccatgaatgcaaggccacgcaaggtggacggaagagctgtgggaacaaagagagctgtctcaagaggggattctcaaagacccggtgcccacttaactgtgaaaaagatatttgttggtggcattaaagaagacactgaaggctgggtgcagtggcccatgcctgtaatcccaacactttgggaggctgaggtgggcagatcacgaggtcagggatttgagaccagcctggccaacatggtgaaaccccgtctctactaaaaatacaaaaattagctggtcgtggtggcaggcacctgtaatcccagctactcgggaggctgaggcaggagcattgcttgaacccaggaggcagtggctgtggtgagccaagatcgtgccactgctctccagcctgggcgacagagcgagactccatctaaaaaaaaataaaaataaaaaataaaaaaaagacactgaggaatatcacctaagagattattttgaataatatggaaaaattgaagtgattgaaatcatgactgaccaaggcagtggcaagaaaaggggctttgcctttataacctttgacgaccatgactctgtggataagactgtcattcagaaataaccatactgtgaatggccacaacggtgaagttaggaaagccctgttaaagcaagagatggctaatgcttcagccagccaaagaggtcgaagtggctctggaaactttggtggtggttgtggaggtgtttttagtgggaatgacaattttggtcatggacgaaacttcagtggtcatggtggctttgatggcagccgtggtgatggtggatatggcggcagtggggatggatggctataatggatttagtaataatggaagcaattttggaggtggtggaagctacaatgattttggcaatttcaacaatcagtcttcaaatttcagacccgtgaagggaggaaactttggaggcagaagctctggcccctatggtggtggaggccaatactttgccaaaccatgaaaccaaggtggccatggcggttccagtagcagcagtagctacggcagtggcagaagattttaattattgccaggaaacaaagcgtagcaaaagaggagagctagagaagtgacggggaagctacaggttacaacagatttgtgaactcagccaagcacggtggtggcagggcctagctgctacaaagaagacatgttttagacaaatactcatgtgaatgggcaaaaacttgaggactgtatttgtctaattgtataacaggttattttagttcctgttccatggaaagtttaaagcattccaacaaagtgatctaatgtagattttttttttttgcaccatgctgttgattgctaaatgcaatagtctgatcatgatgctgaataaatgtcttttttaaaaaaatatttgtcagagcaaccaaattttctgctaaacagcagaaaatgatgtttccatgttggcagtagtggattatgtaaattttggttttatttttgttttaagaaaggggaagtttaggggctcattaaatatgttttacaactgggcaggtgaagatgaggaattcctgaggcactgacttctgttccccattttccctatgccattcctatcctaacaccagatgagaggaagagccgtctgatcttagctagtgtataaaatcctctatagggcaagatttttagttcttcgaaacttacttacttccttatattaatatttttatgggcttgcaataacaatgcttgtttatgttatgtggtttattttgaaatttttattgtataaaaatgtgttgcagattgcttctaaataatgttcagaatatctagtccccacagtatatgtgtaaaggccacatttcatttaa

SEQ ID NO: 1532 - DNA, 2083 bp, Homo sapiens
agcgttcgctcaactccagaaccttccgacctccgctagttcctgcgggcctttgcccgcttcccggtgcaccctccccgggagacacctcagacccccgacagcctgggcaggctcggtgcctgcgggtgcgttcctgatcacccctcccctcttccctccccctcatcctccattcccttgttttcaccctctgtcctctgcccgtcactccccttgtcacctcttggagccccctcctaaccagcggccagtgggtttcccataccccaggatgtgagcctctttaacctgtaatgctgtggctagcccttggcccctttcctgccatggagaaccaggtgctggtaattcgcatcaagatcccaaatagtggcgcggtggactggacagtgcactccgggccgcagttactcttcagggatgtgctggatgtgataggccaggttctgcctgaagcaacaactacagcatttgaatatgaagatgaagatggtgatcgaattacagtgagaagtgatgaggaaatgaaggcaatgctgtcatattattattccacagtaatggaacagcaagtaaatggacagttaatagagcctctgcagatatttccaagagcctgcaagcctcctggggaacggaacatacatggcctgaaggtgaatactcgggccggaccctctcaacacagcagcccagcagtctcagattcacttccaagcaatagcttaaagaagtcttctgctgaactgaaaaaaatactagccaatggccagatgaatgaacaagacatacgatatcgggacactcttggtcatggcaacggaggcacagtctacaaagcatatcatgtcccgagtgggaaaatattagctgtaaaggtcatactactagatattacactggaacttcagaagcaaattatgtctgaattggaaattctttataagtgcgattcatcatatatcattggattttatggagcattttttgtagaaaacaggatttcaatatgtacagaattcatggatgggggatctttggatgtatataggaaaatgccagaacatgtccttggaagaattgcagtagcagttgttaaaggccttacttatttgtggagtttaaagattttacatagagacgtgaagccctccaatatgctagtaaacacaagaggacaggttaagctgtgtgattttggagttagcactcagctggtgaattctatagccaagacgtatgttggaacaaatgcttatatggcgcctgaaaggatttcaggggagcagtatggaattcattctgatgtctggagcttaggaatctcttttatggagattcagaaaaaccagggatctttaatgcctctccagcttctgcagtgcattgttgatgaggattcgcccgtccttccagttggagagttctcggagccatttgtacatttcatcactcagtgtatgcgaaaacagccaaaagaaaggccagcacctgaagaattgatgggccacccgttcatcgtgcagttcaatgatggaaatgccgccgtggtgtccatgtgggtgtgccgggcgctggaggagaggcggagccagcaggggcccccgtgaggctgccgcagggcactgaaagcccaggaccagtaaccaaggagaacaacccacccgtcgcccttctccgtatgctgcctgcgccagaagagctttgctgggccctggcttccctgccctcgccttcacctctgtcagcaggtggccttgcctggggagccccatgtgtggcccaccccaccaggccatccccataccttctggtttgaaggcgctgacactggcagagaggtaaagggtggggcattgagaatggaggctcccagggtccctgcccacttctgttttcctaatgtttttctctataaagggtcaggcccgtcagcatcactgatgggaataaaagtattaatgctttgtgacagcctctgcctgaaaactggacagaaggacccagaggtgttctttcattttctctcttacctccaatctttcccctttcaagctacaggtaaaggctctaccaccat

SEQ ID NO: 1533 - DNA, 1317 bp, Homo sapiens
atgctgtggctagcccttggcccctttcctgccatggagaaccaggtgctggtaattcgcatcaagatcccaaatagtggcgcggtggactggacagtgcactccgggccgcagttactcttcagggatgtgctggatgtgataggccaggttctgcctgaagcaacaactacagcatttgaatatgaagatgaagatggtgatcgaattacagtgagaagtgatgaggaaatgaaggcaatgctgtcatattattattccacagtaatggaacagcaagtaaatggacagttaatagagcctctgcagatatttccaagagcctgcaagcctcctggggaacggaacatacatggcctgaaggtgaatactcgggccggaccctctcaacacagcagcccagcagtctcagattcacttccaagcaatagcttaaagaagtcttctgctgaactgaaaaaaatactagccaatggccagatgaatgaacaagacatacgatatcgggacactcttggtcatggcaacggaggcacagtctacaaagcatatcatgtcccgagtgggaaaatattagctgtaaaggtcatactactagatattacactggaacttcagaagcaaattatgtctgaattggaaattctttataagtgcgattcatcatatatcattggattttatggagcattttttgtagaaaacaggatttcaatatgtacagaattcatggatgggggatctttggatgtatataggaaaatgccagaacatgtccttggaagaattgcagtagcagttgttaaaggccttacttatttgtggagtttaaagattttacatagagacgtgaagccctccaatatgctagtaaacacaagaggacaggttaagctgtgtgattttggagttagcactcagctggtgaattctatagccaagacgtatgttggaacaaatgcttatatggcgcctgaaaggatttcaggggagcagtatggaattcattctgatgtctggagcttaggaatctcttttatggagattcagaaaaaccagggatctttaatgcctctccagcttctgcagtgcattgttgatgaggattcgcccgtccttccagttggagagttctcggagccatttgtacatttcatcactcagtgtatgcgaaaacagccaaaagaaaggccagcacctgaagaattgatgggccacccgttcatcgtgcagttcaatgatggaaatgccgccgtggtgtccatgtgggtgtgccgggcgctggaggagaggcggagccagcaggggcccccgtga

SEQ ID NO: 1534 - DNA, 27587 bp, Mus musculus
acatacacacacatatatatacatacatacatatatacatagatgcatatatgtagagaattgcaagccagttatctctgaaatcttttatatctgttgtttagaatcttaggtgcctatgtgcttctaaatggctgcagggttggggaagccatactgcctttgttgactcttattttccaccgtaaagttcaggtctaaaacagtcattatttccagaattccaggctctgacacctacccagaagagtctgtgcatgtcacaggagccctgagcagcttgttcaaatgtttcatatttacagagagcagcacagataagataaatgttttgctatcttcttacatgttttgaataggaattcagatgatgaagactcaggagccctaagatctggtcattggattaaaaagcacatatagagaacaatatatcagggtagccagattgaaggagtcactgtaacttaatttatttgtgtaatcttatttgtgagtttatacaatgaagtgattaaaaatattatgctcatgtaaataattcttttataactgttttccatatttgaaaattgaattacggtcataatattcgtgttgaaagttaataaagataactgctctttcggtactagaataatgcagtttgactcttttgaatggctcagtggtatttactatgataccacttctgtttaatcaatttgctctgccatggtgtcctatttctagaaaaccggaggacagttgtcgtcctatacatggtagacgggactgatctcaggcttatgaggttgtgtgtttaagagtttcagctccacagtggaatctctgggaggtggggctggattacacaggagtaggcaatggctttctagacgtcttaaaattaccattcaccctcaacacaggtgacctaaggatatttcagtctccagcggcttcctaaaactctgccctatccttttgtctcctcctgattgtctctgtgggaggccttatccaccccttaagtctaacatttctgaaacaatccatcagttccttttctccaaacagatatcatttattaacttacattatcaacggtgcctcaattcttgcgcttagcggcactggaacttgggtgggtttccactcatgcgcactgactgtcagtcagtccagcgctggtgctttgctccacccatgcgcactgactgtcagtcagtccagcgctggtgctttgctcatccttttgcagctcaggccttgccagctcacatctgttatggcaacagcctcactgctctgaattgtccttaaccttccatcatactatcgtgcaacctctccccgcagggagtcgggagaggtgggactccattcttaccttagatgtgaagagtcctggaaaaatccacgcgccttttcttggtatcaaagccccctgcaccccgcatgattggtgtaaacataatacctatttcgtccttaaataaataaaattccttgttactttctgataaacccttgcagtaaggtcatttccttaatcttgtcctatctcaatttgctgtagacttcatggtccagctcaggactgctctgtatataagcctccagactcattgcttctgtgagcttttccttggaactgtcaatgactctatagaattcatgcactgtccatgggtttggagtataactgtgaacctaccagggctttcttttatatctttccatttccaaagaaccaaataatcagagctcattatttaaacttgctgaattaatgactttgtcatggaagaatttagaatatcagagaacaattttctgactaatcaaattttgttttcagagtgtatacattaattattctgacaaattttctctcctagaaatgaatgttttatgtctcagtactcatatggtttttttgtttgtttgtttggttggttggttggtttttgcaccggaactttctgacagttgcatataggacagtaatattttaaagagacaaagacaagtgtcttctacattattgtacatgtgtatcatattgttcagtgtcatttttgggaggagagattttatttctgccatgatttcatataaaaatgagaatttcacaaaagcagttaatggaaaatgagagaaaatgaccataggtttttttttcttgaaaatttaccttgcatttaaatttttaatatgattttcacctgtgtcatctgtctgtgggcatccaaagcactgtaggtcatagaacagagttaagggtatagctttgataagtaatggtccaaagtgattcatttagtaaatttattcatcatatttctatttctgttttcattggcacctataatcaatttgtaattgcctgagttgaatgatatttgttttgttttaaaatattatgtactattaataagatttagtgtacttgatacagttgatagcaatgacatacagtcttggacaaggttagccggttagcttttttttttttttaaatcaacaatagtcatgctttgtcacagtggtctctactactcttctgtttccttctgactctggcaactcctgtcttcagatctaacagtggtcacagctgtggtgctgcatgccacaggtgtcccctgctcctgttggcttctactctctcacaatttgaacagtgcatctttcataaacaagcctgcctatgggtgccagtgacttaacaggccacgtattttcagttggaatcccgaaagagacaacatacatgcttgtatatcatattgttgaaattcatttaaaaaaaagattttacttataccatgctttcttttaaaaatgagaagaattgcaagaaaacagttgatggaaaatgagaggaaataaccatagttactttgaaactatttacctgagctacaagatgttgagcccccagtatgacttacaggctcaagaacaagcactagattggctcatcagagagcctgtaccttacagagtctgaaaggaagctagtggtcagggggctagaaggtgaaggatatcctagtcccaaacaggaaatacgtttggaggaaaattatagtaacttaatcagatctgtggtcaggacccaggcattctttgccagggcaaccaatgacgtcttcataactggctacaaacacgagagtacaaagcagccaaacatagcctcgccccctatctaacatgttactaacacatcaaattctgttcacttggaattttcaaaagaaaacaccagaattaggaagctataacttcatttttcccccaaatgtatagaagtgttgtgatggaaataaatggaatccattagaatctctagaagaaaaatcaatttctaattaagtatgtataatatctttctaatatcatctttagcatgccagtctatgcttcagtcttgagtcacaccagccttggtgggccactttatttcactatgatgcttatgatataaaaaaagaaagacagaatattataaatttaaacatgatttaaaatgtaaatctttttagttaaggattcagccattaaaagttggactgaaaggtaactttatgagctgattgacatatttttgtacatggagctaaaatgaaatggaagagctacaatggataagcactaattgtaaagtagaaattctttatgaaaagcagtttgtataataatagtgtttgtaggtctcatctgagattcatctatgaatctgtaggtctctcaaattgtgcgcaaactctttgtgtgtagttatccctcgttatccatggagaacatgttccaagactctctgtagacacttgaaatcctagatagtaaaactctgtaaatgaatgtctttcccatctttgccaagcccaccacacactgtgtctgcaacttctgcagtcagaggtgtaacagcaaactagcctgactttccctccttagtgtgaatcctaaatacctcagcatttgatctttttttttccttattaattatagaaatttttgccagaatcaccgttcgttcactgcaggtcattattaagtaaaataaaggtagtttgaacaaaaccagtgagatatctcagtggttgatctgatagctcagggaacaatttcatggctaactggtgattgtgcatagtagaacaaccaactaaagggataattcacatctcaggtgactaacattgaacctcatcacaagagtgatgccaattcaaaatttatgaattgtttatatctgaaatttcccatttaatgatctgggtttacagatgaatataggtaatagagactgtggaatggaaaatcacagacaaggaagagctagttggaaccatacttcctctaaatatgagcacaaaactgatgttgtcttgtcgaatgaacaaagttgttctttttttcttctgttcatttatgattgaaagtatcagtcacgaataaattacacattagctctttagtattttgtgtgactttgtttgaaaaaaaaagtcatttatttttgttttcagtagcctcatctataaaacaagggaatggctttagataattttcaagttccttccagctgagatctctctctctctctctctctctctctctctctctctctctctctctctctctccatacagaactccactaaaatggtggagaaaatgaagtttactttggtccagtcctcttgccattcaacttaccgactgctaaatagtaattcccttgattctcacatgaagatctcagtatcagctctttgatcaagtccagactctagaggacctaaaaccaaccactggaattatgttagaatgttgatgcagtgtgtcagagggaaaggaacaatagaccaaaatctgttgggaggcttgagttcaagtctcaaaggctgctcatttgtcttgaacttggactcgtcttataggctcatgattctaaactactatgttccctacattgtattttatacttcatattctttgtaaatacacaatttagcttaactgggaggtgtgtgtttgtgtgtgtgtgtgtgtgtgtgtgtgtgtgtgtgtgtgtgtatacatccttttaaggtcaaagttctttgatgtttgatcaccttagagatgattttccagtgcacctgtacagaggttggtttggttcctaagcatagtaattgacccacttagaattgatgagaaggaaagaagttgtttttgtaactattgcattcccttggaaacacaatcaattgtcaaccttctagaagccagttctaccacaagtttcacagactattggtgggaactctggctctcacagccttgccctgggctgcagataagtgctttctcacctctgcccttagtcttcatgtcacctggtatagagcctatttgtgaggaaaagagtcttgaggttactgcttcctgtctccacagctttggcttgtttagctgctaggagaggctttgaaaagcaaagcacaaattcaccatcaaaacaacctgatgattggtagacatgccagccaaggcagtcttttactgtgttgagtgaatgcagttgggagagtaacgctgtttcttgtgggtgtagcctaggtaaaccactcacaagaaggaaaacagaatcaaatatttgcagagggaaagaaagatagttcctagcatggtttagaaaacaacacatcttcaaacagaagtccatagaggaaagctaaatgtatctctagttccttccaagtcggtgcttctcaacctcactaatgtggtgaccctttagtacatttcctcatgttgtggtgaccccagccatcaaattattttgttgctatatcataactgtaattttgctactcttatgaatcacaatgtaaatatctgtgatgcaggatatgtgatattttaccctcaaggtggtcataactcacaggttgagaaccactggtctaagtctaggtatgtccttaaattttataatattcccttaaattatttgaaataccacagatccccagaaactccaaaaaacaaaccaaaatacatagccaagctgaccattgtcatgtgcttcagttcatctgtatctttgtgctgtactgctgtagggtggagatggatctcttcacgcatgctccatttttaagggaaattaaaaggagctagtagtatcatacgtattagaaaccacagtgagtacacatggtcaataccatttaggacaactgtaatctttctttcatacctaaagaaacctattttatttcgtgtgtctccagagaagatgtcgattctgaggtcctgtcaggtagcttctcacggggaataaattaaggtgggactgaaatctagaaattgtattaacatttaaaaagaggtcttatcagctcaaatcctaagctaggaagctgttagccacatatcagcacaatacaagaaattaccttgactatagcatctctctttaagcatcagctaatctaaaaattatctgtcgacacagaagagagaaatgtgagcaccgacggataaactgcccatctccttttcacagttttcaaactcttcccagcaaaagctggcacagtcactgaatgaggcatttcccctttccttggtctgtgcttgatctccagcacaatggcagccaacacacagccttgacacaggggctgtgcagttctcattgagagcatgcttggtttgtaacgctgaggtcaaatgggcttgggagaaatcagacaacctcagtcatgctgaggcttgagctcagaggcctcgtgctgggaagaagaagaaaagctacctttgagttctcatattactccttgtgaagaaagaccgtttcagagaatgactgcagtctcttcctctgaaagtttccatcctgtgtcccgacccctgatgctgaaaacatgtcttcgttatacccagatgtccacacttgacttagtttttggatctgtctattctggtaatgaagtagaaatgagtaaaaagaaaaataccttcttgtttcttaccctgtttggctgaggaagtcattttaaatgcttccttttctctttaaccacacctaaatcactgtcaagttgggtaagcattagcctgtaaacattgctcacttcatccactacttctaagccagtgtagtctctcacctctcacctctgatgaatcttgcccactctccatgccctcatccttgtaccttccataatactgcttccactttggttagcgtgatctacagaaatgaaaagctgtgagcacctgcttttcggcttaagagccttcacttggtctctatcactggcaggagatcttggtaaacatttgtcaatcaatgtaggcatcatcctttatcccacagactagcagtcttcatgtctaggaaatcaactggtcccacaacctgcagactgttgtctactggatcaaaactatatatatatatatttttttttttttttcttccttactagactgggaactgcccaaggaattcatgtgtaggaaatctgttttccttctcacatgtgtcttgggaagatgtcatctgctgaatcagacagggattactaaaagaacattggagtttggatgttggagcttgtcctatccctctagctcctccctacccctacacagatgttcacagtagcattgctcataacaggcaaaaaaatgttgagtgtaaaaacaaaatgtactacagctgcacaacagaatagtcataaactggagttctgatactttatcacatcacacacgaaacttgaaaatagctatgtgaaagacgccagatacaaaacgacacacatactgtgatttcaaacataggatatgtcctgaatgggcaagtagagacaagaagtagaggagtggttgccaggggctggagggagagcatgacgggaactgatggctcctgcgatggacgtttccttttcgtgtaatgaaaatgttttacagaaatggtggtccactcacaactcccattgtattaaaaaaaatcccttaatcgtgtttttaacaagaagaactttatgatacgtgaattacatttcagtaaagttatttcaacccaaatatcaacactaaccacatcttaacttatatcaaatatatcagaatttctgagagtaagaggttgtggatatgcgttttctttttaagttctatatgtattgaaatactgataattatatagatgataaaagttagtagagatttaattctgtgtactcaccttctacccaaagcaaaaaagaagaaatacaggaaggaagaaaggaaaaacaaactcaaacaaacaaacaaacaaacaaacagaaaccaaaaccaaaacacctgtgtacatggattcaatcccaggttaaatgataaatttcatttttaacaacttcggagtctaactggctcttgggtgtggtacaaataaccttttaaaaattagaactagcaggctgaagagattgctcgacaattagaggacagcctcacaacaagaactataaataggtagctcttagcatgcttccccagtaaaaattgattttaattttatttatttatttttaaaaatttcttcacagacagcaatttgtttactactgaaaaattcaggtcatgtctgagaaagaggatgcctacatcctatccgtctttgatctatgatgttgactctctgtgcctaagcggtcagctatttaggtggtgtagcctttggtttcagttctgattttgttcaccatttgctcaatgtctgtagatgaaccattcatgtttctagacctcattcagtcatctttttctttttaaacaaatgtacagggacggtgtcccacacttttaatcccaacactcaggaggcaaaggcaggtgaattagtgagttataggccagcctggtctatgtagtagacagccagtgaatacctgtttctgtttctgttttgttttgtttgtttagaaaaaaaaaagagagtcaaagacatggtaggcacctgttaccaagcctgacctgtgggtggagggaaagaaccaatcctacaacttgacctctgacctccatttgcatgcatgttctctctctctctctctctctctctctctctctctctctctctcacacacacacatttaaaatgtaatactttcttttaaaaaaggagtgtacttctgtatttctgtgttctggaaatgggggtgcattggaaacagtacgagctttgtctcccttctcccaaaggaactgagagtatagttttattttctttgcctttaaggggagaaattgaattagatggtatccagagctttgattgttgcataaagatagaactcttcttgctttgagagaataatcatgcaacgtttttgggaggctcttatctgaatttgctctggaagagtaatttaagccagcccttggggctacaaacgtggtgcctttctttacccctttattgactgctcttggtttggtcaataagcaaagtcagaatgttttaaaactttgaaatacttttacaaaaatctgttgcagagttgaaaaaaaaatcacttggacatctgtgtcaggctttcaagaggcctccaagctgatcagttattcaggaagtcaacccaaggcctgactaacatcataggaatctcaactggactaacaaaattctagtgactagctggggtgctcaatgctcacagcagctcacatttagctggggtactcagtgctcacagcagctcacattgtgctgtccaggtggaagcacgctcctgtcttcccattcagagaaagatgccagcatcattgaaatataaacttgagaactttcagtgtagtcatcattccaagaagagctattaatatatctttttctgccaagggactaactttgttggaggtctgttcagttggctaattaattcactttgatttcagggcaatggaattattattcttatgctcctaactaaatgtttttttcccttcagaaaacaagattttggtaaagcagtcgcccctgcttgtggtagatagcaacgaggtcagcctcagctgcaggtattcctacaaccttctcgcaaaggaattccgggcatccctgtacaagggcgtgaacagcgacgtggaagtctgtgtcgggaatgggaattttacctatcagccccagtttcgctcgaatgccgagttcaactgcgacggggatttcgacaacgaaacagtgacgttccgtctctggaatctgcacgtcaatcacacagatatttacttctgcaaaattgagttcatgtaccctccgccttacctagacaacgagaggagcaatggaactattattcacataaaaggtaacacgccactgtactcctgtaacctaaaggacggttgcagaatgctgaaggcagggttgggataagtgaagctggggctctcgcatgtgatctgagactcgaaggcaaatctcataaacctgtttctttttactccagcaatgattccagcttatttggaatgcctctatctttcctcactgaaggatgagggaagagtctatggaaatagaaactatgagattttcctgaattcatttgaccttttggatcaagtatgaaattgagcagagtcctctacaatgaaacatagtctgacagatcaggactcaggaagaatgggttggatactaaactaattttttttttgatccatgttcttccacttactaagtttctttccattttccaaaacataaaaaggatgctggtctagaaatttagggggcatgcaatttgagatcttggctaagttatccaactttttaatagccccaaacccaatataattaagcagcactcatgaatcagcagcaataagtacattatgtttacgttgagattatgttctgtgtaaatactgggaagaaaaataataggattctcaaactcaaatatagttattggcattaacattaaaaactgagggagggtggatagatttttatgtatatgagaatgacagataagaaaatatatactccattttacattcaactttagcacaattacaataaatgcattttcttttatgccataacaaaggtgtacttaagaaaatttaaatatcaaacaagaaaagaattattatgttaacatgacagtatctttcatgtcctggcaaaaacagaggcaattaatacacaaattaagatttctaatatcagtaattctcaggcaaaatatttaattggattgagtcagaggataaaaagatatactattttggaagagtaaaacacttttccatataaatgatacattactttaggctagtatattgtgtgtatgcatacatatcgatttaggagaactagaaaagaagtcagggattctgtacttggcagctttcagccctgtttatatttgtatatcataaaccctaagtaggtaactggaaaaatgcctgtgctcaactttaagtttctgacttaaccaacatggcttgaggaaggggaggtagataatgatttcatactctgccggataattctaatgtgtagccaggattaaaacctcatggatcagagagttgttgatattctttttatttttgtattttattacaactttattagaaagaacttggaaataaaaaaaaaaaaaaaactcatgtatccaaattcatcagactcaaagtctatacatctcaatgaactgtgaagtattctgcttagttataatcttccacgagttttaatagaactgcatggagttttttccccatcccctttctcataccaaataaataacctgactcattcagtatcggataatctgttggggttggagccagatatttatcttttcaaaattttccaggctagagttctgactgccatattaagctgatgatttttcttaggggttgaaaacatttgtatcattttacttatttcaaagagtttagggtataggtaaattatctatatacctgacgagggctgggggtcaggttaaagtcactgaaagtcgccattagcactatgcagtgctaacaagacccagtgactgacacccatgtagcactacaaagcagtgtttgtaaccttagccttgtatactgacaaagtatgatcagtggtggggttgagtaagtcccaaagagcaagactcgatcatctaagctggtggtattttgcatgttttagtactttcaaattcgcctctgatgtacaggacagaaatgtactcaactgctgtttctgtgtcctttaacccacatgttgtgtttttcagagaaacatctttgtcatactcagtcatctcctaagctgttttgggcactggtcgtggttgctggagtcctgttttgttatggcttgctagtgacagtggctctttgtgttatctgggtaagaggagcaacattgcttttatgtaacttctctgcgcctgccctctgactatattaagactctggcctgtatcttttctacgttaaagcaaatgacgcttttcagtctgtccaacttatacatagtaatgatctgatgtgagttctgtttcccagaaggcaccaagtagccaggcagaattagaatgaaatgggaagattacggtgggaaattagagaattagcttttcttattcttaattttctaacataataattgcatatcaagcagcttaaatgcatacataaggtataaaatctaaatctcatcaggattaggcaactgaagcccgtgctttggcttggggtcaaaaatcaggagaaagtaggctgctgaaattgtgcattcaaaccagaagaaagcaggtctgtttatgtcagtcctattttctgtctcttctgaagcagttgccctgtgtgaggtcaacttggatgctgtcattatgagactgtaagaggagagggactgttcagagctctccccactgaatagagattactagtctctatagatttttctgcaataagtttaatagatattttcttcctcaatgttgaatttttgattcaagattaaacattttgtgttcgtttgattttttttttttttttctgagacaatgactcaccatgtggaccagattcgtctggaagctactatgcaatccaaactgacctcgactcatgtcaatcctcctgcttcatcctcttgagggcttataggtgtatagcaccatgtctgacttttgaacatatttaaagatttttgaattttaatttgtgtgagtaagtgttttgcctgcatgcatgtctgtgcaccatttatatgtctggcactcattgaaagccagaagagggcatcagtttttctgaaactggagttacagatatttgtgagctaccatgtaggtgctgggaattgaaccccgttccctggaagagaggccagtgctgttaactgctaagctatcttccttatgcttgttgaacacattttgatgaacacattcactgttaagatggtacgaccttaacaaggatccttttcttagaaacccctttgtgtaggagtaacagaatgccttatgtattgattccaaatgcctctgatttttttttccccagaagttgggtgaatatacaggtaagttcttcaatgagaaatgtatgctgcacaagacaaaaaagaccccttatcttgctactcttcacccatctactacgaagcacacttaggacttagtgaatgcttattgtgctgctaaataggtaaccaccatacaaagcaaataaggacctaactaagcctgtttgagatatgatacccatttaaaggcataatccaaatatttaaagagacaacttatgatcagggatttctagaactcatgccatgtgatgccatcttatttactatagcattggagaggggacagggcagctctagctctaagtcatcaagttgtatcttcccaccagagatttaaattgtttatttgcttagccaaagttgcctctctattctattattccccacacattcctgtagttcacaggccatggggcaggtggacatttgtcaggctaccttttgacgagtctataacttttacacagtggggaacagtgctagcttgttcatgggaattgtttcatcttgagaattccaaaagttgtcaatctgggtatggtgacagaggctttagtatagaaactattgcccaacttctggctctgatattagttgagaacgtccatcgctctggactttggagtctgcactcttgctatcttcttgctctacaggggcctccaatgactttagaatccttaggtttgacttggtttttctaatcctcaactactgactttcttcctttccaagtctctaaccaagaacttgaatttcctaatctaaagaccaggtgcaatagccctctgggtacccttccaagaaggggctcccttgtcatgtattgacctaggtcaaaggaatttactagcttcgtgggaaggacttctggaaactgctttggctttcagtgatcccacaggcaccactttaacacttatggtaaatatatatcaaggaaatcagcttctaagatgaggcaccaatgcactgagtgactgaaatcaccccaaaagcagcttctcactttcaatgagttaaaacaattcacctttcaagtcatgcatcagatatgttttgtgctttcctttggcagccccccaatttctggtaagattcatcttctctgccttgggaaaactgttcttgacttatctcacaggctcactgtgactagacagccttagtgctctacttgtgtggattttgggagtcaaaccaggctatctaacaaaaatgccacttatttggacttcaaacccaggtctttgtactctctgaccaagtgggggtataagaataatttgcacctcacagaacaatgtagcgcctttaccatgagctcttcctttcctgctatttggtcaggaaacatcttggtgagctgggcatttagggatcccgaggacttaaccactttctgggatcctatttttgtctggccagcaatgtgccctaggtgaaagttaactgggttccagagccttctgagaatccatgctgtgcaactgtaggaagctccaggctgtgtgggtttctgtctctgtgcttgacctgatgttggcatttgagtaaagaaaaggcatttcttggtcaggttgccacagactgcgacctgtttttttttttttttttttttttttctaattctctgttcattcagctgagctgtcacactggctccctttctaggttagaggagcgttgttttggtttgtttgtttttgtttttgttttaacatgctttatgccagtatgtaccacaatgtgtaggtaatgcgtatttaggtagcattatctgcctttaaatctgcattcttgaccattttagtacattgcttatgtgtgccctgtgtgtggctgctttgtctaggaaacaaggcagaggtaggaggaaaggcaaaggatagagtggccttgaagtcatgcatctttaacgggcattggttggtgagggacacagatacacagacacaaggggtgggtgttctatgcatatacattgtgagagtgcacatgaacaccataggttttggactggatccccagccatttccatcccattggttaagaatcagctaaacccactgtctgataatagtgttggggtaagcatgggagctgattgtaacagattttctttatctttgtgtgtagcttggagaacctcaaagtcacaacacccttcttactgaggcctttctttaagctatggtttcactggaggatccacaggcaagggttggcaaaggagaccctaaaagctagcatcagtactgaaaactgcttgcctggatagtattcccagcagtctttgcttactttgaggccttggcatgtgggtgtgaaaaggaggccaaggctgtcctcaaccactcattatcaatccaggaacacctgtccctcatacctattgtatatacttatcacatctgacttgtctgcttagaataaggctttgtgtttaaataacagagaatcccgactctgcaatccacatgactttctgcttttgacaactatgcaaacattaccatcacattgatctagcaatgatgccctagaccacagtcataaaaaacatggtcaagatgcaaagtgagtttacctctagttccaggcttagtatcattcctctttctctgctcctggtagaatttggtggtttttttttgttgttgttgtttatttgtttgtcttgttgttgtttaattacagaaaaatagcttacttaatgaatgattaaagtgggagtgtttaatctatccaaagactaaaggctttctattgcatttacatatcaatagtgaatatgttctaaaatacattcttgggcttcggattagatgacaacattgagaataatggttgcatttttataaaacaatttcctttagatttttagtagagctgttgatagtcaggctttgattagtcattatcctagtccaaggcacacaaaaaggctcctcagggtcatttaacagctgatgatctgagtaattatccctaaagtcttagaacccctccaataatacctcctctaagtccttccatattgacctttttcttttttcatttccccccctagacaaatagtagaaggaacagactccttcaaagtgactacatgaacatgactccccggaggcctgggctcactcgaaagccttaccagccctacgcccctgccagagactttgcagcgtaccgcccctgacagggacccctatccagaagcccgccggctggtacccgtctacctgctcatcatcactgctctggataggaaaggacagcctcatcttcagccggccactttggacctctactgggccaccaatgccaactattttagagtgtctagatctaacatcatgatcatcttgagactctggaatgaatgacagaagcttctatggcaggataaagtctgtgtggcttgacccaaactcaagcttaatacatttattgacttgattggggaagttagagtagagcaatcaaaaagatcattcattcagccttgggaagtcaatttgcaggctcctggatgagccctgccccgttttcacttgccagcacatttcagtcatgtggtgtgatagccaaagatgttttggacagagaagaaaggatagaaaaaccttctctttggctaagttggtgtttggggtggggataggttagagtatagtacttaactatttgaaaaataatgaaaacacttttttcactcatgaaatgagccacttagctcctaaatagtgttttcctgttagtttagaaagttgtggacatatttttttaatgatttctgaccatttttaatcacattgactcatggaatggcctcaaagcaccccccagtgcttctttcctcattcccggtcatgggaactcagtattattaatagtcacaacatgatttcagaactagatagccctcccacaccaagaagaatgtgagaggaagtaaggtcactttatgtaaaaaaaaaaaaaaacaaacgcgtacacatatgtatgtatacatacatacctatgtgcacacacacacacatatacatacacacaaaatgctatgaagagttatctgtttagtagcctgttatagtcaaatcattttaagtttcaacttcttacagttgggccacttgttgtcctttgtggatggatatctgaaattgtgtctatatattgctagtcatgatactgtgaacaaaaagggtagtgttagtatttgtcagggtggtaaggatgcattccaggaagcttcctctgaggaagggaatgaggtcattcttgccatgtatgaaagacatagatgttttccagaaggcaccattgggagccccagtataagttcctttagactctacagtttagagggattttatatgtcctaggactcaggactccagaactttgtgggctcagctgcttcataccatggggatacattgacatgaacaattattttggaatgtgtctttagggacgacatcaaagttctcaagtacctacaagacctgatactggaatgaaggtggactttcttttttgcttccagttcggatcaactggaatgtatctggggaccttgaagaacggctgtccagctgtcttcaccatttgtatagtgctttgaattattcagaggttttaaagtcaggaagacctggtttaaaaaacatttcattatgagttaaatggcctcaggcaagtcactgttcatccaagtctatgactcctcaactgtaagatggccacactgaaacttgctaagatcctctggcctctgcctcccaagagttgggatttcaggagtgcacaatcatgacccaaactcgtgataatctctcagcttcaataactttccagctaattggaatatcctgtaatcaaacatgaggcatttcccctccccccactgtttttgtgtataaagagatctttaaactttttttttaatatgaggggtaagaaaagataggaatcttttaattctagacagaagatattgtgctttggttttttttttttttaatggcttctattctgtgcttttaattaaaccagagaaggccaagattagccctacttgtgtgataaaagaatgctggcccttgtgattgcagtcagcctcttgacacatagagttcttgaatctaagttataaaattatatttgaaaatgacagagctggagaatttatagaaagggtcatagcaaataacaaaccatttttttttaaacggaaagatttggtctttggcaatcaataactttgttttctaactggaaaaggaggtttactggagatgaatcacacctgaaagttttcatacctcctctgaacacaaccgaaacataggtgtccaaagcctttcgctctcggtatgaaccaacaggcgggttaaaaacactgggtcagagtaaagcttttgcagtttcagatgtagtgtgtatgaagaaaactatgtcacttgctgctattattgtaagagtctaagaactaaaggtgtgcctgtaatttctaattatgagctcacctatttggtaccgagcatgccaattttaaagagacccggtgtaccttatagctacatccaatgataaaattaccacactagcacatgcctgtgtttaaactcgtgctttaatgtttttcttagggcaggtatgcaccccctttgcagtgagttgggagagattttgaaaaagtgtatgacaaacatttttaacacctttggtttcctctctctgtgtctctttgtctctgtctctctctttctctcctgtgcatatgtctcccctccctcacttctctgtctcttcctctctccctctctctgtctttctctgtgtgtctctctgtctctgtgtatctctctgtctgtctctttctctgcagattttcaaaacgttgtttttctatggaagaaatacaagctgtggttggtttgctacgagtcagtagcagtttatcagtaggccaatgttttatctcttggagatttcagtctgggtttacccaatgtattctctgtaatgtgactgctggggacagatataacttgattgagccttcaaatcatttaggtcttcaatcatttagtcaacggagtgagccactaatctgcaatggctattttaatatgcatactgatggtcaaatggatgtctgatctctcatcccagctttctgtactaccatatgggaactatatgtaacttgtatacttacctgaatatgttaaattcaactacatggtaagatggaccagaaattgcaatgttcatgtccatatagccaccattaacccaagttaagcacagtagtgtgggttctctcaggacttgtgaatgagtttatgctctctacaaagacaggtgaagcttaaatctctcttgcactgctatgtttatgcaaatatcaagattgtttctgtaccagggacttaacacattctattcatactattttccctgtctacaatgttatttcatagatatctacttggtttgctcttacttccttgacatatttgcccaaatgccaccttcaactgtagttaattacctgtacaacctgtctccatgccttgttttattttctctataactctactaataggtatttttcttatttattggtttattgcctgttttttttcctaaatctacaccggatctccaaagggaaagaactccatttgctttgattttattgctgtatccccagtgcctagaataatgcttagcctgcaataaatatttattcattgactagatggatttcacgtgggtttatgagttagtggcaaatctgaatgatctgctcatagtctgagaaggaagcagaatcacttctgttttccacttcctattagagacagaagaggtaaagcagacacagagaaatctggtagaaggacatatcattgatacaaattcatttacagcttagaaattttcatgcatcctgaaagatgaatacagtcggagtcattctaaaaatgttattctaaaaacaaccaattaggaataggttgattttccatttaaagttctcaagttctctctcaatagcttcttgacatcctttttgtttttattttttattttttggaaccttcttttaaaatgttgttattggggctgaagagatatcccagtcatttagagcatgacatgggctatttttccagaggtcccaggtttgtttcccagcacccatatttgatgctctcttttgatttctatggccaccagatgcttatgtggtccaacagacattcatttaggcaaaacacacacataaaaaataaataaaaataacattgttgacaatttcatgcatttgttcgctgtatctgacaatacccatacccagctcctggccaccatggccctgggcagtccccaatgcacaaccccctcttgttttcacgtcctcccctttcttttccttttcttttcattttggtaacccacctagtccagttagtgccacttgctggaatgtgtaccagtcatggtggcttgaccttgaacaggtcttgtacaggtagccatggctcctgtaagttcatagtacaatggctgtgcagtggctgtggcatatctagaagacagcatgtcacagcatgccacactctctggctctgacattctataagttagttccctcttccatgacgtcccccgaactttgtgggaaaggttgcttgctacagattcccatttagggttgaagaaaacacaaaagtcactcattctcaccaatctgaccagtttctgcctagtgcagaaaagaggcttatttggcaaaggctgagagcagcacttacctatggatataaaaagaaatatttagaaggaagtcttacctgtctattcagtaaaacaatagcagtgggttccctattatgacctatgacttatgaaccatgagccacggacttttgaccaggttcacagtatcaggcatcaattccttcctatagtgtaggactcaaatctaatcagaaagtgactggttaacccataaccttcctgtcaccattgcatctgtgggcacatcttctctgtcaggttgatattgtagcctccagggaccggttcttggtggcattgtttataaccccaccccacccctcagttgccagaaaagcacctctcggcactatgaaagttaaccagcaggaaagaaattctcaggccatttctaccttgactactctgttctgttctgtaattaaagtctgttgtatcttcagcagcagggctttaccatgcagttaaggtgggcaaccaggacaatagcagcttctgctgccttgcgggcctccgcagtctctatgacatatcccatgcctggcactgagagttttttcatttaaaacccatgtttctgagggaagcattttgtcaatgctttaaacccatctttagcttctggtttctgaaaatatggcttttgtagttaaaaactcaccctacagctgaattactgctcttctctgtggagtgattttgttccagtgaagtctagaaatgctttgttagctctgatccaaaaagatctcaaacaatggtcaggacaggaaatgccagtctctttacctgtcttgctcatggcgtaagtgggtgcttgaaaagcttgcaacagcttcagccaaaaagaagagcaaacaagcaaaatacgtggcattgggagcaagctgaaaatttataccatactagtatttaacacacacatcagcggacagtggctgggggtggggtggggtggggggcagtgcaaaagaatcctgtgtgtggaggaggagacacttgagccacagacacaagagcttgtctgatacttggtaatccatgtagctgtttctatttggccttaagttttcctttgcagatgacctggagtaaacaaggtacatgatgaactcatttttaaacccactctttgttttgttgaaacgagacttgtggagttcaataaatgcagagaaagcttgaaaaagatgagctcacatccaggctactacttaagaaagtctggaatcagctagtctcgtggatgtttcaacagggaaatcagatcaaactggaaaggtaccagattaatagatggaaaaacctctgcacagatctcagtaaggatgtgtttattgtactaatggaaaattgtataacctgttaaaaagttgaggtacctccagactcatcctcaaggtataacacaaggcaaattctatgacatcactagacaggcccctctatcatgtcttaaccccacaaatgtgagaatttacaatcaacaaacaacagcctttagtgcactttgtaggagattcagtccagggctccatctaggcaaacaactgagctgcatccccagcccagggtagtttccttttcagtgggaagagccatgtgtgtatatatctttgtgtatgtgtgtgtgtgcatgtgtgtgtgtgcataagcacatgtgtatgcatgtacatgctgatgttggatattttctctatcattctgcactgtactttttgagacagactttctcactgaatgtaggactcatgccagtgagctgcagtaagctcctgcctccaccttcccagctctagtacgtcaggtgagccccttaaagcctgactctttacgtgactgcttggaatggatccaaacttagatctttatgcgacaggtcccttactgactgagccacctccctagacccacattcctatttaagcagtatcttttgtcatctctcgttatatctggaacagagatgatagatagttgagacaaatcaaagaaactcctgggttcattgcaacagaaatctgacccccacagtaaaaggcagctacagatggtctgggaaccaccttagaaacctgctgatggtgtgctctgtgttctcctcaactgagcctccattgatgtgctggcagtggtactcaggatcttgggttttgagaaatacatctgagagattggacctccttatgttttcccatctgacattctgaaagtagggtgtgtgtgtggtttttgtttttgtttttgttttttttttgaatcataggtttatggttcttaaaactgtagactactgtccagagcagtatgtgaaacactagcttaagtgccttttgctcatttcagggttgacattggacccaatgcttgaaactacttgcattgaaagtctgtgtgtccaagaatatgtcagactttctgagctgacctcactcttggggcaaaatcaaggatcagaatgtgtgcttcccaaaggccatgccctatgccatttgcccacttaaactctgcgaaaggattggaaaggctacaaactcaaggggataaaaagttgtaaaggatagcctggatttcactcatacttcattatgtaaaggcatctcaatgacagataatctcctttgtctccaaagggcaagctgtgaactgggtggaaatgtcagttgagacagaagagcagcaaacagctctgttttcctatagttgtggttttgcatggtgacgatgacacatgaagatgagaacaggtagcatgaactccagtcattatctgagtgaacatctctgccaacgctgaaggatatgtgtgggtgtcacctgcaagcacagagatggggagggagggagggagggagagagggagaaagggaaggagggagggagagagggagaacaaaagaaaatagaaggaagggttgagaaacaggaagttaactgcatagagcatctagcaattctacagcaacaacaggtgaaagctagcctttacaaaacttaacagcacagttactaaatattaaaatcagttgtattgctagcactagagcacacaatagttcttactgtcttgaaaacactattcagaacacccaaacccacagaggactgtgagagtcagcgaggcagaaaaccaaaaccaaaaaacaaaaccctgagtacagaaaggggactccagcaggattgaagggatcagatataactgagggagggagagggtagtggataaacatgtaaaagccacactacgtataaagcatgaaaatgtcatgataaacctattatgaatgtatgtaccgtgtatgtaaataaaaaagtgaagatgtaaaagattaacatgcctcttgaaagagaaactattagcttttccttaaaaagtaaaaaataaaaccaaatacaggttaaggtataatgtgttcacggacaaaagcttaatgtcttgattaactcaacaaatatagatttagcaactttcggtggtcagatctgactgtgagaagagacaggaagggctgctggaacccagggaatagccaggatctcaaaggttgccctcctgatactccctcattaagcttcatgtgatcgaagcctggaaggaggtgattaggggatagctggtaaagcctgtgttagggtggtagcaacttcctctgaattcaaacactctgtgctgggtgaaggctccttaagattcaggaagtaagcaactcaggccccttgcagagagctccaggatacaggcttcataagccaagctgggattcccttttcagagatgctgttgacactaaaagacccctgacccttaagccagggccctaaaacttattgggaagttcaggaagccagttttaggaactgcacaaaaaaggcaaatgatcctagccccgcagatgttacaaagataggcaatagatcctgtgggttaagaagcagcttattgaaaactggggacgtcattctcctctgagtgaacccccttctcacttcctaccctcaactatgaataacccagcatgaggtctgcagcctgcactctccggctccctggtgtttctggatcctgtaccctgatcacagtgcagccacatctgaagaccccacctctctggcattaaataaaacttctttagctctttaagctcagctaagttctcaccttttctttttccctacaaactcaactcttacatattcatacacatgcttttgtaagtaaatccacagggtctcaggttcatcaagtcggacttagtggacatttttgttgttgttgttctgcatttggggtaaataggtatttgttcatttcttcagggaagatcacacacaagaaggtattcccgcttgtgctgtgctcactgtggctgagctcagagcacgtgtctgcacatgcatgttctggagtgccaaattccaagcaggagaagcaggtaagtgtgtgtcaggcttgttgctgtaaaatgacacctttgatacaagggagagatgctgacttagcagataactaattcagtctgctcttctccatgccaaaaaatccaaagagagcagtggtggggctggacacaaacatgaggtgattggtgtgatccaagtgactcattaaaattagtcacagtgtgtaggaagccatggtgtaggaagtcatgatgtaggaggtcacaatttaggaggtcacagtgtagagtgtcacagtgtaggagctcacaatgtaggtaatcacagtgtaggaggtcgcagtgtaggaggtcaaggtacagggggtcactgtgtaggtggttatggtgtaggtgatcacagtataggagatcaagttgtagatggtcatggtgtaggtgatcgcaggaacccaagtctggagacagtttgatgatttgtccagctgtgcaaagttaaagaaaggatgggatgacttcgggtttgggccagcaccagtggaaggatattttacactctgaaatggagaaaacgtggaaggactgtactgtcataggatggcaggtagaaggtgtttgctttggagtctcggaagttttagggaagattaaagtgattgtgttgttaactgactatgagattctggagttggaaggagtgaatggagtctgagatgagcataaatggctgaaatgtatcagcatgtggaagatattttgacaagtgactctacaaagatgtagggaagctcttttcaagagtggtcccgggaccaggagcatcatttgttagaagggcagatcttcagacccagctctagacttactgggttgacaaggctcacagggcagttggaagcaagccagtgcctcccagccacagccccactgattccctacagaaggaggttgttccaagcactgagtcctgggagctgcacaggcttagagggtagaaccggctaagaaggaagagaaatcatgaaaccacactaagaagatagatttctgctgtagaggaatgtgttgatttaatgccatccaaaaacaaaaccttagatgttagagagcttgacagctgcctcaaagcatcctctaacagcgcaaagggccgaagacggatctgacagttgcgagaaactcgagtgtggaattaatctccgtgaaactcatgataactgtgggagctttgtatttgaatgaagtagcatttcacccggtgggaggggaaggcagcttaacaattggccagacatgtggaaatagataattttaggtctttccataacacatatgcaaaaatatattccagatggactagtggcctggatgtgatcagggattgcttgaaggaaaatctaagataatatctttattcctgtgtgatagtaaagaactcatcaagaaaatagatgaatagaatttgaacccagtaaaatgtagaacacttggatggtcaaagccagctccacagatcagggttaagggtttctagtggccccagaggcaaaatttgatatttggaatgtcagaaatatgaaaatgatgctctaaatgacagtggggaagaaaaaattctagaaatacttcaatgggaaatgcaaagggaagagcatggagcatgcttgacttgcagaggaatgaggaaatacacaaatgcaaacagcccggccttccctgccatgctggctgcaggagggaaaccccccagttgta

SEQ ID NO: 1535 - DNA, 1492 bp, Mus musculus
acacactctgccttgctcacagaggaggggctgcagccctggccctcatcagaacaatgacactcaggctgctgttcttggctctcaacttcttctcagttcaagtaacagaaaacaagattttggtaaagcagtcgcccctgcttgtggtagatagcaacgaggtcagcctcagctgcaggtattcctacaaccttctcgcaaaggaattccgggcatccctgtacaagggcgtgaacagcgacgtggaagtctgtgtcgggaatgggaattttacctatcagccccagtttcgctcgaatgccgagttcaactgcgacggggatttcgacaacgaaacagtgacgttccgtctctggaatctgcacgtcaatcacacagatatttacttctgcaaaattgagttcatgtaccctccgccttacctagacaacgagaggagcaatggaactattattcacataaaagagaaacatctttgtcatactcagtcatctcctaagctgttttgggcactggtcgtggttgctggagtcctgttttgttatggcttgctagtgacagtggctctttgtgttatctggacaaatagtagaaggaacagactccttcaagtgactaccatgaacatgactccccggaggcctgggctcactcgaaagccttaccagccctacgcccctgccagagactttgcagcgtaccgcccctgacagggacccctatccagaagcccgccggctggtacccgtctacctgctcatcatcactgctctggataggaaaggacagcctcatcttcagccggccactttggacctctactgggccaccaatgccaactattttagagtgtctagatctaacatcatgatcatcttgagactctggaatgaatgacagaagcttctatggcaggataaagtctgtgtggcttgacccaaactcaagcttaatacatttattgacttgattggggaagttagagtagagcaatcaaaaagatcattcattcagccttgggaagtcaatttgcaggctcctggatgagccctgccccgttttcacttgccagcacatttcagtcatgtggtgtgatagccaaagatgttttggacagagaagaaaggatagaaaaaccttctctttggctaagttggtgtttggggtggggataggttagagtatagtacttaactatttgaaaaataatgaaaacacttttttcactcatgaaatgagccacttagctcctaaatagtgttttcctgttagtttagaaagttgtggacatatttttttaatgatttctgaccatttttaatcacattgactcatggaatggcctcaaagcaccccccagtgcttctttcctcattcccggtcatgggaactcagtattattaatagtcacaacatgatttcagaactagatagccctcccacaccaagaagaatgtgagaggaagtaaggtcactttatgtaaaaacg

SEQ ID NO: 1536 - DNA, 657 bp, Mus musculus
atgacactcaggctgctgttcttggctctcaacttcttctcagttcaagtaacagaaaacaagattttggtaaagcagtcgcccctgcttgtggtagatagcaacgaggtcagcctcagctgcaggtattcctacaaccttctcgcaaaggaattccgggcatccctgtacaagggcgtgaacagcgacgtggaagtctgtgtcgggaatgggaattttacctatcagccccagtttcgctcgaatgccgagttcaactgcgacggggatttcgacaacgaaacagtgacgttccgtctctggaatctgcacgtcaatcacacagatatttacttctgcaaaattgagttcatgtaccctccgccttacctagacaacgagaggagcaatggaactattattcacataaaagagaaacatctttgtcatactcagtcatctcctaagctgttttgggcactggtcgtggttgctggagtcctgttttgttatggcttgctagtgacagtggctctttgtgttatctggacaaatagtagaaggaacagactccttcaagtgactaccatgaacatgactccccggaggcctgggctcactcgaaagccttaccagccctacgcccctgccagagactttgcagcgtaccgcccctga

SEQ ID NO: 1537 - DNA, 51365 bp, Homo sapiens
tctccatgttggtcaggctggtctagaactcccgacctcaggtgatctgcctgcctcagcctcccaaagtgctgggattacaggcatgagccactgtgcccggccacatacaggtttcttacatgcatatattgcatggtggtgaagtctgggcttttagtgtacccaccacccaaatagtgagcattgtaccccataggtaacttttcaaccctcacctgcctcccacctcccaccttttggtgtctctaatgtctattatttcactctgtatgtccacgtgtacattgtttagcttcctcttttaagtgagaacatgtgtgtttgactttctgtttatgagttatttcactaaggataatgacctccagttccatccatgttgctgcaaatgatttcattatttttttggctctgtattattccatggtatgtgtgtatgcattgctgcaaatgatttcattatttttttggctctgtattattccatggtatgtgtgtatgcgtatgtgtatgtgtgtgtgtgtatacattatacaccttttgtacgtgtgtgtgtgtgtgtgtgtgtgtgtatatatatatatatacctccaatgtatagctatagcccatattctttattcaatcctctgttgatggactcttgtgttgattccatatctttgccactgtgaatagtgctgtgctaaacatacgagggcaggtatctttttgacgtaatgatttctttccctttgggtatatacccagttgtgggagtgctggattgaatgctagttctatttttagttctttgagaaatctccatactattttccataaaggctgtactaatttacattcccaccagtggtatacaggcattctcttttctcctcatgattattggctgtttttagactgtttattaatagccattctgactagtgtaagatggtatctcactgtggttttaatttgcatttctctgatgatcagcaatattgagcattttttcatatgtttgttagccacttgtatgtcttgttttgaaaaatgtctgtttaacaagcaaatgctgagggattttgtcactaccaggcctgccttacaagagctcctgaaagaagcactaaatatggaaaggaaaaactggtaccagccactgcaaaaacacaccaaaatataaagtcaccatgaagaaactgcattaactaatatgcagaataaccagctagcatcatgatgacaggatcaaattcacacataacagtattaaccttaaacgtaaatgggctaatgccccacttaaaagacacagactggaaaactggataaagagtcaagatccatcggtgtgctgtattcaggagacccatctcacatgcaaagacacataggctcaaaataaagggatggaggagtatttaccaagcaaatggaaagcaaaaaaaagcaggaattgcaatcctagtctgtgataaaacagactttaaaccaacaaagatcaaaaaagacaaataagggcattacataatggtaaagtgatcgatgcaacaagaagagctaactatcctaaatatatgtgccctgaaaacaggagcacccagattcataaaacaagctcttagagacctacaaagagacttatattcccacacagtaatagtgggagactttaacaccccactgtcaatattagacagatcaacaagacagaaaattaacaaggatattcaggagttgaactcagctctgaaccaagtggacctaatagacatctacagaactctccatcccaaatcgatagaatatacattctttttagcaccgcatagcacttattctaaaatcgaccacataattggaagtaaaacactccttggcaaatgaaaaaggacggaaatcataacaaacagtctctcagaccacagtgcaatcaaattagaactcaggattaagaaacgctcaaaactgtgcaactgcacggaaactgaacaacctgctcctgaatgactactgggtgataacgaaattaaggcagaaataaagaagttctttgaaatcaatgagaacaaagacacaacgtaccagaatctccgggacacagttaagcagagttaagagggaagtttatagcactaaatacccatatcagaaagcaggaaagatctgaaattgacaccctaacatcaaaagtaaagtaaatagagaagcaagagcaaacaaattcaaaagctagcagaagacaataaataactaagatcagagcagaactgaaggagatagagacatgaaaagcccttcagaaattcagtgaatccaggagctggtgttttgaaaagattaacaaaatagatagaccactagccagactaataaagaagaaaagagagaagaatcaaatagacacaataaaaaatgatgaaggggatatcaccactgatcccacagaaatacaaactaccatcagaaaatactataaacacctctatgcggccgggtgcagtggctcacgcctgtaatctcagcactttaggaggccaaggcgggcggatcatgaggtcaggaggttgagaccatcctggctaacatggtgaaactccatctctattaaaaacacaaaaaattagccgggcatggtggcaggcgcctgtagtcccagctgctcgggaggctgaggcaggagaatggtgtgaacctgggaggcggagtttgcagtgagccgagattgcgccactgcactccagcctgggcgacagagcgagactccgtctaaaaaagaaaaaaaaaaccaaaacacctctatgcaaataaactagaaaatctagaagaaatggataaattcctggacacatacaccctcccaagactaaaccatggagaagtcaaatctctgaatagaccaataacaagttctgaaatggaggcagtaattaataccctatcaaccagaaaaagcccaggaccagacagagtcacagctgaattctaccagaggtacaaagaggagctggtaccatttcttctgaaactattccaaaaattagaaaaagagggattcctccctaactcattttatgaggccagcatcatcctgataccaaactctggcagagacacaacaaaaaaagaaaatttcaggcgaatatccttgatgaacattgatgccaaaatcctcaataaaatactggcaaaccgaatccagcagcacatcagaaagcttatccaccatgatcaagtcgacttcatccttagcatgcaaggctggttcaacatacacaaatcaataaatgtaatccatcacataaacagaaccaatgacaaaaaccacatgattatctcaaaagatgtggaaaaagctttgataaaattcaacaccgcttcatgctaaaaactctcagtaaactaggtgttgatgaaacatatctcaaaataataagagctatttatgacaaacccatagccaatatcatactgaatgggcaaaagctggaagcattccctttaaaaaccagcacaagacaaggatgccctctttcacactcctattcaacatagtactggaacttctggccagggcaatcaggcaagagaaagaaataaagcgtattcaaataggaagagaggaagtcaaattgtctttgtttgcagttgacatgactgtatatttagaaaacctatctgtatttttagaatgctgtatatttagactgtatatttagaaaaccatctcatgccagttagaatggcgattattgaaaagtcaggaaacaacagatgctggcgaggctgtggagaaataggaactcttttacaccattggtgggaatgtaaattagttcaaccattgtagaagacagtgtgtcaattcctcaaggatctagaaccagaaataccatttgacccagcaatcccattactgggtatatacccaaacgattataaatcattctactataaagacatgcacacgtatgtttattggagcactatttacaacagcaaagacttggaaccaacccaaatgcccatcaatgatagactggataaacaaaatatggcacatatatgggctgggtgtagtggcttacgcctgtaatcccagcactttgggaggccaaggcaggtggatcacctgatgttgggagttcgagaccagccagaccaacatggagaaaccccatctctactaaaaatacaaaaattagctgggcctggtggtgcatgcctgtaatcccagctacctgggaggctgaggcaggagaattgcttgaacctgggaggcagaagttgcagtgagccaagatcgtgccattgtactctagcctgggcaacaagagcgaaactctgtctcaaaaaataaaaaaataaaattaaattaaattaaaaaaaagaaaatatggcacatatatactatggaatactatgcagccataaaaagaatgagttcatatccatcgtctcagcccaaaaactccttctgataagcaacttcagcaaagtctcaggatacaaaatcaataggcaaaaatcacaagcattcctatacaccaataatagacaagtagagagccaaatcatgagtgaactcccattcacaattgctacaaagaaaataagatacttaggaatacagcttacaagggatgtgaaggacctcttcaaggagaactacaaaccactgctcaaggaaataagagaggacacaaacaaatggaaaaacattccatgctcatgaataggaagaatcagtaccatgagattggccatatggcccaaagtaacttatagattcaatactattaccatcaagctaccattgactttctttgcagaattagaaaaaactactttaaatttcatatggaaccaaaaaagagcctatatagccaagagaatcctaagcaaaaacaacaaagctggaggcatcctgctacctgacttcaaactgtactataaggctacagtaaccaaaacagcatggtactggtaccaaaacagatatatagaccaatggaacgaaacagagacctcagaaataacaccacacgtctacaaccatctgatctttgacaaacctgacaaaaacaagcaatggggaaaggattccctatttaataaatggtgctgggaaaactggctagccatatgcagaaaacttaaactggtccccttccttatagcttatacaaaaattaacttaagatggattaaagatttaaatgtaaaacctaaaaccataaaaaccctagaagcaaaccaaggcaataccattcaggacataggcatgggcaaagacttcatgactaaaacaccaaaagcaatcacaacaaaagccaaaattgacaaatgagatctaattaaaactaaagagcttctgcacagcaaaagaaactaccatgagtgaataagcaaactacagaatgggagaaatttttgcaatctatccatctgacaaacgtctaatatccagaatctgtaaggaacttaaacaaatttacaagaaaaaaacaaccccataaaaagtgggcaaaggatacgaacagacacttctcaaaagaagacatttctgcagccaacaaacatgaaaaaaagctcatcatcactgatcattagagaaatgcaaatcaaaaccacaatgagataccgtctcacgctggttagaatggcaattattaaaaagtcaggaaacaacggatgctggcgaggctgtggagaaataggaactcttttacgctgttggtgggagtgtaaattagttcaaccattgtggaagacagtgtgtcgattcctcaaggatctagaaccagaaataccatttgacccagcaatcccattactgggtatatacccaaaggattataaatcattctactgtaaagacatgcacacgtatgcttattgcagcactatttacaacagcaaaaacttagaaccaacccaaatgcccatcaatgatagactagataaagaaaatatggcacgtatatactatggaacactatgcagccataaaaaagtatgagttcatgtcctttgcagggacatggatgaagctggaagccatcattctcagcaaactaacacaggagcagaaaaccaaacaccacatgttctcactcataagtgggagttgaacaatgagaacacatggacacagggagggtaacatcacacactgtgacctgtcagggggtggggatcaaggggagggagagcattaggacaaatacctaatacatatggggcttaaaacctagatgatgggttaataggtgcagcaaaccaccatggcacacgtatacctttgtaacaaacctgcacgttctgcacatgtatcccagaacttgaagtaaatttaaaaaaacaaaaagaaagaaaaatgtctgttcatgtcctctgcctactttttaatgggattgtttttttcttgttgagttgtttcagttccatgtagattctggttattagccttttgtcagatgtttagtttgcaaatatttttcccattctatagttatctacttactctgttgattgtttcttttgctgtgcagaagctttttagtttatttaagtcccatgtgtctattttgttgcctttgcttctgaggacttgttcataaattctttgcctcggcagatgtaaaaaagagttttttcttggttttcttctgggatttttatagtttcaggtcttacatttagggctttaatgcatattatgttaatttttgtatatggtgagaggtatgggccccgtttcattcttctgcatatagctagccaattttcccagcaccatttattgaatagggagtcctctccccagcatatatttttgttaactttgttgaagatcagttggttgtagatatgtggctttatctctgggttctctattctgttccattgttctatgtatctatttttatactagtaccatgctgttttggttactatagttttaccatgtaatttgaagttaggtaatgtgatacttcaaagctttgttctttttgcttaggattgctttgactattcagctctttttggattccacacgatttttaggattgctttttcaaattctgtgaaaaatgacattcttttgttctgacaattcttaaccccacttcagaccagttttctcatctgtaaaatggagataataataatcttcctcacaggttgtgtattaaatgagatctggaatgtaaagttcttagtatggaaatgctattatttttactgaaaatgttgtagggtctcagtatcctgtgtattgccggatttaaggtccttattttatttctgtcatttctacctcttggtatatgtgaatgctattggatttcaaaagcaaatgtgaaaggattctaatgaaatggtttgcttctttagtgtcatacatgttaaaacataggaaggcaaatgtcaaagtttgtgtttctttttattctatggaaagaaaattaaatatggctcatcaaataataaggccaataatatttaattattgttttgtgaattcgtataaatgagctgacctctctgggctgcagcttccttctctgcaagataagggaattaggccagatgagtgaactgtttctttttcagctaagtttgacccgattactactatttacatagtattaactagatgctatgtagtcatctttaatatgcttgaagacagttattaactcactccttagccttttgttgttgatcatggaaaactactgggtatctttgtttcttctgtgtatattctcagtatgtataatgagtctcagagcctcttgttttaagatctgggtaggctggtggctctagaatatggatgaccttttaggaaaggtcaccttgccatctgtaaattttcccccagatagacttcaggccctggggaaggcatgggttcccctaactggatagaggatcagagccaggaagactgtgtcaaattctagaagtgaatcttctccaggactcagggcatagctttgtcacttacctatagttcagaagtgtgagtgaatcatttccaaggacaaatttctccaaaggaccaaaagatgtgttagtaagaggggttcacaaagactgtgtttgtgggaaaattgaagtgtgaacaaagaaggtctaccaggacaggaaatacttttgatctgtcatttatcagatcaggagggagggacatgaagcctgcctcctcttacagctaggtcatcaaagagtttgactgtagcattttaaaatagcgaagaaaaaaaggtaacaacactaggggtttgttaaacaatttatgatataattagagaatggaatattatgcatcaattacaaataatgtttataaagatacttaaatgacatgggaaaatgttcaagatataacaaataatagtacatatctgatgaaaactataagtaaaacatgatattaaacatgtaaaaatcttaacagaccaacaggtggaaggcagtggaccagaatattagcagtgtttatattagggtggtaagaatgtggatgaatcttgttttaatgcttataatttttctaaacattctcaatgaaatatgccttacttttatagtcagaataaaaagcaatacaagttatcttttaaaacaacccacatacacaaaacccccaactagagtaattgcacaaagcttagattatcaaaaagaagaaaaaaattactggaaaagttttgaagaagtcattgagtacaagatactgacgtaggtgccggaagaagagagcagttggccgtgctggtggaataaccctctctgcaaagggcctgggagttgaagaagggtgcagtcgggtggtggttatgaatctcagaaatcctgccacggagcctccttttgtgccctattacttaaccttgagggacatagagagcatgagacaccaaggggcttttggttgccttactgtcccactaagaacatagaatgttgttttgactttccctttgcttagggaacctcccccagatactcagctggctggctgcttgcacgtagaatgggttttgcaaagttcctagaagtgagttggaggaggcttgacataaatcaagcactgtgtgctaaatgctccagagggctaccttatgtcctacacaaatgttacatttctaatatttgtaactcctttaaacgtttatgcagatgtttcccaattcctcagtagaattcttaccattatctttttgacacaacctgtccccatcctatgaaaatctctcctctgctagagactttattctttctttctctctctcccccttccttccttccttccctccctccctctttctttctttccatctttctttctttctttctttctttctttctttctttctttctttctttctttctttctctttctttctttcttttctttctttctttctttctctttctctctctttctttcttcctttcttttttctctctccccttccttccttctttccttcttttcttttcttttcttttcttttctttctctctttctttctgtctttcttttctcattctgttgccctggctggagtgcagtggcatgatctcggctcatagcagcctccacctcctgggttcaagcgattctcctgccttagcctccctagtagctgggattacaggtacccaccatgatgcctggctaattttttgtattttcaatggagacggggtttcaccatgttggccaggctcgtcttgacctcctggcctcaaatgatccacccactttggcctcccaaattgctggcattacaggcgtgagccactgcacccggcctgttccttcttaagaacactttgtctcccctttaatctctgctggatttcaagcaccccttttacacaactcttgatatccatcaataaagaataattcccataagcccatcatgtagtgaccgactatttttcagtgacaaaaaaaaagtctttaaaaatagaagtaaaagtctaaagtcatcaaaacaacgttatatcctgtgtgaaatgctgcagtcaggatgccttgtggtttgagtgccttgatcatgtgccctaaggggatggtggcggtggtggtggccgtggatgacggagactctcaggccttggcaggtgcgtctttcagttcccctcacacttcgggttcctcggggaggaggggctggaaccctagcccatcgtcaggacaaagatgctcaggctgctcttggctctcaacttattcccttcaattcaagtaacaggtaaacaatgttaatgtctttctttctgtaaatattttttgaggtcttccaattggcttagtttattttaaatttctaacaatgtgtgaaatttgaacatttgaagtgtagttttgctgtaatagggcaatgtgttattttgaaaatcattgattctcagactacaatatagtatcttaacaaaagtcccttggaaataaattttctaagctattagtttctctagctattagttgatagtgtcccaagaatttattattattattattattttaaattgagatggggtttcactatgttgcccaggctggtctcaaacttctgagctcaagcaatccacctgcctctgcctcccaaagtgctagggttacaggcatgagctaccatgcccggccaataatttttaatttatgtatcgtttctttctttctttctttttttttttaatttaagaaagctgctgtaagtagattggctctggaagctctgaatttaggttgcctatgttcctaacacaggtccaattctcactagctaagcttaggcttagctattatttaaactctccaaacctcagtttccttaactgtaaagtgggaataataataaacctcacctcaaggtcattgtgaggtaaaatgaaataatccatgcgaagggcttagctcagtcaggcttcaagataaatgtgaactgtaattactctatctacctgaattgaatgagttccaacatgaattctggagtcaccacagaagctgctacaacaccaatattaataaattagttttcttttacaatcggccaaaatgtattttcttagattaaaattctttaagttcccaatgacgatgatgaggaggataatacatctagcactttgagcagcacacagttctcgtaactagaaggtaggtattacagttaacttcatttcagatgaagagactgaggggtaggcacattaagggatttgcccaaggatgtacaggtggcagctataggaggcagggtctgaaccaccttagtctgactccagtgccggtgttgttgattattatgctattccatctaacatggtgtgatttgtaatttcatggactcaggtaaatccagggttaaattaacttcggaaaatcacaagcacaattcctaacagaaagaatttgttacttgggtgggctggagtaagatgctcattcaacgtgttctcagagttagaaaaaggcccccgcttggttcaaaaactggactgataggggtcaacagtcatgcttaaataaggacagttatttttccctgaaagatacattgaaaagccagtatcctcaattttctttcttattttggcagtacagagactgcattatttgttgttattcttaaacattaagtgtacatagcccaaagagtataatttcccaatctgcagaggtacagtagttgcatatatacccgtttattttatggtctgacgtaccagtgagcacaaattgtgtatatttataaaacgtgttgatataatgaaagacatgagttggcaatgagatctggtaccaagcgtttacagctaccaaatatattctacaagaatctttaacatttattttaaaaaggtcaaaccttatttttaagagatctctcaaacttaaagaatatttaaaattacttaatttgttagacagtcaagggaagcctaccctgactgaaaactatttaaaattggtaattgtacactaaatacttttctgatgtgctttgtggacacctatctgtcatcaacttattcactctcttttgaagagtttttggtaagactcaaaactttgtatgttttctttagaacatttattaaaaggggactagctagataagtggttggagagttcacacacatagggcctttgttttctactttgacatatatttacttttcaaatgccaattcacttttctagtaacttttagcatttgatactgagtggctatctaatgaagaaggaaagagatgggagtgaaggggacacttttacagtcttttccagtaagaaaacttacgagcaagaaaagaatgaccacataaaaaatgtatgatttggcctggtgtggtggctcacgcctgtaatcgtgggacgctgaggcgggtggatcacttgaggtcaggagttggagacccgtcgggctaacatggtgaaatcccatctctactaaaaatacaaaaaaattagcagggtgtggtggcatgcgcctgtaatcccagctacttgtgaggcttaggcaggagaattgcttaaacccgggacgcggaggttgctgtgaacttagattgcacccctgcactccagcctgggaaacagtctcaaaaaaaaaaaaaaattatgctgcattctaatcaaatagtgcaaagcttcttgtgtgctttgcctttctctgtacacaccttccattaagaaattatagatagggaaattctctggtcaaagtgtaactgtccttcctaggtctgagaaaccactgttatgcctgtgttgagatgtgtatctgtgtgcgtgcatgtgtgtgtatgtatgtatatgaagaatagttcttttttccattaatttaataatgtgtgtgtatgtatgtatatgaagaatagttcttttttccattaatttaataatgtaacttatttgtttacagcatagcttaaaatatttattctataaaggttaagtctaacctgattccttatgagttggatgacagtgtagagagatatttatggctaagttaaagaagtgtgatttaggaagagtgaggaaaccttaacttagataagccctttgcatgttttctactagactcggataattgtgcaactgagatccacagagagtattttgctggactttgggataggagtccagcccagaactacagagccttaagagggaaatgctctgggattgatgatagaaggatggtatgcacaaaatacttgacattggtcacatgtttcaggccatatttgctattttttagcaagcctaatcatccagtgtgaagagaaaaatcagcatattaccacttatttttccatgagatcattccttttcacttctccaaaacttgggcaaaaaactgtcaaaatggccagtttggacaaagctaatttctccagcgccttcccttagcgcttatttttctgagagaggcatggaaagcaggaaaataactgacatttaataaaaagtcatcagcaaagcaattaaaaattttatttgtactctagtcttcagccaatgactcccctgagctggttgtatacggaaagaagtaatttgtttctcacagttaagtgttgctctgagactgggcttgggaaagtaaggtgaaaagatgaatgtcaaaaaatcaacagattgccgtatttacatgacttccaatatgctgtggccagtttttctgttaaaagaaattgactggatgtttttgtcatttcaagtaaatttgatggatatttcaaaagtataggcattgcttaaggatttgttttactctactaccgtgccctagttaacacattgtgttttttaaggcaaccatccagcaaggacgtttacagcaaggactgcaaaattaatatcaatatatcaataccaggaaatggaatgagtcattgccacagatagattagaaatagaaatgaatctgtgattgtaactccaaagctctcacattcaaacttttactatgggtggggagaggatctcgctgcctccccttctttaagacatagaccctcctcctttttaacgtcttatgccttttttcaagggtggagaaatgccatatgattaccatttggcttttatcttgtgtggatatcttcctccaagtatttcctgcaagcagtgtgctgacatttacaaaaggaaaatttttatgccaccaacatcccagaagaaaatttgttgtggtttatcatctctaacacaaaagccctttattaactagtgtaggcattgatgaggatacgcaattcatgtcagacttggttgtctaaaaatcagaggacggacactccttcaaagcacaattgtttcccagcaggtcatggcaagggatagaatcttcttctctttctcatgttggttaaatttttgtttgcctttttcttcaagaaatttattatttatggaacttcacagaggctggaacttttcttctcagtacatagttgagctgagcatctggaaaaattacatctgggtggttttgtgactgactgaatggctctctggttaagctgtgttaagatatctgtgtctcttttacggtgatttatttggccgtttttggccaatgacagggtgttagcaccaaaaacccaaaaccaaaaaaaccaagacaattcactcagagctttgagcctgataattatagcatgagaattggtgcctgaagctggggggaaggtaacccaggccccacagagaggtggttgcatgcaagtgtctaactttttccttgttaatctcattttgaggactccaaacactagaagagaagtgcactggataggatcaagaactactcagtcatttggtagaggcttggaaaaaagagtttagacttctcactatttcaatgttaatttcaaaggcatgtttatttagtctcgtgtcaccatgcaggttatatgtgcttctgttttcattgctggaagagaacctgcaaggtggtggagaagttcttacttaactttgagctgctcccttatctctgcattaccattactgtcatctttttctttgtcatcatcttcattatcttgggtattgtggctgacaatataaccaggttaatggttcctgatggtatcattcagaattactcactcatagttcactttggcctctgatctaattgtgagcccctttctgcaatatctgaatcacctcattggctcacaatccaccatgtaatctacttgtctttcatgttagacttttcgtgaaagatccacctcctcgaagaagcttctggatacttcagcctttattgtggtcttggaagaggagttctgatggaagtgtatctcaacttaacaaatatttattaaacctctcatattttaatctccatcagagtttcagagaatataaaaagaaatataggccggatatggtgcctcacacctgtaaccccagcactttgggagaccaaggcaggcagatcacctgaggtcagaagtttgagaccagtctggccaatatggtgaaaccccatctctactaaaaatacaaaaattagccaggcgtggtggtacacacctgtagtcccagctactggggaggctgaggtaggagaattgcttgaacctaggaggcagaggttgcagtgagcagagattgtgtcaatgcactccagcctgggtgacagagcgagattccgtctcaacaacaacaaaaaaaaagaaatataaaatcagtacacaagtattgtgtagtacaagtaattaggtagttaactgagttctctctgcttttacagcccctatgatttagttgagtaggttatatataataggaggatgtaacatctggaaacagataaataacacttggcagtcactacctcaccatgctatttgatgactaaaggactttggtttgcctacattatttttataatctgaaatgtcctctacacctctcacctgaagaagccttctctgagaccccaaatggcaaagagagggacttccttccctctcaagtttctccaaattattactgtgtattgacacatttattttcttttccactagactatgaactccttgagggcagaatcatgtcttattcatccttctaacctctgtattaggcacaatgctgtaagcatatagttactcaataaatatttgttgaagaaagaaatgaatgaattagtaacaaaatgaggaagcataaaataaatactcgtaagattaatgtagaaaggtaagcctttatggagagttgggaattagactggacagtagacaagatttgaatgaacgttgttattaataataattgctagctaacatttattttgcacttataatgtgccaggtagtgttctgcctggctttccctgtattaagtcatctaatctccaagtcctatgaggtagttactatgattgctatgattatactatttcatagatggggaaactgaagcacagagtgggtagagcatcttgcttatggtcacaaagctactaagtatgtaaatccagatggtcttgctctggggttcatgttcttaccaatgctgtgttgtctcaggaaggaaaaggtggattaataaagaaattaaaccaggaatactgtttcatgttctcagaacagatggcaactctgaatgtgtgaggttatggtgaagcagcggagaatccagttaagcaaaggatagaatactggtaacagaaattcaaactttattttcaagtcattttgaagtaatggcctgggtaagaagaaaatatttcagaatccttatctttggaatgaagctggagttatgggaatggatggctagtcgaaaggagagggcataactgtagaaaaacagagagtggagctgaatctggaaactaactggctctgatgggagtcagctgaaaaggatggttagctagtgaaggagacaaagaaagtggtgagagaggcagggggacacagtgaggctagtggaatgccactaagccaatgagggaaagagtttcaaaaagatagtggttaatagcattaaacataagagggaaaggagtgaataatggcttgggatttggctgaaacgccacctgggacttttgagtttaggcagagacatggagaaggaagataagacttcacaggattaagaaaaagtggagggggacaaaacagagacagtgaaaaggagaggaaatagataaggtaaagacaattaggaacttatatcacctaaaatgtctaccatggtattttgtgcatgtaataataaatgtttgcaaatggctgagtgacttaagtatgtttgacatgtggaaggagccaagtgctggacctgagagagagagagagagggagagagagagagagagagagagagacagagagagagagtgtgtgtgtgtgtgtgtagcattgcagggcttgagggtagagaagggtattattaggaaagaaaggaggaggagggagaggaaaaaaagagggtggggatagttttctcaaggagatagggagggagatttgttgcataggagatgagtgtattagagagaggaggacaaatctctaagaagatggggaggaagagaagagacttataggggtagagataagttagaatgaagctatggtagatgagtgattctatactggtgaacctgaggttaaaaacaaacaaatctctcagagtaggtcatgatgttaaacctatatcaacaagggctactgggtaatacatgccttctctctgaagactttgcccatgtgtactttaaattcttgcttgagtcctcaacaatgcacactatggctaggcttgacctcagctcacggctgagatcacagggtcacagggttcaaaccaaccctgcccaacattatgggcgggactccagtttccagtcagggatgttaatcttagcatttccctgtgtgttttggaacaaggatatggttgcttgaccttggcttggggaggccagtccgctattcttttgccctctcttttttcaaactcaaaagctaatcccaaggatttctcaaggtgggggatgtgattaggagtattagtctatcatactgtgacagaacttttctaggcctcggtttcttcatctgatacatgaagagtttgggctggaggatatctcaggtctactttctggcttaaaagtgcttctgaagtggaattttttaaaaagctaacttttgtcgggtctaacaaggcagctcaactaccccatccccttgtggatgctcttatgacctgatagagcaaatacaagaaattagaaaccagccatctctgaaatcccttgcagggattgctaaccaggatcctaaatgctgctaatgtgcttagaaatgactgctggacttcgagggggcaatgctgcctttgctatctcctgttttcctatgcaatgttaaggtccaacacagtaattatttaaacttctgggccatgacatttacctggaggttctgtatatgacaaggtgatcctgagcagattcttcagaggtatgtgatttaggcagaatggaacagacaggaaaaatgtactgttgtcttcatcacagagttgttttgaatgagggatcaggataattgtggctcaggaggaaaatatggctctcaaatttggttactagattaaaacatatatttagaaaataataaattaatagaggaggtctctttatacctgtgggttttcttttgatccgttaactgaattactataataatatatatgtacagaaagctataattccctggttacctcctatttagactacaggcaaccttttagaatagtgagatttgattttggggagttgtctggtggctcttggtatgggttccactttcatgtaagttaaggtgctcttgctatgttgtccccttagattgtctttctaacattaggagatcagaggaaaattgcagacctgacctgtgaacggtagggattgggtcacactgcatctgagtttatgttgctttgggttaggaagttttggtcccagagcactcacatcctgcattgctgtgtggtgtctctgagtggtagggatgggttacagcacaggtgatggtttttagcaattttaatattaactgtcatcctaatacatatgaacttcctaatgtacatttctatccccaactggcttcctcgaactctagtcctatacttctaactccttctggatctttcctccaggatgaacaaatttcctcttaacttacctcattttgtcaatggtgcctccactcatacccttacccagtgcgtgaactctgggtcggtttccattcctgttcaccatcagtctgtaaaactgagcaccaatgccttgtttgaccctttcataccagctgccacctccacagctcaggccttatgaactcacatcagtgctattgcatcagcctcctgattggtctctgcctcagctcttcccttgctccaagccaagggcagtcaagattgcttgctgcactcctcaaggctgtgctaaccttcccaaagcagcatgtaccacaacattctcaactcagacatcttcagcatctcccatggcctttctggtaaaatctatgtgccttttcttggctccccatgactggtattggccatcttcacctgtttccatcctacataaatggaatactctgccagttcccaataaactctcacactaaggtcatttccatgatcttagcctgtctaaatttgccccagaccttatggcccagctaaatgtgaagtctctacaaaagcctccagaatcatcctgtctggaaacaaggcttctttcgcgtgcctgtcaatgaccctttaaagggttcatgtaccacggatggcttcggagagtagctgattgtgtacctgccttcggatttctcctagaatgaaacagctctgtcttttacatcttcccatctcctaagaatcaagtacattaagtcccttatttatttgatgaataaatgaatgaatgacgctgtcacagcagaagtcagaataccaaaggacgattctgtgacacatcaaaatttcttctcagaaagtactcattgattgtttttgataacttttccctctcaaaaatgaatgccttaggtcttggtgctcatatgggactttttgctactgaactatctgacctttgacttactttctgacagttacatgtagcacaataatttttttaagaggacaagaacaagtgtcctctacattatagtgtctgcctgtgtaggaacacaaataaaggttaaaggtggggcttagattagtgctgaccaaaagcaacttctttactaaattatttatttatttgagatggggtctcactttgttgctcaggctggagtgcagtggtacaatcaccactcactgcagccttgacctcctgggctcaagtgatcctcccacctcagcctcccaaggagctgggactacaggcacatgccaccacagccaggtacccccacacccagctaatttttgtattttttgtagaaatggggtctcgccatgttgcccaggctggtttccatctcctgggttcaagcgatccacctgtgtcatcctcccaaagtgctaggagtacaggtgtaatccactgtgccaggcctttagtaaatttattaatcaggattctatttctatttatattgttacctataatcatttgtccttgttcaaactaaaacctctttagattttgttttaaaaccatactttctgtcaagaacagttaatgtgcttggtataactgatagttgtgatatacacaatcttggccaaagctggttgcttggtctgcttctcttgatggaagtcattgcttctgtcatggtggcctccactacacaactctcttgccttctggttctggtaacttcgctgtcccctggtctctttcgacctaagggtggtcataattctgctgctgcaagtcacaggctctggcactacccctcgtggttctgctcttgccacacctttgccaacagtcctttcataaataaccttcctactcttgcccaattttgtgtgtgccatctgttttcatttgggatctggaatgagacaacatatagttggcccactgtatccacgggttatgcatctttggattcaatgaaccatggatcaaaaacagtatttgtgggatgcagaatctatggatacagaggaccaacaattgcatgacttgagcttccatggattttggtatctgcaggggtcctggaaccaacaccccatggatccagaggaccactgtatatgcatgtttatcaagcttattcaaagccccctttttctgtgtgaagagattttccttaaatcttcatttcttgtgaaaatgggaagactttcaagataacagtcaacagaaaactagatgaaatgaccacagaattatttttaaaccataacttgcattattatcattattattaccattttttcattttaacatgaatttctgggagagagaggctgggtccattcaaagcatggtaggtcatgaatagctttgtttttatcttcattgcagctcagagaggatggtgaaaggtgctacagtctggtgaatgttttgtacttctctttctcttatcagaaggaagccaggccaccagctaaggttatcagagccatagactgttgagtccccctttcttctcagggagcacggtttgtctcacagtttcctgagcaaccaccgggttgtcttgtgggggagcctaccccttacagagcctgaaaaggagccagtggtcagatggtcacgtgttgaagggcatcctgggcctgaacaggaaatatactcagaggaaagttacagtaacttaactagctctgtggtcaggagggaggtgctcttctatgccagggaaatcagcatcaccttcacagtgtgctcacaaatatcacagggcaaaatggctgaaagtagaagctttcattgtttttggttcctacctaacatgtgaaattctgttcagtccgaatttttaaaaggaaacaagataattagaatcttacaacctgatttttcaactgcaaaagaaagtcagactatgatgtgcataaatggaacctgataaagttcttaaagattctggaggaaaatcacattttgctaattaatcatgtattccagctctctaactgcttctttagcttcccagtacgttttatttctctatggtgctacgataaagaaaaggaaaaactatgacaaacaaatgtaattcacaaaagccctgaagttaaggattttcctagtgaagttcagactgaaatgtgatttcatgtgttgactcatgtctatgttcaatcccttttgtacacttgggtaagctagaatggaagatctcaatggtataattattacttgtgcatcagaaataatttataagattatttgatgtgatcatactgtctgtaagccttatctgggatccatctatgaccttcaggaaatcttcaaaattgtaagcaaaatgttttgtatatgtgcattagaggcaaaaaatttggaaatgtatttttttctagatatgagcatgaaataaattcagtcttgctgaatgaacaaagttgtttttctgtccatttatgatttaaaacattactcctagatgtctaaataaataaattacatcttagctcttccattatttgtgtgaccttgtttgaaaagtcatttacttcttctctttttttccccccaatagcctcttctttaaaataaggaattggcatagatcatctccaagttcccttccagttgagtgtggttttttgcaggataagactctaataaaatagtggggaaaatgaaatgtattttgttctggtcctcttcccattccattcactcccctacttaatggtaatctcctccctaaccctcactccagacatctggtaccatcctccctatcaagtccaactttgagaggatctagaaccaatcactgcaattgtgttgaaattttgatgcaacatggcagaaggaaatgaacaatagattagaagtcataagttatgagcttaaatttcaaggatcacttatgtttcctgtaaccttggacaactcatctacctctttgacctcagtttccccatctgtaagatgggcataaagatgactgtcctgcctatttacttcacagttgaatatagagttcagatgagataagagacagcattttatagccctgtgaatgtaagccatagatactaaattaagccaatgtgtttcccatattgcattttgggcttcattttctttggaaatctaagcattaactgagctggtgggagggtccttttaaggtcagggttctttgatgctgggagccacaccttagaggtggttaccaccccacctatgcagagggttgacctcattactaaatatggtaattgacccgtttataataggtgtaaacggcaagagttgtttttttttgtaaccaagcttccccaccacccactgccattctcatggaagttcaagcaactttcaattttcctgaagtcggctgtttcacaagattcacagattatctgtgggaaatcttttagctctcagtaccttgctcacaagcagcagataagtaccttctcacctccaatctcactcttcatgttgcctgttgttaagcaggagctgtgagggaaagaggtttgaggttagtgcttcctgtctccacacctttagctggtttagctgctaggaaaggctttgaaaagcaaagcactaaattcaccttcaaaacaacttgtcaattcagttagagaaatgtcagtcagaccaatcttttgataacgtaagcaaagaaaatggatgggttgacaatgtttcttttaacctagtaggtttgacctaggtagaccttacctgaacactcacaagaagtaaaatcaaatattcacagggaaagggctgggtctcctgatacccaagtagcctaagaagaatgccttccactcctagcatgaactggaaagcaaaaagaaatcaaacacaagttaggacgagggagctacatatttgggtttcttctgagtctagatatgtccttacatttgtaatatgtccttacattatttgaagtactgtggattttcagaaactcagagaccgaaaatacatatcaaagccaaatgtcatctgatattctgattatcagctactttgatttctccatgtttttacttcatagagcaaggggtgtgcatttttacacatgccccattttaaaagaaaataagagaaatcagaattattgtgtttactcaaagtcacaatgatcacacatattcagtatcacttagagtcactggttatctttttctagcaccaaaagtaaatttctctcatttactgtcttgcaaagcatatagagattttgaggtcctgtgagatagtttcctatttaggcttctctgaattattgacatgaaccaaggtgggaccaaatgctatgaggatataaatattgagaaacgagattttatcagccaaccttgaactcagcttgaactctaaactaggaggctgttagctacatgttaacacatagtaagcaaacgatttcaagcacagtatctgtgtttgagagccagctaatttaaaaatgatctatgttgacaaagaagagggaggaaagtaaacatgagcaataaattggatggcttttcctcaaatggccttatcgaaaacaaatagttttcaagctcttttccagcaaaatcttagcacttttctgcataaaagccttcagtagatcttcatcaccttcagaagagagcccaacctctctaatggagtgaactatgcttgctctgacaatcttgtcttttgtaactcatggcccagcaaaaagaaggtagctgtaattccccaagtcggccacactcttaccctcctcatctcccttgcccagactactctttttctctctttgtcttatcctccccacagtcccctaactcaccccagcccaaacacacactctcccacctcaccccagtccccaacacaaagacacgtcttagccaggctaacttttacttagtaaaagttggtcaaatccatgtatgcatactccttcaggactcaggtcagccgtcatctcctgagatccttagctggtttccctgttgcccccggaagttttgtgcagatcactgtgtcactatgtttaaagtagggtctatttatatctttcttccccatcagatcatgagctgccgtaggacgggaattgagtggcattcatttttgggaaatcaattcttctctcccatgtgcatcttaggaacatgtcacaccctgagttagacaggacatattcagcaaaccactggactctagatgccacagcttttcttccttcctctctctcccttccctctctccacctcactgtgtgtgctgggagagggagtcaaactggggagccatctggggtttctctccagcccacccacactccctttttttgtctccacaaagaagtcctattctcattcccatctttttctttaaatcagctcacaaaggcagatcaggaagaatttgaatgtgcattaaaacagaatccaaataattagcaatagaaacacaattcccagggcggtgagcaagcagaatacaaatgcctaacctgcactcactctctgaaaaggaggagagatgcaggcattgcttgctggagttggttgctcttccaattagaactgacctaatgactccttctaagtaaaaaaaggaaacaaacaaaataaatcaaaaacaaaaaaacaaattggatgtttgtattaagacaggtcgaactttttgattctttgcatgtttatttttcagtgcttttgcaaaatatttgtggaacaaataataagtgaagttaaagttgttgacacaggtttccaaaaaggatttaatgagatggtagtcaaacctagctgctgataacaacaatacagccgaatcaccatctttcactccacaattattttatgagagtctattagtcatactgtgttatgtaaagaagcataacatgtggtcctttctgtcaagagacttggaaaccaggggcctaagggaaatgcacatgaatccaaagctaagcaaattgaagcatgtgaaacaagagttgtttaaaaggtagaactcaaatgtcaagtgagcgatacagatagtaatcattttgagacctgagaagggagtggtgctctgtgccaaggagttagtagacaaggcatggaggtaggaatgctcacagtctgttcttgggatgttggcttaaatggtctaattaggagggcttcggtttgaggaaatgaggttggaaaaacctgtggaggccgatttgaggataagaagttagttttcctctgttaggccactggttctcaaatttgactgccatctagaattactagagaaacttaaaaaatatgaatggatgcctgggtcctatacctagagattctgatttaattggccttggaaaaccaaaggcttttagatttttccaggtgattctaaatatgttgtcaggtgaattccactaggccatagtggctttcaacccaattgaatattagaatcaagtgggggaacttttaagataatatgaaagacaatccacagaatgagagaaaacatttacaaatcacatatctgataagaaacttgtatcaaggctgaggcaggcagatcatctgaggtcaggagtttgagaccagcctggcccacatggagaaaccccatctctactaaaaatataaaaattagctgggggtggtggtggtcacctccaattccagctactcgggaggctgaggcaggaggattgcttgattctgggtggcagaggctgcagtgagccaagatcatgccactgcactccagcctgggtgacagagtgagactctgtaaaaataaaaaaaaaaaagtataaaaaatgcatacagaactccaataattcaataataaaaagataaatagcctaaccagttaataaatgggcaaatgatctgaatagagagttctctaaaaagaatagaccaatggctaataagcacatgaaaagatgcttagcatcattagttattagagaaatagcaaatcaaaccatgatgagatatcacttcacgtccaccaggatggctataatagaaaagatgaacaataacaagtgtcggcaagggtgaggataaattggagccctcattcactgctggtgagaatgtacaatggtgcagttgctttggcaacagtttgacgattcctcaaaaagttaaacatagagttaccatatgacccagcaattttactgctggcaaatacctaagagagttgaaaacatacgtccacacaaaaatctgtatgcaaatgctcatagtagcattattcataatagccaaaaagtgatgaatagaaaaacaaaatgtagtatagccatacaatggaatattatttggccatgaagagtgaagttctggtgcatgcaacaacatggatgaaacttgaaacatggatgaaacttgaaaacattatgctaagtgaaagaaacgagacacaaaaagccacatattgtatgattctacttataaaaaaagtccagaataggcaaattcatagggccaaagtagatcagtggtttccagggatttaagggagggaggaagcagggtgatggtaaatgggtatggtatttctttatggagtaatgaaaatgttctggaatcagatagtggtgattcattcataactttgtgaatatactaaaaaatctctgaattttacactttaaaacagcaaactttatagtacctgaattatatctcaataaagttattatctaaaataaagaaaaaaaacttagtatcaatccttccccccagcctagaccaattaaatcagaatttccggaagtgggaggacttgggcacagatattttttcattttaaagttcttgatataaagccagcaatgattttttaaaaataattttgtagagatgggttctttctatgttgcccaggctggtcttgaactcctgggctcaagcattcatcccgccttggcctcccaaagtgctaggatcacaaaggtgtgagccatcatccccagccagcattattgattatataggagacaaaaagctactattaatttagttctatgccatttccttcttaccaaaaccaaaacaaaacacctgtgtatatgaattcaaattcagttaaattgtaaatttcatttaaaaatgaatctgattttatttggctcttcagtgtgggtatacgggatgttgcttcaaataaacttaaaagaaatgcaagtaggtaaataattattaacataccccaaaacaagagcaaaaaaatgcttttgtttgcattgaaatttgaatcaaagacacaaagtggtttgttgttttagaaaaattcttgagggccaggcgcagtggctcacacctgtaatcccagcactatgggaggccgaggcggtggatcacctgaggttgggagttcgagacaagcctgaccaacatggagaaaccccgtctctactaaaaatagaaaattagccgggcatggtggtgcatacctgttaatcccagctactcgggaggctgaggcaggagaatcacctgaacccagagggtggaggttgcagtcagctgagatcgcaccattgcactccagcctgggcaacaagagcgaaactctgtctccagaaaaaaaaaaaaaagaaaaattttggaaggtgtcttggttgcaaagttgattctcagtttctcagtgcttcagtggtctatttctcaggtggtcatagccaacttgggttttagttctggctttgctcaccatttgtttggtgacttcagacaaaccagctaatgtttctaggccttatacaatcattagaaaagaaaaaaaaaaagaaataatattgtcctgtgccaacaatgaggataccatgggaaatgagatcaatgtgttctcttcacttatggagttgataaactagtttcaggttctttgcttttaaagattgaactaaatgctctccagattctttgatcttttattgggatagcagtaaaggtagatgatggaccagagagataactcccctctggagtctttcacctttcatgatataagggaatagatctatgaatttcttggggaggctattctctgaatttggtgcagaaaacacattaaagcaaactcttgggttatattttttcttatctcttcatcccactcttgcaatgggcaataaacaaagtaaaaatgtttcaaaatattttaattcctttacaaaaacctgtatcacaacttaaaaacaaatctatttgtaggttgggcttggtggctcatgcttgtaatcccagcactttgggaggccaaggtggtcagatcacttgaggccaggagtttgagaccaggctagccaacatggtgaaaccccgtctatactaaaaaaatagaaaaattagctgggcgtggtggtgcatacctgtaatcccagctacttaagagactgaggcaggagaattgtttgaactcggtgggtggaggttgcagtgagctgagattgcaccactgcacttcagcctgggcaacagagcaagactctgtctcaaaaacaaacaaacaaagaaacagatctatttttgtgtctgtgtcaggcactaaagccacctccaaatatatcactcagtcaggaaattggcccaatgcatgattaatattaatgtctcaggaatatagatttaaaaattgtgagtgcctagctgtggtgctcaatgctaacagaaagccatgtactgccttctgggtgaaaacatgctccattgttccattcaaaagaggatgaaaataatattgaaatgttaacttttgaactctcagtataattatcccctgaagaggtcctacatcttctgccaagagaaaacctttgctggagatctgttcatttagttaattaatatattttgctctcaggaagaaaaattatccttatattcttgttctaagcaaatgatttttttttcccccaggaaacaagattttggtgaagcagtcgcccatgcttgtagcgtacgacaatgcggtcaaccttagctgcaagtattcctacaatctcttctcaagggagttccgggcatcccttcacaaaggactggatagtgctgtggaagtctgtgttgtatatgggaattactcccagcagcttcaggtttactcaaaaacggggttcaactgtgatgggaaattgggcaatgaatcagtgacattctacctccagaatttgtatgttaaccaaacagatatttacttctgcaaaattgaagttatgtatcctcctccttacctagacaatgagaagagcaatggaaccattatccatgtgaaaggtaacatacaactttaccagtgtaccaccctaaagtaatggttttcaaatgcagtcctgaaaactgggttgtggtcagtggtggggttgaataaggcctaagtgatttgatactaacaaagacaaataatgttttcagaaaaatttttccctttactgtagaggagattcaaggttatattttgaatatctttattttcctttgctgacattgagcgggagagtaagtgatgaagttaccgcatgtgggaacagatcatttttctccattccagtggatcatggcagaaaagaggttaccattaaaatataagcccaggtgccctcaagtaacagctgggtctaatgggttaagactcaggaagactcacttctatttctaattaattctttttttgtgctccataatcttcctctgtaaaagtacctttccattttctttttccttccttccttctttccttccttccttccttccttccttttcttttctttttctttttctttttttttgagacggactctcgctctgtcgcccaggctggagtgcagtggcgggatctcagttcactgcaagctctgcctcccgggttcacgtcattctcctgcctcagcctcccgatcagctgggactacaggtgcccgccaccacgcctggcttattttttgtatatttatttatttatttattttaattaattaattttttttttgagagggagtcttgctctgtcgcccaggctggaatgcggtggcgcgatctcggctcactgcaagctccgcctcccaggttcatgccattctcctgcctcagcctcctgagtagctgggactacaggtacctgccaccatgcccggctaattttttgtatttttagtagacagggtttcaccttgttagccaggatggtctcgatttcctgacctcgtgacccgcccgtgttggcctcccaaagtgctgggattacaggcgtgagccaccgcgcccagccattttttgtacttttagtagagacggggtttcaccgtgttagcaaggatggtctcaatctcctgacctcgtgatctgcccacctgggcctcccaaagtgctgtgattacaggcataagccaccgcgcccagcccgtacctttccattttctaaaatatacaaagaatgctggactagaaaccgggggacataaaatttgctattaatcaactgtgtgatcttggataagtcacctaactttttcatagtcaaaaactcagtacaactgttaagcagtatttgtgaattagtgaaaataagtctactgaacttttgttgatgttatgttctgcctaaatgttagggagaaaaatcatgattccccaactcagaagaatacagtattggtagcaacaagtaaagtttgattttttggtatactttgtggatatatcatagcttttcatttttgtggaatgataataagaaacacatatgttcagttttgtactgaatcctagcataatgccaatgaatggtttttcttcaatgctggaacagagccatgctgatgaaaaataggatactaaataaggaaagaattgttaatgtggcagataagcttttgtgttctggcaaaatagagacaattaatgtgtgaatattttgtttgctgagtcctatttagatttctaatatctgtaatatccaaacagaatattttaattgtatcaagtcaaaggttaaaaaattatgctattttgcttgtagctaagagtgaaatattttttcctatatgaaaggcatgctactttaggatagtattttatatatatgtatacacacatatacacatatcatttatgttagaactgagaaggacaccaatgatcctgtacttagtaattttcaatcctatctgtatattataaatctgagtaggttttaaaagaaataccaatgcctagttccagccctgagattctgatgtaattgatatgggttgaggaaggggtgctggacatcagtatattttcaaactttctcagataatttattgtgcagctaggatggaaaatcaatggactagaggatttttggtatgctttctagttctaattttctccaattttgaatagaattctataggttccttctcatccccttttgattcctaaagatataaagtgatttgtttgtcattatataatctatgagacagggttggaactagaaatttatcctctgattagcagtccagtgttctgactgccatattaggctgatgattttcttaaggcttgaaaacatgcatattatttaacttattccaaggatgcagtttagggtctagattaactatcttctgatgggagaaagggataaagttaggttaaggccattggaagtcaccgttttgaatcacacagtagaatccacaaagtcaagtgaatacaagtctaccagtgtaccatcctaacgtaatggctttcaactgtggtcgtgaaaactgaccagatcatggtcagtggtggggttgggtaagtctcaaagaggaaatctattcactctaagctggtgatatgtttaatatttttatttctttcacatttttctctgatgttcacaaggaaggaaatgcactcaattgctattcctgtatcatttaatccactctattttgtttttcagggaaacacctttgtccaagtcccctatttcccggaccttctaagcccttttgggtgctggtggtggttggtggagtcctggcttgctatagcttgctagtaacagtggcctttattattttctgggtaagagaagcagcactgcttttatgtaacttttccactgcacatgaaatctgaacacattcaagaattttgcctatgtggtttattttctgtttaatataggatgatgattttcttttccccatgcttgagtaggttctcttttagcttgttcaactctatctgagataaaaatctgatatgagttagatttcccagaaggcattgagtaggtggtgaggcaaaataagaagctaaatgggtaaattagggtggagggattaggagcagttgcctttcttctccccattttgcaatataattatgacacataaaacagttttaatgcgtatatatgtataaacacctaggcaacttgggaagctaggcaactgaagccaatggacaatgttggcttgatcaaaaatcatgagaaacttggctactgaaattgtgtattcaaacctagcaaagaaactagatctgtttatctgagtcatatttttttttctcctctgaagcagttgaattgtgtgaggccaagtatggtgctgtcattatgaaactataatgggagttagaattttctgagctctcaccactgaattgaagtactaacttttgcaaatgtttacgtaataaatgtggtgtatttttctttaccttcctcaacattgaatttttggcctgggtttgaacacattttgatgaacgcacctacagttaagaacgtacccctgagtgacccttgttcttactcagaaacttcttaggtacatagtatggtacagaatgtattgactccatgttgtctttgaatttttttctagaagttacatgcatggatgagtcatttcttcaatgagaaatgtattctcaaacataaaagactatttctcttgatagtctccaaaagactatttctcttgatattctccatttgatattaagtacatttggtgcttaatgaatgcttattggattgatgaattgataacctccagagaggtcaaattaaggatttaaatgagtctgcctgaagtatgatactcatctttaaggcataatctgtatatgtacctaattcatagatgggtcagtgatttctgaaagccatatcatgtgaagtcattctgtttactgtcagcttggtgactgcgggtacagacctggatccacagccatgccttcctattatccagtcttagattcttttagactcttcttggcctattgccaaagcttacctttcagttgttccccacatgctccttgcagttcagaagaccctagggctcagatggacatttgtcaggctgcctgttgcttactctgtacttgccgcagggtaggaaacaaagtggttgcttgttcctggaaattctttatactaggtatcatcttaagaatttgcctggcttgccttctgcaagttgcccaaccctgaaggtggggctttggtattgtaaaatgttgcctgaattctgcctctgatgttagttgactactttcacctttccagatcttggtatcttcatccaacttaccttctaactttgatcctctggtgtttgctgataattttcgagtttttagaattcttagttcttgtttcttcttaatctctggccattggcttttatgcctaccatatggcttttcaatcctcttattgggaatctcaactttctaacttaaaggccaggtgcagtggccctttggatacccctccaggaaaggcattcccctgtgatatgctgacctaggtcaaagtaatttactagctctgcagaaagtagttttgggaattactttaaccttcaatggccagaggacactgctcattattgaaaacttattataaatattcattagaatgtcagttactataatgagacatcaatttgttgagtgacttgagtcacccaaagggacaaaagcagcttctcactttcaatgaatttaaaccgttcactttcaactcagacacatcatagacacactgggtttttccttggcagtactactaattcctagtgagattcatcttgctttgttttaaaaaaattttatttttgttttactttgtcttacagaccccctgtgaattgggcagtcctgtcatttgtggcctcttgtagtcaattcggttacccaataaaaactaccacttatctgcatctcaaacctgggtctttgtactctcttaccaaaagagtataaatacaagtttgtctatatttcgtagaataacatagtatttttactctgggctcatcttttcctgctgttggtatttaagcaacaagtaccttgctgagttgggcatctaggccattatggatccctggagtttagctgtttcctgggtaattttctgagatcctatttttggctggtctgcagcgtgccttgatgtaagttgctgttttccggaacttcctgagggcctgatatgctactgtaggcagttctgggttgagtgggtttctaggctgagcgggtttctgggagcagctgcagattctatctcagttcttgacctgatgttgacatttgagtaaataaagagctccctttggtcaagctgtcacaggccagcacctgtcactgtctttcaattctccattcatgcagctgtgctggtaaagctgcccgttttcctaaagaaatctttttaaaaaacattatgttccccactgcagatcataatgtgaggaatgtagatagtgtgtgtacaggtagtgtctgctttttataataatccagtagattcttgaagaccacgtacttaagtagattaccttgcatatgccctgtgtattgctgctgttcccaggaaacaagtgggtaaggctggcatggggagaagggcaaaggaggaatggtccagaaattacatatcattagctgacattcactgttgaaggggtggagatgacacagacacatagggtaggtacttcctgcacacatatgcacacatactcaatgcacatgggtgctgtaggttctgcgtggtgtttgttcccagccatgcatctgtcattttcatcccactgctgtgtttagagttagggtgataataagtaagtctgccatctgacaatcacttgaggataagcatgggagctgactgcaacagacctttcattattttatgtgcaatgtaaagaacctgagaatcaagacacctttattgctgtggcctctctaccagctatgatttggtttgggtgtccggaggcagaggctgacacttggaggtttggcaaagggagtcctcagggttggagtaagtactaaaaatgcttcccaggttatcagctgttttctacactcatctggggacagacatttcctcggcctcacccctgccctgctgtgatcttgtgctcaagacagctctagtctttcatttacagaaaggatgtagaaccaaaacaattcttcattgcattgtaggatgtttagcagcatctctgacctctacccagtagatgccagtagcatccctccccgttgtgatgatccaaaatgtttttagacttcactaaatgtctcctgggacagggattaagggagcttgaggtgtcaaggatgaggttaggaggtctgtcttgggcagctgtatatatggtagtgtcattcactcagatgagaaacactggtaaaaaaaaaacagcatttgggggaaatcttgagttttattttagacatgttgagtttagagtggctttgaggtttagtccagagatataaatttgggtgagtaggtggtaattgaagctgtgaatgtggataagattgcctagggaaagaggatagagaagaaggcctaggaccaagcagtgagaaattctaacggctggttagagaaggatgagcttgcaaaggaggcagggaaggagtgacaagacaggtaggataaaaactgggatgtcatagatggcaaagagaaatagtatcacaaaaagaagagagttatcaatagtatagaatactgctgagagttgaagaagatgaggacttaaaacatgttagctgtgtttagtaacatggaagtcagcgtttttcaaacctttctttagcacttactcatgcccctttgacaaggaaggtgtgaagtgctcaggcaggagtgtatggaaacaaaaccagggctgaaatcattcacttatttattcattcaggtatcatgtcattcatgtacagcattatctacttaggtatcagcctgtgtgccaggaactaggcacttttttcataatagagaattctgaatccagaaatctgatggctttctgtttttagatgttttctgggtcatttgttaagaaatgtagaattttactatcacattgattcagaaatgatgttcctaacccttagtcaaaaattttgctaagattcatggtgggtgaaactattgcccttacttccctcacttctggtggaaattcatcctgatggagccaagcctatgaaagagagatgagtgtagaaatacatacccataaagacataggaatgtactagttgtctagaactgtaaattgccattagtttggactccacctttacaaatttgtgattattacagactctggaggagttgaaagtcctcttcggttaattatggaaaaacagcttgttaagcaaatgctaatgtaagaagatcacaatgtgggtaggcttaacctagtcaaaggaggaagggccttcaagtgtatttacatatcaacagtggatatgttaattagtgtgcatttttaattcaggtcagatgacagcattgagagtaacagggatgcatttctctaaaatactttctttgagatttttcaagttcaatgtgaagagtcagtagttgggtgtgattagtcattacccaagtccaaggtgctcaaaaaaggttagtgttttagtgtctctgtcatttgacagttaatattatgaatagttgtgcccacagtcttagaactccttccatgacattgtccctccatactgacacttctctttcctgcaggtgaggagtaagaggagcaggctcctgcacagtgactacatgaacatgactccccgccgccccgggcccacccgcaagcattaccagccctatgccccaccacgcgacttcgcagcctatcgctcctgacacggacgcctatccagaagccagccggctggcagcccccatctgctcaatatcactgctctggataggaaatgaccgccatctccagccggccacctcaggcccctgttgggccaccaatgccaatttttctcgagtgactagaccaaatatcaagatcattttgagactctgaaatgaagtaaaagagatttcctgtgacaggccaagtcttacagtgccatggcccacattccaacttaccatgtacttagtgacttgactgagaagttagggtagaaaacaaaaagggagtggattctgggagcctcttccctttctcactcacctgcacatctcagtcaagcaaagtgtggtatccacagacattttagttgcagaagaaaggctaggaaatcattccttttggttaaatgggtgtttaatcttttggttagtgggttaaacggggtaagttagagtagggggagggataggaagacatatttaaaaaccattaaaacactgtctcccactcatgaaatgagccacgtagttcctatttaatgctgttttcctttagtttagaaatacatagacattgtcttttatgaattctgatcatatttagtcattttgaccaaatgagggatttggtcaaatgagggattccctcaaagcaatatcaggtaaaccaagttgctttcctcactccctgtcatgagacttcagtgttaatgttcacaatatactttcgaaagaataaaatagttctcctacatgaagaaagaatatgtcaggaaataaggtcactttatgtcaaaattatttgagtactatgggacctggcgcagtggctcatgcttgtaatcccagcactttgggaggccgaggtgggcagatcacttgagatcaggaccagcctggtcaagatggtgaaactccgtctgtactaaaaatacaaaatttagcttggcctggtggcaggcacctgtaatcccagctgcccaggaggctgaggcatgagaatcgcttgaacctggcaggcggaggttgcagtgagccgagatagtgccacagctctccagcctgggcgacagagtgagactccatctcaaacaacaacaacaacaacaacaacaacaacaaaccacaaaattatttgagtactgtgaaggattatttgtctaacagttcattccaatcagaccaggtaggagctttcctgtttcatatgtttcagggttgcacagttggtctctttaatgtcggtgtggagatccaaagtgggttgtggaaagagcgtccataggagaagtgagaatactgtgaaaaagggatgttagcattcattagagtatgaggatgagtcccaagaaggttctttggaaggaggacgaatagaatggagtaatgaaattcttgccatgtgctgaggagatagccagcattaggtgacaatcttccagaagtggtcaggcagaaggtgccctggtgagagctcctttacagggactttatgtggtttagggctcagagctccaaaactctgggctcagctgctcctgtaccttggaggtccattcacatgggaaagtattttggaatgtgtcttttgaagagagcatcagagttcttaagggactgggtaaggcctgaccctgaaatgaccatggatatttttctacctacagtttgagtcaactagaatatgcctggggaccttgaagaatggcccttcagtggccctcaccatttgttcatgcttcagttaattcaggtgttgaaggagcttaggttttagaggcacgtagacttggttcaagtctcgttagtagttgaatagcctcaggcaagtcactgcccacctaagatgatggttcttcaactataaaatggagataatggttacaaatgtctcttcctatagtataatctccataagggcatggcccaagtctgtctttgactctgcctatccctgacatttagtagcatgcccgacatacaatgttagctattggtattattgccatatagataaattatgtataaaaattaaactgggcaatagcctaagaaggggggaatattgtaacacaaatttaaacccactacgcagggatgaggtgctataatatgaggaccttttaacttccatcattttcctgtttcttgaaatagtttatcttgtaatgaaatataaggcacctcccacttttatgtatagaaagaggtcttttaatttttttttaatgtgagaaggaagggaggagtaggaatcttgagattccagatcgaaaatactgtactttggttgatttttaagtgggcttccattccatggatttaatcagtcccaagaagatcaaactcagcagtacttgggtgctgaagaactgttggatttaccctggcacgtgtgccacttgccagcttcttgggcacacagagttcttcaatccaagttatcagattgtatttgaaaatgacagagctggagagttttttgaaatggcagtggcaaataaataaatacttttttttaaatggaaagacttgatctatggtaataaatgattttgttttctgactggaaaaataggcctactaaagatgaatcacacttgagatgtttcttactcactctgcacagaaacaaagaagaaatgttatacagggaagtccgttttcactattagtatgaaccaagaaatggttcaaaaacagtggtaggagcaatgctttcatagtttcagatatggtagttatgaagaaaacaatgtcatttgctgctattattgtaagagtcttataattaatggtactcctataatttttgattgtgagctcacctatttgggttaagcatgccaatttaaagagaccaagtgtatgtacattatgttctacatattcagtgataaaattactaaactactatatgtctgctttaaatttgtactttaatattgtcttttggtattaagaaagatatgctttcagaatagatatgcttcgctttggcaaggaatttggatagaacttgctatttaaaagaggtgtggggtaaatccttgtataaatctccagtttagccttttttgaaaaagctagactttcaaatactaatttcacttcaagcagggtacgtttctggtttgtttgcttgacttcagtcacaatttcttatcagaccaatggctgacctctttgagatgtcaggctaggcttacctatgtgttctgtgtcatgtgaatgctgagaagtttgacagagatccaacttcagccttgaccccatcagtccctcgggttaactaactgagccaccggtcctcatggctattttaatgagggtattgatggttaaatgcatgtctgatcccttatcccagccatttgcactgccagctgggaactataccagacctggatactgatcccaaagtgttaaattcaactacatgctggagattagagatggtgccaataaaggacccagaaccaggatcttgattgctatagacttattaataatccaggtcaaagagagtgacacacactctctcaagacctggggtgagggagtctgtgttatctgcaaggccatttgaggctcagaaagtctctctttcctatagatatatgcatactttctgacatataggaatgtatcaggaatactcaaccatcacaggcatgttcctacctcagggcctttacatgtcctgtttactctgtctagaatgtccttctgtagatgacctggcttgcctcgtcacccttcaggtccttgctcaagtgtcatcttctcccctagttaaactaccccacaccctgtctgctttccttgcttatttttctccatagcattttaccatctcttacattagacatttttcttatttatttgtagtttataagcttcatgaggcaagtaactttgctttgtttcttgctgtatctccagtgcccagagcagtgcctggtatataataaatatttattgactgagtgaatgagttttacatggccttatgaattaacggtgagtctaaatgttataatcatactttgagagggagaaagccagttctattttctactttcctcttaagaagttcaaaaattcattttattaaaaaaacaggaggtaaaatatatacacagccaaatctagtgaaagaaaatctgatgaatataagttcatttacgttttagaaatttttgtgcagtgaggaaaaccagtactgttagaaaagtcatgccaactcagccactgtcaggagtaagttgattttccattgaagtccccaaattccctcttaatggagtattggctatatcttaaacatatctttagtttaagacttctgaaaatgttgtctttgtctaaaatgttaaaatcccatcctactactgacctgctactcttttttctggggtgattttacccccaacaaattctataaatgccttctctggctctgattcaaaaagtgctcacaaatggaaatgctggggacagaaaatttcaacttcttcacctgtcatactcatatcatagctgaacactctaatagcacacacacacacacacacacacacacacagacacacacacacacacacacacccctatcatcttctgggtaggggaagggaaaggcgcttgaacaacagacacaagagctggtctaataattcatgtagcaccttctgtttccttcgttgaaattttactctgaaggtgactcagagtcaattaaattggtgtgcaatgagttcatctctaaactgattcttttctttggtgaaatgaagcttattaaacttaataaaggtaattaaacttgaaaaagatgagcttatatgtctcttactactccaagaaagactgaactcagctggttactcatggatagttcaataagacaaatcaaatcaattggaaaggaacgagatgggtaaaaaaaaaaaagccgttaaatgaatctgctcaataagcactcctttaccatgctaataaaaataatgtaacccagttctgtaaaaaggttctagtactttgaaactcaagttcaaaacaaaataaaatgcaaacttcgcttcacctaacacctcccacaacattctagctacccaactgggtgaatattgtaattgcccacaaccccgaattcactttttccctccagtatgataaaacagattgattcccttttaaagcaataccctttcttctctcccatcttgtcggtatcagagataatggataggtgagaaaaaattaaagaagcttctggattcattgtaatggggacctaaccatcacactatgcagcagcaaatgggatggtctggaaagcagaccagaaccttgtctggtaactttgcttctaatgtctgtctgtgtttcctaaactgaggcctaactcttgactttttgacagtggtgctcataagaaagtttggggctgggcacggtcactcatgcctgtaatgtcagcactttgggaggctaatgcaggaggatcacttgagtctaggagttcaagaccagcttgaacaacatagggagaccctgtctgtattaaaaaaaaaaattagccagacgtgatggtgcaggcctgtagtcccagctacttaggaggctgaggctgcagtgatctgggatcataccccttcaagaacacatgtgaatggtggggcctctcagctttctctgatttggcaacccagaagaaatatgtgctttctctttgaagattcacaggatcctagcacttggaaacctaggccactgtccagagcagaaggtcacacaatttctcagtgtgacttttgttcatttcagggtgttgacactgggcccaacacttgaaaattgcttgagatgataaattgcttgaggtgatcaaagaatatatcagctcttcaaagctgacctcattcttggtgcaactctcagggccagaatgtgtgcttcccgaagctcattttcctatctgatttgcctgttgaaactctgtgaaagacccttgaatgctaggaatttgaagggacaaaaagttgaagaaaggtgaatggatttcagggtggaagtggactggattttactctcacttcatcaggcagagctatctcagtgataaattgaaactctcctctggctccaaagaacaaatcatgagctgggtggaaatgtcagttgagaagaagagcagcaaacagctttgttttcctatagttgtggttttacatggtgatgatgacacacgaagatgaaaatgtgcagcatgaactccagttgttatctgagtgagcatctctgccaacactgaaggatatgtgtgggtgtcacctgaaaacaaagagaaagacagagagagaaaaagaagaaaaggaggccctgtttcggaaagaagagccagttaatcaaagatcagcagtgacaagtggcgctgtttatttcatgagctttatatgtgatttccttccccttgctaatctcgtctgaatttattctctggactaaatatatttgcatctggtgactgaggaaggggtggaaaaggtgaccttgaatgggcatcagggtagttaccatagttatttagtcatttcttcagtctcttgggcacacacttagcttcccaaatggaggtttctgctaacttttgagaacctgtgacatattacacagggaagacaaacttcaggtggttgttggggaccctcttttatccccaaccctatgcaatgcttgtttcatttgctttatgtttctccttcctctcttctacttcattcattctagaactagttaatgggcacctgcccagcactaagatgtgggctaggtacagggatgtggcagtgtgcagcacagatattacctccacacttccgaagtgtagagtgtctgctttgtatattacttcagttttttttttcttttcctgccccctatatcctgcttctaggggtaaccacttagtcttgattttggggcttagatcttaatgtggctacttgatagcctttgttggtttgcctgaaattcatttctttgacatgttcctatttaacatctctaactctttcaatgtcatagatcaggaatcagcaaatttttttctgttaagggccagatagtaaatattttaggctttgtgactatactgtctcttatagataataagttttgccactgtagtgtgaaagcagccataaacaatatataaacaaataagcatggctgcattccaataaacctttatttatggatattgatatgtgaagttcgtgtgattttcatgtcatgcaatattacttttcctttgtttttttcccccaaccatttatagatggaaaatccatttttagttcatgggctgtacaaaggcaggtagtgggctggacatggcttatgggctacggtttgctgatccttgacttagatctaagctgcaaccttagctataggcttatttttgagttccagccaccttctacatttttagggccagaaggaattggtttgaatgtgtgtaaaggcttcttgggagtgctgagagtcaagcatctcttttgaaagaaggacatggatcaataaagaagaaggaagagctttcatctaaggaaagccatttgaggtagaagaaatgggaagttataagcaaagggaatgagaagctgtttcaggaagacagagtcttctgtatattattattattaattttgacagagtcttgctctgtcacccaggctggagtacagtagcatgatctcagctcactacatcctctgcctctcggggtcaagcgattctcatgcctcagtctcctcagtagctgggatgataggcacacgccaccactcccggctaatttttttattttttatttttatttttagtagagatggggtttcaccatgttggccaggctggtctcgaacgcctggcctcaagtgatccacccaccacggcctcccaaagtgttgggattacaggcatgagccactgtgcctggcctatattattgatgaaagcctaaacatcttgggagctcttgttactcttttctcaagtcctttctactcttttccctcttttctaggcatcacatccttgtaatctccaaggaaacaaatttctttctttcttttttttttttttgagatggagtctcgatctatcgcccaggctggagtgcagtggcactatctccgctcactgcaagctctgcctcctggttcatgccattctcctgcctcagcctcccgagtagatgggactacaggcatccgccacccaccaccacgcctggctaattttttgtatttttagtagagacagggtttcaccatgttagccaggatggtctcgatctcctgacctcgtgatccgcccaccttggcctcccaaagtgctgggattataggcatgagccaccgcgcccggccaggaaacaaatgcacagaaggaagggggcagaaaatggtctgtgtccaatgtgatgaacaggcttgacttccctgctaattcttccctaagtagtacatccaaatccaactctgggtgggtagagatcagaagcagctgtctcagaattggcctcctactttctacctatctcatgtttccagtctgcatttggctgccatttatgagtggccaagagtaacccctcatgaatctacattaaggctcagcatttcacaagtagctgatgaaatcagtattactcagatcagaaaggcaccgacctaacccttaccatcccttgcccccattcctcactccagtcttgttatacccaaggtacaaatcgttcctggaagcagcccagcatatgggggcaccctaagccacacacccagtcacaccatctgggcaatttaaaaatagggccaaatggagcatttagactggtctgtccagccaagatcaggaaattgcctctaaaaggtcagatgattaagattattgtaccaacagtctaggatgtcagtaatgaaaaaaagcttctggcagaatgaattttcctgactttacacatggtgttccagttctgagttggggtgaacagctttgggaaatcccaagatttttctactccagaaaatagtgctactatgtacatttatgcactgtgtgccttgcacaaaggcccctagtgaagggaatgaagagggctgaaatctagtcaagctccccttatcaagctctgcacctgcttaatgaaggagagggcgccttctctaatgcccgcatgtatgggctattgaggccctgatagaatgctagcctttctgccatttggttactgagctttatagaaattatatccccattctcaaagcaggaattttctaggatgagtaatagttaaaacaaaataaaactacccctcccccacaaaatggaatggttctaaatatcacaaaaatttatctcctcggtcccttctttagtcttcccttcaccttagctctgcatgttttaatttagttggttggtttttcttgacttacactgggtgggtatgtctttggagagtaatgagagaagaaacttcctagttcgtgtcctagtttggctcttagaagaaaaacaaaaaatgtttttgtgacctgaggaatactaggtaatatagcttggatatttgtcctctccaaatctcattttgaaatttgatccccagtgttggagatggggtctagtgggaggtgtttgggtcttaggggcggatccctcatgaatggcttggtgccattcgtatgggattgagttcttgctcttagttttggggagatctggttgtcaaaaagagtctggcatcctattcagtgcctcccttctcccctgcctatttctctctctttctcactctttctctctctctatctctcacttcctgccatgtgatctttacataccagctccccttcccccttctgccatgactggaagcttcctgaagtccctgctagaagcagaatagagtgctatacttcttgtacagcctgcagaactatgttccaaataaacctctttttgttataaattacccagcctcaggtattcctttatagcaatgcaaatggactaagacactgggtttggggttagttttggggatgtacctagaactcttcagttaatgtagtctactcttatttcttagttatcagtacatgaggggaccagactaaataacctcagagctcattcctataattgttttcatactccatattataactctcctagaattatcttcccatcatgaataccattgttttgggtttctccactatcacatttctaagtcttacagatataaatattttatgtttgagatttgtcaaccaggattgtttgaataaatgtataattctctacaactgttaagtttactaatttatcaaaattgtttccatcactttttctggagaaaataatgaattctaaagtttagtttaaagttaaaataatgaattttaaagtttaatgaagtttaaggtttaaaaaatgatgtaatagtttactatgtaaatactatgtaaactattacatcattttttaaagcttgtcattttccaaataaacttcttatacattattgaagtcttcatagtgaactacatcttgcatgtgatgggtgctcagaatatcttaatgagtgaatcaatggatggatggataaatgaatgactatctttcatttgataaatatccgcaagctattttggtttttgacaaattagatgaaacaggtattatgaaaagacttgggaaaattgaggacaaattagttaactagatactatgaaaagacttgggaaattcatatttttaaaattattgaaatgtattaattaatatgcattttaagacattgtttaggcattcagaagcaaaaactgtttatccttccttggcaacaaacagaactctaattgtgttcagttatctactctccatgtgctctggggagttccagggagtggataaggattagtttaagccagaatggtagtcctaaccttctcatcagtgattggtttaggcatggacacatgataaaattctgaccaatagcctgacgggtctctgataaagtttctttttgctcttttttttattttgagacagtctcactctgttgcccaggctggagtgcagtggtgccatcttggctaactgcaacctcactgcaacctccagcttcctgggttcaagcaattcttgtgcctcagtctcctgagtagctgggactacaggcatgtaccaccatgcctggctaatttttgtatttttagtagagacaggatttcaccatgttcgccaggctggtcccgaactcctgacctcaagtgatctacttgcctcggcctccaaagtgctgggattacaggtgtgagccaccgtgctcagcctctccttgctctttaaaaagagatgtttggaaacaaagtttcctttctgctatagaatgttatgtctgcaagcagcatctgatatagcctctttgcgaccaggggaggaattggcctgagaacatgctaaggcaggaagagcagaaagaggggaggaacctggatcttggtgacattattgagctgcagattgagccgacttgaattctccttgcttccttccttccttccttccttccttccttcctcccttccttccttccagttcttgtcatgtgagacagtaaataactttattgtttaagcccttttgggttagattttctattacatgaagtttaaagcattctgataacttcatgtttattgatgtgtataaatactaatatattctattatttgggggatacaaagaatttgactcaatagtatcttgttctattgacatgttcaattattaatcactgataaccctgaataactaaatgttattaccacatttaggacaatatccacgtccactgacatatgaaatttgggcaatttgcttctttgggaagcattataaatcacagaacagcagaggatacaaagacccccacaagagatcatcaagattttcttcttcccttctttttgtcatacacattgctgagaaggagcacctccaggaaggaaccaaattatttgtatttttctgttatttttagttttgagacccggtctcactctgtcacccaggccagagtgcagtggtacagtggctcactgcaacctctgcctcccaggttcaagcaattctcctgcatcagcctcccaagtagctgggattacaggtgcccaccagcacgcccagctaatttttgtatgttttcagtagagatggggtttcatcatgtggccgggctggtctcgaactcctgacctcaagtgatctgcccgcctcagccttccaaagtgctgagtttacaggcatgagccaccaagtccagccagtatttgtattttgaattaaagtatgtatgtgaaaaatgagaacactggctcacttcctggtaatataaaatacaacatatcagtaaaatcttccatgattctcctagttcagtgatctctttctacccctgtgttacctaatgctggcctaaactccagcggcctgtagaggagattggtttttgtagttgtaaaataatattttaggctgggtgtggtgcctcatgcctgtaatcccagtactttgggaggctgaggcgggcagatcacgaggtcaggagatggaggccaacatggtgaaaccctgtctctactaaaaatacaaaaattagctgggcgtgatggtgcgtgcctgtaatcccagctacttgggaggctgaggcaggagaatcgcttgaacctgggaggcggaggttgcagtgagccgagatggcgccactgcactccagcctgggcaacagagcgagactctgtctcaaaaaaaaaaaagtcacgt

SEQ ID NO: 1538 - DNA, 3804 bp, Homo sapiens
taaagtcatcaaaacaacgttatatcctgtgtgaaatgctgcagtcaggatgccttgtggtttgagtgccttgatcatgtgccctaaggggatggtggcggtggtggtggccgtggatgacggagactctcaggccttggcaggtgcgtctttcagttcccctcacacttcgggttcctcggggaggaggggctggaaccctagcccatcgtcaggacaaagatgctcaggctgctcttggctctcaacttattcccttcaattcaagtaacaggaaacaagattttggtgaagcagtcgcccatgcttgtagcgtacgacaatgcggtcaaccttagctgcaagtattcctacaatctcttctcaagggagttccgggcatcccttcacaaaggactggatagtgctgtggaagtctgtgttgtatatgggaattactcccagcagcttcaggtttactcaaaaacggggttcaactgtgatgggaaattgggcaatgaatcagtgacattctacctccagaatttgtatgttaaccaaacagatatttacttctgcaaaattgaagttatgtatcctcctccttacctagacaatgagaagagcaatggaaccattatccatgtgaaagggaaacacctttgtccaagtcccctatttcccggaccttctaagcccttttgggtgctggtggtggttggtggagtcctggcttgctatagcttgctagtaacagtggcctttattattttctgggtgaggagtaagaggagcaggctcctgcacagtgactacatgaacatgactccccgccgccccgggcccacccgcaagcattaccagccctatgccccaccacgcgacttcgcagcctatcgctcctgacacggacgcctatccagaagccagccggctggcagcccccatctgctcaatatcactgctctggataggaaatgaccgccatctccagccggccacctcaggcccctgttgggccaccaatgccaatttttctcgagtgactagaccaaatatcaagatcattttgagactctgaaatgaagtaaaagagatttcctgtgacaggccaagtcttacagtgccatggcccacattccaacttaccatgtacttagtgacttgactgagaagttagggtagaaaacaaaaagggagtggattctgggagcctcttccctttctcactcacctgcacatctcagtcaagcaaagtgtggtatccacagacattttagttgcagaagaaaggctaggaaatcattccttttggttaaatgggtgtttaatcttttggttagtgggttaaacggggtaagttagagtagggggagggataggaagacatatttaaaaaccattaaaacactgtctcccactcatgaaatgagccacgtagttcctatttaatgctgttttcctttagtttagaaatacatagacattgtcttttatgaattctgatcatatttagtcattttgaccaaatgagggatttggtcaaatgagggattccctcaaagcaatatcaggtaaaccaagttgctttcctcactccctgtcatgagacttcagtgttaatgttcacaatatactttcgaaagaataaaatagttctcctacatgaagaaagaatatgtcaggaaataaggtcactttatgtcaaaattatttgagtactatgggacctggcgcagtggctcatgcttgtaatcccagcactttgggaggccgaggtgggcagatcacttgagatcaggaccagcctggtcaagatggtgaaactccgtctgtactaaaaatacaaaatttagcttggcctggtggcaggcacctgtaatcccagctgcccaggaggctgaggcatgagaatcgcttgaacctggcaggcggaggttgcagtgagccgagatagtgccacagctctccagcctgggcgacagagtgagactccatctcaaacaacaacaacaacaacaacaacaacaacaaaccacaaaattatttgagtactgtgaaggattatttgtctaacagttcattccaatcagaccaggtaggagctttcctgtttcatatgtttcagggttgcacagttggtctctttaatgtcggtgtggagatccaaagtgggttgtggaaagagcgtccataggagaagtgagaatactgtgaaaagggatgttagcattcattagagtatgaggatgagtcccaagaaggttctttggaaggaggacgaatagaatggagtaatgaaattcttgccatgtgctgaggagatagccagcattaggtgacaatcttccagaagtggtcaggcagaaggtgccctggtgagagctcctttacagggactttatgtggtttagggctcagagctccaaaactctgggctcagctgctcctgtaccttggaggtccattcacatgggaaagtattttggaatgtgtcttttgaagagagcatcagagttcttaagggactgggtaaggcctgaccctgaaatgaccatggatatttttctacctacagtttgagtcaactagaatatgcctggggaccttgaagaatgcccttcagtggccctcaccatttgttcatgcttcagttaattcaggtgttgaaggagcttaggttttagaggcacgtagacttggttcaagtctcgttagtagttgaatagcctcaggcaagtcactgcccacctaagatgatggttcttcaactataaatggagataatggttacaaatgtctcttcctatagtataatctccataagggcatggcccaagtctgtctttgactctgcctatccctgacgtttagtagcatgcccgacatacaatgttagctattggtattattgccatatagataaattatgtataaaaattaaactgggcaatagcctaagaaggggggaatattgtaacacaaatttaaacccactacgcagggatgaggtgctataatatgaggaccttttaacttccatcattttcctgtttcttgaaatagtttatcttgtaatgaaatataaggcacctcccacttttatgtatagaaagaggtcttttaatttttttttaatgtgagaaggaagggaggagtaggaatcttgagattccatatcgaaaatactgtactttggttgatttttaagtgggcttccattccatggatttaatcagtcccaagaagatcaaactcagcagtacttgggtgctgaagaactgttggatttaccctggcacgtgtgccacttgcccagcttcttgggcacacagagttcttcaatccaagttatcagattgtatttgaaaatgacagagctggagagttttttgaaatggcagtggcaaataaataaatacttttttttaaatggaaagacttgatctatggtaataaatgattttgttttctgactggaaaaataggcctactaaagatgaatcacacttgagatgtttcttactcactctgcacagaaacaaagaagaaatgttatacagggaagtccgttttcactattagtatgaaccaagaaatggttcaaaaacagtggtaggagcaatgctttcatagtttcagatatggtagttatgaagaaaacaatgtcatttgctgctattattgtaagagtcttataattaatggtactcctataatttttgattgtgagctcacctatttgggttaagcatgccaatttaaagagaccaagtgtatgtacattatgttctacatattcagtgataaaattactaaactact

SEQ ID NO: 1539 - DNA, 663 bp, Homo sapiens
atgctcaggctgctcttggctctcaacttattcccttcaattcaagtaacaggaaacaagattttggtgaagcagtcgcccatgcttgtagcgtacgacaatgcggtcaaccttagctgcaagtattcctacaatctcttctcaagggagttccgggcatcccttcacaaaggactggatagtgctgtggaagtctgtgttgtatatgggaattactcccagcagcttcaggtttactcaaaaacggggttcaactgtgatgggaaattgggcaatgaatcagtgacattctacctccagaatttgtatgttaaccaaacagatatttacttctgcaaaattgaagttatgtatcctcctccttacctagacaatgagaagagcaatggaaccattatccatgtgaaagggaaacacctttgtccaagtcccctatttcccggaccttctaagcccttttgggtgctggtggtggttggtggagtcctggcttgctatagcttgctagtaacagtggcctttattattttctgggtgaggagtaagaggagcaggctcctgcacagtgactacatgaacatgactccccgccgccccgggcccacccgcaagcattaccagccctatgccccaccacgcgacttcgcagcctatcgctcctga

SEQ ID NO: 1540 - DNA, 50295 bp, Mus musculus
  misc_feature (15336)..(15740): n = a, g, c, or t.
  misc_feature (47723)..(47935): n = a, g, c, or t.
gctacttaagagggccctgcttaggtgtctttccgagagccatgtgtctggtttttctgaggaagacaagtctactgagaactgaagtcgggtcctactgtggtttcacagggttagagctgataaaacaaaaccctgggttacagcccagtaactcagtactacccggtactcagtactacccggtactcagtactacccggtactcaggggttaagatcgtttttattgaaagtgaagttcatagtcttgtttgtgagattcccagaaatgtggggttcacttctgggaacagagtctagccatactcaaagggtgtacacgctcaggcccgaagctcggctcattgctaattctgcattcttattcaaaaatatctctctataaaaggaatgtggtttccttgttaaaaccgtcaatgcaatggtgttaatttcccagaaattttggaccggagacttcagactccagagggagggctccctctccttccaatgtctcttcaaccgtgtggctttttatactgcctgtcctatcccaggacctcctggctggggagcccacagcatctgctcactgtatggagagcagggctgtaactgcccaccagtagggtgctcaggtgttcatgggatacgccctgcatacatatgggtgccttaccaggtgtccaagagagatggtgaggtttgagagccactctgagacaaaggacagatagagatggtcacagatctggactggctccagatgccatgcacaccccccacgaggcagcatgagggtgtgagacaccacacctcatcttagagatcacagggattggagcccaggcaggcaaactcaggtctgtggtccaaccctgacatatcttttggaatcagagtcacccatggccttgctccagagtctggggagtgagactaaaccgtactactccaggggggatgctgttgtgtagaaggcagccctaagaagaggaccctgggagatccatcccccccggcccaatgctactcgagggtccttcacaatggggctggagaggtgtcccagctttgcagtgtgagaaaggccaggccaaaggaaaaggaaggaccaagaatcaggaaggacaggtagaaagtgctagaaaacagattcaacccagaacctgcagttaggaacctgtggacaccctgacctagttcagcttctgacctctggctcagagagatgacaagctggtgtccgtccattagtcaccaaacacacagccaggaaggtgaccggattctggaaagcctggaggaattctctggtgtgactgcagctctggaactttctagatgcttctagattactaccagctcaggctggaagacagtttcccttcccacctctggtgggaaagaaactgggaacaaaacttctagttccccttttcacaggtggagaggcccacctgtttccattcttgacttgggtgttcttctcaggcttgcagttatacagatagggtcatgaaaaggtcacaggcccgagttctcactccttatctgaaatgctcttctccctggcagcaaaaagccctcaggatgtcagtcagtgtggacagacccgagacccgcttgctgcgtgtcattgtccacaccccccatcctcactccacccgacccccagtctccctctctgagccccacctgtggaattctgctggctcctgtggctgaagatgctgggcctgtgacaggaggtgcccgtggtccattcctcccttctcggagagctcgctcttgcaaagctgggacaccagtggccgtgagatcgcgtctctctgagttgagcggggagtggatggaccagctccatgcagcccagccactgtgatcatcttgtcctggactggacatgccaaggggcactctgacacttgccaccgccatgtctctagcccttcctcctccctgataccctggagggacttccccgggacttgcaaagcctttgccccttcaagtcccttgcttatgaggtctagatttgaaaactcttgttgcctcaagtcaccatcttgtgccatcttgactctatcagctgtacatggtacaagtgtgtatgtgccagcgcacttgagtggaagccagagagaggggggtgctctgtcactctacccttgaggcagggtccctcactgggcctggagcaaggctggcagccagggagccccacgatctccccatctctgcttcccacagcactggggttctaggtgcccgtgtgacttttatgctggttctgggagtcaaactcaggtcctcttgtttctgtaacaagtgttctcacctgccgaaccatcttcccagcctgtcgtcttgacttctgtgttagggcttgcgtctgtgaggcacccaggtctccagcctttgtacacagggttgaaattctcagtggggacaatgttaatgcttttgcacgtgacatcaccatttcaagcccagacacacatagctggcaggcagaagtttctacttactcctgtcttgtaacagggaacattggtctgtgcaggctcactgccacacccttcttcctagctgcctatgaccacgccctccaccctccaccctcctccccatcccaggaggcggctgttcatggatcctccactaagccagtctgcccatggcatcttgccattctcccctaatgtccgccttcctccctagcagatgagaaaccccctcttagagagtttcgcgctcgcccagttgggactctcacactcctctgtaactcataaacagggttggtagccccgggccaggcacattttccacagaggatacagaggttacccaagggggaggtggcgagtgtcccagctctgaatgataccctcctagggtctcattgctctcagccgagcgtagcgcagccctgagaagagagagagtgtgtgtgtgtgtgtgtgtgtgtgtgtgtgtgtgtgtatccacatttggtcctaagccagcagttctcagtcccagccacacatccaggaagtctcctggatgacaggggtcctgccctctgttgatggggggtcccatcccctgtaggtattacatgggcagtgctgtgtggtttagagtgagactttactgagtccatttttagagcccaaagggacagctctcccttcctgctccccactctcatcacccaggcctggggtgcctttgaacacactgaaacaggtagtttgccttaaaaaccagcacctggccgggcggtggtggcgcaagcctttaatcccagcacttgggaggcagaggcaggcggatttctgagttcaaggccagcctggtctacaaagtgagttccaggacagccagggctacacagagaaaccctgtctcgaaaaaaacaaaccaaaccaaaccaaaacaaaacaaaaaaacaaacccagcacctgagcacctcaggtatgtagattctgtcctggctgcagggtgggaaggcgaggccctgtcctgcctggtgtccccaatctgccacccttctctctacaccgaggagcccacagggctagacacctggatgcttttagcctcgtctgagcagtggaaatttgtgggcctggtgggggtttggctgcatttggtcggggtgaggtgaagggcctgaaggatggggtggcagcgtgctagagttgatctacaaggtagggtggcaatcacactgaggtaagacagttggctgcagactccagggtcacacctcaagttaagatagcatacagtgtcacagaagacacgaggcttacgaaggctgacacgggttttgtgagtttgagacaaggtcttgctgtgtagctcaggctagtttcagaactcaatcctcctgcctcagctggaatcacagatgtgcaacaccatgccctgcttaatgttagcttttcgagaaggaaaaaggcccgcagttgggtgctgctctctgactggggtaggggtggggcttctcagaaagaaggaaatgggcccatgctgcctagggccacagacttgctctgaactcagttacctaggaaaccaagagggggcagggcttgctgagttagcggccaggcctccaggcctcggagagacccaggctgggggtggaggagtttcacctgtggtagtgaatgaacggggagagtgctccctggaggtggcgatgtctgggagaccatggaggccaactgaggaatagggttcttaggaaacagtgctggctgaggttggatgtgccagggtgcaggggtactcagacccaaggaggagatctactgtagtactggaagttgttgggggggggggggaaggagggagacaggaagtagacaccaccgaggaatcgaggaatggttggttatagggccaccagctgcatggggcgtggcaggaaggggctgctgtaaaattgcaaaagctaagcattagggctggggggacagggccctggaatctgaagaggaaggtcccaggactgaggggtgcaggcagggcctgagcagtaggacctagtatctcaggcatgtgggttctccaggaagaacatggcctgtagagggaggaggggtgtggcctcagagaacccactggagagatggatcaaagctgggcaggggttggaaccagaaacacggaagaggcagaagggaggggagatcacgcccggaagccaaaatgagatgtgaaagggaaagagatcccaggatggtcccgcaagggctgcctcaggctgggtgtgactggagatgagccagtggggaacctcccagagtgagtcctggtgatacatggtgggcagaagccagatggccagccaagaagtgagtgggtgctggaaagaggggaacatgagtgggccaaggggctgggctattgagagtggacagttgggggaggcagggggtcagagagcctgcaactctgctctggagattgggctggcatcagttcacctgggcccagacaggacctgaacacccagaatccattgcaagccactgttttcagtggtaagatgctctctaggggcctctcccccctccctccctccctccctccttaatcctgcttctggccttccctcaaggccatttggcagtgtctccccacctcggggacgtgtagccttgaaggtacatgtataggaccccaggacacccatacttgccacacagcaacacttgcaagtaccagccctgcctcttctccagcgctagaccctcagaggggtggacggggggaggggtggtgttgttcttggcattcagttggaagcatctgctgtactcctgagctgttgcctgggtggctggaagaccgtgggcaggaaggtgagcattgtgcctaaccagaagagaacaggatgcacactcgtgcgtgcgtgcgtgtgtgtgtgtgtgtgtgtgtgtgtgtgtgtgtgtgtgtatgtatacacgtggaccacgaccacacgttcatttgtctccttttcctgctggcttggcactgcatgtagagttgagcgtgggtgtcctgtgcttcctggcaggtgtcaccctctgaaataagtctgtacgaggctcaccattgctttcaggggaggtggagacacctctggtatcatcgagaaggaccttgtgtgctgtccccagagcctgggagcccttgcacggactcagcggggggtgcagtggggagtgggctttttagctgccacaccttggccaggtgcctggaaagagggaggggcttcatcagttttgggataaggcttggtagatgtgagcccggcttggaagtaagatcccaggagccctctgaggatccagagggatggcttgagagtgaacctgccctgctgcctaacctttaagttcctgtgggccacatgaacttcctatggctgtgaaagtgggtttgtgcaaaccgtgtagcttgtacccacagacatttattgtgttagggttatgaaggtctgaaatctaagccagattgaagccagagtgtggaaaggtgggttcctgtagggcctccagagatctgtccctggcctcttcttgctctggtggttcctggcacctctggcttgctctgatgatctctgcctctgtcgcattgtggtcacctcatatgctaatcaggcctcctctgcctctctgtggtccgggacacctgtgattgtggctggctcatctgggtcacactctatgtcactctgtattcagacccaaaagttgccttgatgagtaaagtcatggcactttcgggctgaggacaggtcattggtcagcctggtgtgtcttaagacgtgatacttctaaggcataaaaatgctaaaataaattgggtcaaggaaactaaaaatgcatctacttctttaaaaaattgcttttaaagatatggtttcctgtattgcccaggctttgttccaaggctggccttgaactctgatcttcctgcttctacctccagaacattgagattatagggatttgccaccacaggtgggttgtgtggtgctgggaggattgaacctagggcttctcgcgtgctagcagggtgtcctaccaactcagctgtgtccttagcccaacttccaattctttttttctttaagcacatgtttttccagctgggagtggtatatacctgtcatcatggcatcggggaaactgaggttggaggacccagagtctgggctatcctgggcttccaatactcgtgcaatgtaaagcagtccccccacccctggtcgtaatataaatggtcttggttctgaactgcctgcggggtcttttcatctcatagagtgggaaccccacatcctaaggagccagcacccttggtagccagtaatctgctcgctctcgctctctgaatcattttttaaagatttattttatttattatatgtaagtacactgtagctgtcttcacacaccagaggagggaatcaggtcttgtcacagatggttgtgagccaccatgtggttgctgggatttgaactcaggacctctggaagagcagtcagtgctctttaccactgggccatgtctccagccctctgaattatttttaaagtgtactcctatgtgactttagaataaataaacacagcttggcgcgttagctgttggaaggctatacatggagcggaagccaaagtgtggatggagacccaggcaccggaagggcaggagttgaagtagcctgggtgtctgtcacctcctcctctcttgctcttttctgcttcggtacccccctccttctgaatccagctgatgggaccctggtttgcttccttcccaagtcttcctcacgcccaagcttcaggggcctctacgcagaaatggctctgagctcctcagccctgggtgtctggcaatgcacagtgagccaggccagcagctggctccccctgggttgggctccttctcccatgccccttcaagccagtgtgaatgagaagggacatccaggagcgagctgatggtgtctttggcacagtctacatggtgtggggccaggtattcattgagttgattccttacgacaaactcccctctccctgacagtgaacctggggacacggctctgcatctctgtgatttttattttacttttttgaagcctattgttccacatagcccagactggcctccaactcaccatgtagccgaggataaccctgaactcctcctccacatgctgtgttgggattacaggaatgtgccaccatgtcctgaatatgaagtgttcaaaccaaggcttcatgaatgtcatgtaagcgctttactaactagctacttccaccttctgaggggggggaggaagggagggagggggagggagagagatcaggtctcaagctggagagatggctcagcagttaagggcatttaccgttgttccaaaggactgaggttaccccagcatcacagggccgctcacagccatctgtaactccagttccagggggatccaaccccctcttctggcctcctaaggcactgcacactcgtagtgcacagacatacaggaagttaaaatacccaaatacataaaataaaaataaataaatattttaaaaaggacaaggtcagccaggcggtggtggtgcacacttttaatcccagcactggggaggcagaggcaggcggatctctgtgagttcaaggccagcctggtctacaacgtgagttccaggacagccagggctgttctacagagaggtcttctgtagctcaggttggcctctcatgaacctgaggctggccctgaactcctgcacctcctaccctctactatacgtggctcctcaatacccttttaaaacctttgattggttgaccgactttttttttttttaaaagtatttgcgtgtgcataggtcccttcacaggagtacacatggccccttggagcttgcgtcccaggcacttgtgagctgtctgacatgggtgctggagaccaaactcccagccctcctctggagcaactgaatgtgcccttaaccacagcccctccagtccctcaacaggaagcatggctttcatgagctgggttctctccacccctaaatgtggcttgtagatctggtactacaagtggccaggctctccaagaagacttctgagtcagtggctctgaactgagagcagtaatggggtacagggtagagcacccctctagccagctcatgggactgtaatgccccagtctagggccggtctgggcaatgtggtgccagagaaatcagaggctctctggattccagtgtcttagcacggaaaggaagaagtatgtgaaatatctctgccattttcacgttggtgacatcttgaactgataatattttggctctgtgagatcaattaaatcgggccacgtggtccctcctgtcgtcctccccccacccccagtggtagcagaagtttaaggttccatctgtaacttgcatcttgggctttgtgccagcgggtctgatggcacttgagtggctatcaggctgcttccttggggatggatgggatggcctgcttgggaaagaagcctcagaaagccccaccctgcccccttcatgctctggaggacgcctctcccccatttggtgctactgaatgagactctgagctgcacaaagtcaccatgtacggagtgccatgtgctacgcccaggctggcaatctggaaagctcactggagctgagcacaggggctcccagagagctggaggattagtgtgtccaaggtaaaggttcagaagagacgaggccctgtgtccctagaaaggagaggcagtagggcagttgacggtccgttggtcagctttgacatgggttgataggagtccctctactgaactgctggggccgggctgggtgataagggaggggtggagggggagcgcttcctggtttgaatggacctgctgatcaactgtgactggagttggtgtatcaactccagactaggaaggcagattcctaagatgcggcgacctggggaggcctggggctcctatgttctgctggtaggtagggcagagtcacgctgaggatggaataggagagtgtgcacacacgaggctctggggcattcgttcctgcagactgggggatggaggtcacatgggagaaatctgtcactggccctaggcccctccagagttactaaaggctcctctccccttgaactaattgcttctgctcaaatcttacccccagcactcccagtgtgggagctggcctggggccaccgtggccatgcctgagcctgggagtgactcattccaggtcagaggttatagggtctggcagatcccagcatcccagcatccaggcccagccccagccccagaagtatccgctcctattctttggaccccctggctcatcactctcagggtcccagaacatcatagggcctgcaaggagttgggggaggagactactgactcattgcccagcccccacggaggctcaggaacagtgggaagaagcaggcgccagaacacaaccggagtccctgaggctccagaacagagtcagggtgagccagccccagcccagccccaggttctggcttcctctcttgcttctccctcctttggttgcagccagcagagcccacttaagtaagttggtcgagctgtctcagctgcccagaagcctatgggggggtgaggggattgggagagggcggggcctaccaaaacactgaaggctgacagaagaccaagatgcatgcctgttgtctgacgggttggggtagtgccaggccagggtaccatgtgcaggttcaatgtaccatgtgcagggtcaatggaagacccttctggctgggaagagggtgccgtgattctggattggcacagacttgggcaaacatcggttaaaggctagggctgcatggctccaaggaccatactgtaactctctacgtaacagcgcctccgcggataccctgtcattttcctcttatccgcagacttgccctgctgctgtcgcctgcagccggtgcacctctccccgcctcctcgtcccctcgccctgcccctcgtagcaattccccagcaagcctccctccgcaggccgtcctgagccctcctacctctctgccccacactctgggaggctccttgttccgaggccacaaagcccctttgatcctctgctcggctccgagccatgtgacccggtgggcgggccgcagctctccagcgtccaggcagcccgactttcagctgctggggtgagtcctcgctctttgttcttccagcccctcacagtttgctccgggggcctccaggtggtggggcccgcctggccgccccgatgggtgcattgggactgggatccgggtagccccggggcctggaactctggttggcagaccggccctgggttcctgggagaataggcggcgggatgccgggtctccacgcgggaaccagattttcgatcgcagaatagaagaaaaaggggctttgtgtgaccacagctatctctttgtgaatgtttggccaactccaccgagtggtgaagagtgtcttggagcacgttgcccccgcaaggggctctctgacttctagccggggcaagagcagaggtgtattgaaggcttcttgcaaaaatctctccacacagagttatcagcttctaatagtgggcggtttccaacgctggctggaaattagttcctgcgggctgttacaaaggtggcatattagagaccacaggggtgcactgtggtgggataccaccatcggacccttgtattctctggcttttggtgatgtgctgagcccaggagggtgttgctgggtggggtgggggtttggtatgcatttgttttgctagagaatgtgcaatgggggtgtctgccttctggagccttgtgttggaacctgtgctctgtgtaagagccaggggcaagcagtgtcctacagcaggctctgcagccaggcggagacgagaacctgggccagcacagaatggtcacttgcatccaagcacagagggaaagagggaaatgccttcccctcctggagaccgcctgagtttccgacctactgtgcgcacccccacccccaccccactctaaggaaaagctgccggctcttggtcagaagtctgtagagaagatctgctccccaagagaagtgtgagattccttttcttagagaaaaaatgtatcacccggaagcagcccagtagtgggttctggccgctctgtgctgggcagagttggaatttggttcagatctcacgtggaaagcccagaggacagtgaagacgggatctcctgcaatgacgtaggccccccctcattcactctctgtttctagcatcatggggcccttgggtcgctcactttaccttagtttcgcttggcagccaggcagctcctttttagcaaataggaaaactgtgcttattaagccctctggatgggcagccagcctccaccccaggcctgctggggaggcggttcacccttctcttcttgggcctctttcagggtacgaggtagaggtaggaggcagctttgaacttatggctgccccactgtctcagcctcctggatgcagggattctaggtgtgtacctttaaaactttggcctctgggaaggaacctgagttgtagctgacctggctgactctttcggtttctgggcattctttattggtttaccccaggttctgttacatctactggagcctgttcatatgtctaccgggtgggccctgtggtcatcatggtgacagctcagccggtatgcacaagaacctactgttcgtggggtgaggtggtagccacctcggtggaagccagctccagaaaggaggccaggttcccagtgtggattgtcacaagaatgagataagtctccatgccaggtctaagtgggaccatcttgggcctgtggcgtcctctgactaccagatccactgccctccagctctgggacatgggtcaggagtcccctacccattgggcaaccacagtgctcttgcctgtcatccccgccccctcccttccctgccacaatatcctccccagcttcctgttgtgtcattgctcctgtcagatagggtggctctgccggggctgaggcccctttttacagagagggccccacagcctggggcaggcagcacagattccctgcctgtgtcaaaggtctctaggaagccagcattgaagctccatttccggtcttccattcctccacacagtaccgtctccactggctttcccacaccaccccggaagtttctaggcttcctctctcacttgctggccctgtgtgtgggaagaacagctttattttaatgcatgtaggcaaaaccccagtggccactggcagaggctaggtgggcctccttgtccttaccatcccccttcctccatagactaagccgatgttgccagttgagctttaggaaatggtctgggagtggtgtcccacccagagggtcccacttcctacagtttggtcttttgaaaagtttccagccaactctacccttcgctctctgggtaggctctgaataagctctgagggctctcccagactctctgccttccagcactaagctttgatttgtttattgagcaccggctccgttccttgggcaggtagggacctgccctccaggagcggcagagccttggactccttcccaaggaagacttctcagggtggctgctgtgcagcgtagcgtcctgtgtgttctgtgagtggggtggggctgggggctcctacctgcatctggggaggtgggcatttctgtactccacacctgagacctccacctgccaggtctctgcagccacagctgcagagtctccacccagcccgcttggctgcatgctgagcccaccttggtgcctgagggttgggtgggcctacctggctcttcctttccattctctgtcacgcatcctgaggagcacaccatccaggctgtgagcctaggaaagagagatttgcactaaggactgtggagcctgatcttgtcttcctgcagccctggagctgcttaatctggttctaccacccccacccctctgcagcagagctcaccaccactgtccccaagtcactggcaccggggttggggtgtggggcctgggcatcctttaaggcaggatgcagctcagtgcagaagcccttgaaagacacagaggcttagagtttgtgagaaggtcatcaggaaaagatgctgtcgtgactttattcccagcacttgggaggcagaagcaggcagctttctgtgagttcaaggccagcctggtctacagagtgagtctcgggacagccaagtctatacaaaaaaccctgtcttaaaaaaaaaaaaacaaaaaaacaaaaaaaaaaacaaccaaacaaaaatgcttgctatcagccttcacagggtgagttctatctactccatgtggtagccgtctcctacaggctgtcccgtaaactttacccatgtgccatgccatgacacatgtgcctgtacacagacacacagacacacacgttaaaattgtgttaaaagataagctattggctggctgtggagcaagggtggctggtttaagcactgtcctaatctgtgtacagtgcatggatcttgcccagggctccaacccctcctaattgcttagcatcttcctgaagccaagatttgggggggcatcattgagcacctcaggctgctggctggccacatgaggactgaagtcctcgcacccttgtctttactcttcctgcttctgacagttgtatgtcccccatctcaccatcttactttgagtttttgagagagggactttcccaaaactccctatatatccaaggatgacctatacttctgctctttccagggactgaactcaagacttcatccacgttaggagagccaactctacccactgagctataactccagtctcctttttggtcatgtgaggcgaagtctgattctgtaactcaggctgaccttgaacttaacatgcctcctgcttgagcctcccaggtggcaccgtgcagggtttctgccttgcttttgggtgctaggtgccaagcacaggctggtcaccagaggtcgtgggacagttgtccttccacagtggaatgtactcagagctcagtgctccaggatctcttatcttatctcccaggcctcactccaggtgcctgtcaccactggtggaggagataagacagcctggtccaactggggagtgaacccctttgctgtcctattgggggtctgggtatgcaggtctggccctgggcgtgctgaggctggccctcctgttcagtggtgattttagtgtcctctctgttctcagtggccactgagatttattgatcgctgtgaccccattctggatgacctgggtgcttgattggttaatgtttgaatgactagggaccagctttgtgtgacctcagattttttactttagtccaaatgttttctggtttcaccaaggccagctcaggggccttgcagggattccgttctccctgtctttctcccatgtgagaattttaaggaaagaggacagatagggtctctccctctccctctcctgaggaggcgctggggctggggagttggctcactgggccaaaggcttgctgcaccatcatgatgatagagttggatccttcagaatctacagcaaaggacaggtgtgtgacactagtaatcccagcctaatcccagcaccagggaggaggcaggtggagtctcgctcctggccagccagcctggttgaatgggtaagctctgggtatagcaatgagaccctatgtcaaaatacaaagannnnnnnnnnnnnnnnnnnnnnnnnnnnnnnnnnnnnnnnnnnnnnnnnnnnnnnnnnnnnnnnnnnnnnnnnnnnnnnnnnnnnnnnnnnnnnnnnnnnnnnnnnnnnnnnnnnnnnnnnnnnnnnnnnnnnnnnnnnnnnnnnnnnnnnnnnnnnnnnnnnnnnnnnnnnnnnnnnnnnnnnnnnnnnnnnnnnnnnnnnnnnnnnnnnnnnnnnnnnnnnnnnnnnnnnnnnnnnnnnnnnnnnnnnnnnnnnnnnnnnnnnnnnnnnnnnnnnnnnnnnnnnnnnnnnnnnnnnnnnnnnnnnnnnnnnnnnnnnnnnnnnnnnnnnnnnnnnnnnnnnnnnnnnnnnnnnnnnnnnnnnnnnnnnnnnnnnnnnnnnnnnnnnnnnnnnnnnnnnnnnnnaggacccccgtgggagctaaaggtttggggtacaggagcgggtcttctttgcagcactgagctggagaggtgcctcctactgcagcagcgggtaggatgtttgttgtgggttctgagacactgacgtctgtacagcggtccggtccgttgactgggagtgagccctgtttctggtggttggcggtggaggaatggcggagagggatgccggtagccactggggagcagaggactttgcatcctggcacagaggagctctgtgactagtttatacccaccggctctgaataagtatttgctcttccatcactgctgctgggttgagtggagccaccacaagctgacctggtaaccggtgactgtaaacttggtagttgatggctgaggtctctgtaggggtgcctgagccttttctggtgtgtgtgtgtgtgtgtgtgtgtgtgtgtgtgtgtgtgtgtgtgtgtgcatatttgaggggatatgcacagatgtatatggagtccagaggtcaaccttggggctacctctttgtattttgacatagggtctcattgctatacccagagcttacccattcaaccaggctggctggccaggagcgagactccacctgcctcctccctggtgctgggattaggctgggattactagtgtcacacacctgtcctttgctgtagattctgaaggatccaactctatcatcatgatggtgcagcaagcctttggcccagtgagccaactccccagccccagcgcctcctccttctgagaggagaagtccagcttaatgtacacacttgcttagaggatagctgcagatgagatccccgcagtgagccaccctgggcggagccaaagccctctgcaaccagagggactgattgcgagtctccacctccatgtgggaaggttggccaggctccctggggcccagtgaacctccgtggcatgtatttaggagggtgttacttcctcctcttggtgacttctggagcctggccaatgcaggagggtagaggctgatctctgggagttggaccgttggctgtcagttcagctgcttgtgtaccaagtcccctcagacaatggaagaatcgtgacgttctccactgtgtagtcttcatccagctttaatgggtgccccttgactcttataccttagcaccctaaggatgctgaggactcctgagggcaggcaatagggtggctcagctcccagagagtggagcatcctgtgtaaagcctggaacctttgtagaagtagggttagcttaagatggaaggcttaagttaagaaagggtgcctgctttggctgtgactaaggcctgtttagaagatgaggtggaacatcgaggaaagagcagacggttaaacatactgcagggcggttgggagacccactgtgctcattcatgatgggagacctattatgggtcaggttgggagacctactgtgctcatgatgagagacccaatgtgggtcaggatgggagacctactgtgctcaggatgggagacctactgtgctcaggatgggaggcccactgtgggtcaggagaccaaggtcaaagttctggtctgcctttgctattggacatgcagctggcatattgtgagcttctggcatcttgctggctttgagactaactcactgcaagcttttaacactgaagcacttcatgcctgtaaccctaatacttgtgaggtagaggcaggaaagacatgagtttgaggctggcccgggctacatagtaagatctagtcccaatgtgctcccccaaggatatatgtgatgtcaggacacagacatttagggaagtggacctccaggttctaccttgggctatagctctgtggggttttcctggggcgagatgaagatggtcccacccatctgcacaggatttggagagtagaggtctgagtgtcctgggctgcggctgctgtcgagagccaagcattgaagataggtcttccagaagtttctgaatcttgggtaatatgtcccagagcttaaagtagaggcaatgcctggggccctaagatttcaacagtacttgagccaaggtagctctggtttgaggcaggagggagggaccgctcaggatttggcagtgtggacgtgttcaggggacaggggagaacttgggaagtgtgggtccctggatcatggagatgttacaagtaaggaagggtcaggggtgtcccccacacccatgtgccgccctcacactacccaccctcagacattgcctgcttcctgctcgcctggcaacagtcaggctgttcccaggccgacgcttagctgttcctttccaggtgttgtggccaccttcccaggcccctccatggttagctgtggacactcacacacacacacaccgccgtgtgcatctcctgtccagtcctgaggctgccctgggggccacagcgacatcctccttccactgacccacagatgcacttcacagtacccttgaagcatctgtccacacataggatgtgccatcgtgattgtgacccagccttggtctgggagaactgtgcagcccccagccaggcccacccactgcctttttttttttcaaaaggaggggcatagatgacctcactgtgggcttcagcatctccatctgtctaagtcagcagagatctctctcgtcctagttcacaggagctgcccctgagaggcttggaggtttgggagtggatagtgcaggaagttgcaggtgcccccagtgtgtcagcccctttgtccatccagaggtcttcctccctttggggctgtgtggccctaacaggtgggctttaccccagtcctgtgtgaaggaggttgtgacttcctgggaacgttcagcacccaggtttgagggcccagcagcccctgcatttggcttgctcagatctcgatacaggtggccgcaggactgagaatagagcaaagaggactctacacgtgaggggcacgggaggaaaacagcaggcacaggatctgcacccaggtcctggcctctggcttcgggattcccttgccagtccaggcccgggaaggcaccagaaagcagaagcaggaagctgcatgctcttgtcttccttgccggtaattggtgggcctgagggactatgaattggattcctgatacacaaacggtcaggagagtagccacaggctcacaatgaggctagccccttccggtctcttcctcacactggaggcacttcttgcctcttaattctttaacggacaactaacctgatcaagatgcctaaatggggtgcggtgaggtggggatagacaccgtcccctgcaaccgccaatcctacaggcctaagcccggagagacaagcttccgaagggacgtggaatgtatgcaggcgagcatggtgcccccggggccacagtttatggagaacatttctggactgttctgttaccccaccaccaccacacaaattaaaccaaaaattaaatgttagccaccaatgctttaagcaactgcaggaaatgtggagtcttcttccctgcactgcccccatccctctgtgactgtatcctagcactgtgtctactctttagggacagccggccagccaacttggaagccctattgggcacagcttccagaagtttgccagcccccccccccctttgtccccttgtccttgggagaaattaccatatgaatgtcgttccttcccagcgcctgggttggagaggccctgggagaagactggctcccaggctgccgttccggtgttggctgaggaccatccacggcatgccagttttcctggacatcggttgtctacatcccataatagatctagctcagtcctgggtttgagaagaggtggaagaagaggctgcaggtgtagggatctcagctgggaggaggctgtgggacccccagccacttgggaccccgcccttgtacctcctcattaacctgtcctgagaaacgtgttattctgggccttcttgcgatgttgctaattactggaggaatccagcgggcgcgagggtatggggcagtgcagttactgtgaatgaatggcttgtggactgtagagagtttggcctgtcgatgttctagcagctctgatggtctggcttgagtcaggcctcactcaggtcgggagtttccattgagttcctggttgcatctcagacactaggttcactttgcaacctgtgtgagtcacgctggtgtttgggccaccaaaacatgctgtcttgtatccccccacccacccactctggctacaaaatattgaaagtatctcaggagatgccacctggcagtggagtttcttctagacagcatttagagatggtagcaagacccagtccttgacatgggccgtaataagcggtctgaatggaacagaagtgacatcgccagtggaggcccaggtgagggccctgtcctccgtatctatatctgcccctcgctctgctctgtttgctcagtctgagcctggcattaggacaagatggaaaaaagataggactgaagcccaggcaaggccagcctggcccctagttgcatttgacgcctgacctcagtggaccctgatctgagtatcctgggaaagtccttccttctgtccccttcctcagctctacatggcttctataggtgacaatatccagaaattgttaaagtcacatttgggtgccgggacagagattcatcatgcacacacacacacacaccccgtaccgaagaaagggaatcggggagtacctccaggcccccattgagttatccagccaggttcacagtgacctcagatgttagaggccctgctggcatgaagagtcacggggtgcacttactatagcctgtgcaacttgctaaaacagggaagcccaccagcatagattagctgtcctgggaagaccgaggagcagggcagagtacagcagcagggaaagaatgttctagacaggctgactcttttttttttttttttttttttttttttttttttttttttttttttagacagggtttctctgtgtagccctggctatcctggaactcactctgtagaccaggctggcctcgaactcagaaatccgcctgcctctgcctcccaagtgctgggattaaaggcttgtgccaccactgccgggctagacaggctgactcttaagagccttttctgaagagctgagaggagtttggaaggcgttcatatgtcggagagtgaaggggtggcatgtgcatttggctaacagcagctgcatgcaccatgttctgtgtctgtcaccctccaccttcacaatggtcttaggggacaaggattatctttgtgtgcacagtgtcgtacagctcagatatttgctcaatcccactgttccatggtacgtcagaggtgggagaaggtaaaggggcccaattccgtgtcaccctgggtgctggggacaccggccattgatttgaagcaaagacaaggtaggactaggatatgtgtcaaaactgtccttccagggctggggagatggctctgagtaaaacgcgacccaagtttggtttctggaacccaggtaaaatctgggtgcaggcatgtgggtacctgtggcattagtgtaccgccaatgggagatagagggataactaacagcatacacagccttgaataagacaccctaactggatttgtggtgataaaacagaggggggaccattgtggtatagctggagacagcattcccaatagtgggggcaggggcagggtacccagagttcatttacacttccagacagttcttgcatatatagacttggacaacagtagctatagataccaaacacttagtgcaggacctggtatatggagtcttgatacatgcctgttgaactgtgatgagcatttgtctatctgtcacctctccatccgttcatccatctacccacttgtctgtccatccattcacctgtctgaccatccatctacccacctgtccgtctgtctgtcccatccatccatctattcatccatctatccgtccatctacccgtgtctgtccatctacccattcgtccatccacccatccatccatccatccatccaaccacccatctgtctatccacctatccatccatccgttgtccatttgtcagtctgcctgcccacccatccttactctctgttcaggcagcattacatgacactgcttggtcattcatttcaacagtgcgtcataggctgccctgaggcatttgctctacttggttggttgcttctccttagagaactaggtcatggtgtgaggatctttcaacatacactggtgccgagggattcgtgttccctggtggatggctagaattcttgggtttcaggatctccccaggacagggatctgtagctgcaagagtgagtggctcatctcagttcttctgcctgtccttgttggactccataatacagtcacaggtttcttcttccttaaggtcctgtggtcacgccctcttgcaccagccaggaccagcttctctctacctggcccttaagaccctgccttcagtctcgtcctgtcccatgtcatgccctgacccccacccccaccacaacaaagtgaatggggcacccggaagcctttggcagtatcagctgacctaggcagaaaagatctgtatctctggggtcaggcctttgtccacgggatttctggcggcagggggtaggagggtagaggggtagggcggggtgtctactttttgttatttcaaatgatttcataagttgggggaacctttgaccatgtttcacccaccccaagctctggtgtatgtcagcagctgacagcagctgataggacaggggtcaagggattgggaagcagctctgtcgcctccccccccttaggggacatccctgataagaggaaattcttgtaataaatggccagtgtccacagtggggtgatggagtggcctctctcccacccccttctttctccatagacatttgtcaagagcaaagggaatctgtggcccagcagcctcgatggcccctgctgcagtaggacatgccagtggcgtcctgggtagggctggatcttcaggtgcagctgttgctgttggagattcctgggggtgggcagagtcagggctgccttccccgatgctgctatgtaatagatgaccccaaggatgggcccaagcagggtggtcagtggaccccggaaccggaaccgtatttaaatccctgacccagaactttggagggctctgcagaggccttagtgtgctgttggaaatctgctgtggcttttgaggaaatgaatgagaagggcttgcaggttgcagcctgccctgagcaaaggttgatgtctcaataggcccagcctagtgagaaactgctagctgtaaatgaagaacagaaggggtctcctcgaggggggtggggcgcccctggacttggtccaagtttgcctctgtggattggggccaattgaaaccacgttggcagaagtacagggctccttgagagtcctccctacaatagaggggaggttgggtgagggaagcttggcaaacagccaaagcagggaccctactcccttctttgggatgcctagggcccctgcctctgcacacctccccaccctgccctcatcgaaggaaaggaggagtggatgggatgaagtctcaaacttctctgtccgtcccaggcccttatcggacgcaaggtcacaagcatctcccagcagagagcagcttgcggaaaccacatcagggcagtgttaagtcccctcttggaacttggactggggaaggcactccagctgggagaggtgggaagcgctccctttgcaaatccctctctactgaggccaaagccaaggccaagcctttgtgttgggtttccaagtgggggtccgggggcggtgcaggaggagtctcagatttctggcatccatgcttttaaccagactccaaggagacacttcctgccccaaacaaagtgtgaagtgtaattcgatttgacttacttatcaaattagatgagccatgtgcacttttaaaaagttcggcttttgaaaccgggcacatgaatttgcaagatttgatcatttatatgcagtttccatctttggaacaggacagggagcctcttgtgacatttatggggagcgcagggtcctccggtgagtcagcaggggccagggcactgtgaaggcagggtgaagaagatgggggaagtcccagctccccagaaagcagccttccacatctctgcccacccatgtgctgacaacctgggtcgagccgcccagggagtcagctgctagagccttgacccctctaacgtgggctcctcagacttatgtcccatgctccttgactctgtatccctcctgcatttgtccatctctccagccacagaagctgctgatctagatcatctgtgtggtgtgtgtgtgtgtgtgtgtgtgtgtgtgtgtgtccatacgtgtgtgtgcgcagatgtacaagcaggtggaaaccagaggaatatgctgaccttcgtcaatcacctttttttgtgtgacagggtctctcactgaaggtctgtcagttcagcttctggaatgcctctctgtttccacagcctccagctctggcacatagagtcatcattggctcttacaggagtactggggatttgaactcgggtcctcagtaattccataacaagtgtttttatccactgagccattctcccagcctcaagtcctcacttttttgtggcgtaacattcctgtatcggggagtctgtgggggtttgtcgtggctccatttaaaatcttactctgtaaagcttcctccgtgcacctgcctgagcctgccctttcacccactggtcagtttcttagcacagtgtatctgctgactgaccttgttgtggatctgatctctgaggacataggaatctgccgccattactgtcgctctctctccagggcgagtcctgctcctctggcccccagctctgcacgggccagcttcccacatggctatcttactttattttatttttttcctcacctttatttccccagtgggctcattaggctcctctctgcccactcctgcctacctggtgcagagaatcacctctgagcctttgtgagtccccctgtctcctcgcggggcctcctggaggggagtttttatactacacggacactgatgtctgtcccaggtgtggctccaatggagagttctagtctggcctccttgttctaatgtgtggcctctcatgtgccaggagcgccctggagtcagccctacttgaggctcagtagctggtggtaaagaacatatccaccctttgcccttggggtgggtttttttttccaaactttactgaattaaagtgatactaccccaggaaacctgggaagggccaataacctgtccagctagctgggtgggagaccccgacaatcctgggccctgccttcagactctgggggtttaagttcaaggccccaacacagggccccctactctggaggcagtaccttccgaatgatgagggtgtggtgcattttgggatgctcatcttaccgcagatccagggctgatcttgtcacactggctgtagcctgggtgccagttccctggctgtccttggcaagcctgttagcctgagccttctttctcatggccagttgggtcaaggtcagccttggtctcatcctctctgggagcccctcctaaattgtggcctacggccctgtcccagtaaatgtgaagggtgatataatcttgtcatctttggcaggccctggggtggggggagaatgtgttacacagtgagtaagtctgcagatggtggtggttggacccaccacccactggagaatagctgggatttacagcgggtgtctggggcaggaacaggatggggtagatgggcctgcacacacagtaggacccacggtctaccaaaagtagctttagctacttaccacccctcagaaactcctctggctgggagatgactggctggctggctacttgctcagagcattgtgtgccccgttagcatccgcagaatctcagcttgagaatctcagcttgagtgtcagtgtctggggctcaggcatcctgagctgcacactggcaggtggcctggccggcctctctgtccaactaggctataaacagctgcccggtgtgccccccacccctcgcatcagccatgaagagtggtctccagccgtgtttattcatgatgtcatgtaaccattgctcctgtctaattcggtgcattttatcaccctggagggaaacgtcatgctggataaagagtttcttctcctcctactgcctctgtggatctgccttttccgagtgttacatagtgtcagtcacaccccggagtccctgtttctttagctcagtatgtatttcaaggttcatttgttgtctgccatatccgtaatctttccttcttatgggagagctgtgttccctcagattcacttgctacacttattaatgcagctgtgaacaacttagcgctctctctctctctctctctctctctctctctgtgtgtgtgtgtgtgtgtgtgtgtgtgtgtgtgtgtgtgtgtgtctgtatgtgcatgtacctactccacagcactggtgtggaggtcacgggatgacttgggagtgtctgttctctagtcccagagacaacgctctcatgactggcaggcgtttccagccttgctggtggttagctttctcgagtagtcatttctgcttcttgctgggctaggactcaaggatgcccctgagcaggctgcagccttgggtggctgaggagggagggtgtcagggaacacactcctgaccagtaggcaggtgtcagagcacagaactcatgtccaagacctagtgttccaggagtgagcagtccagaaaaggtcttgcctctgctcatgtgaccatccagtggcatttcaggaaagagtcagcgtgtagacctcatgtcccctctgtaaagtgggagtgccaggctgcctgatacacgtgtcaggctcacgtaggtatctaagactgagatgagctaaaatggattcttaccgtgcatctttgctgaattagctcgggagtcacaggcagatgcacttggctggttcctcagaaataaaaatagaacggctcacatctggatgtatgtcccaaaccatcgaaagaatgctcttgctaggcatggttggtgtatgcctgtaatcccagtactcagagggctgaggcagggggatcattgagtctgaagctagactgtatataagagagagcctcagggaaggggggagagagggagagctagcctaagctctcaagattagctctaagggtgttaattattctgtatgaaataaggcaaaagccagagatcatctaaccccatggtggattctgggaaggcctgtggtcgctcctggagctccaggtctgggatcccaggcaactctgggtggaggggtctacctcctaaccgggcaggcaggtggatggggaggccctcccaggaggaagggtcacaggggtaggccagagatgtccagagcccctggagagcatggggctctactgtgttcttattatttctcaagcaggccctctggcaggctggatgtttagcttggtttgggcttctgctgtgaaccttaatacatggagaagggccacctggggcccgaggtgtgccttccttgactgggggcgattagggagagttgggggacagccacacctcctttcactgttgagcagagaggtagggggagggcaaagtgagtctcagactcataaacagatggaagcaattttcagtcatgtgcgcaaggcctgaacccctgcacggcaaggcagggccccgtgtcgttctcccaggaagcgggccccaaagccacaggttctagggccagatgttacaaggtctttgtttatttaaagatgcccgaaacacaggagagtatttctgagtggagagctgacagacactcttgaagccttgtggaggggactgacctgggttggggatgctcctgatggcaggcactgtcccttaggactgtctgtgtcattgtttgggggcgtctggaccccgtggcagctcctgctgtgtttacaagcattctcttgttcaattgcctcccctctcccaccacccctctcccgccacatgccagaagtagagttgcctgcaccctgtggaggccgaggaacaggaagttactgaccagtaaactagatgcctgtgggggtggtccccacatctccttcctgaagctagctttgcaagccatttctcctgtcctttctgccactcaagccttgagaagatgctgagaggaagtgtgtccggctttgctcccgctggacatgctagtaaaacggagagaaaagctgccaggccagagatggtcagggttgagcgagctgaggacgtctgggacgagtcagcttgagtttagtggtttccccggacgtggagagacagtttaaccaaagcctgaaaaagcccctatgctacagacccatcattttgctgcttcctggcccctgctcacttggaatggtgcccccccccccccagcacctttggtcggttcccttcctctctgagggaggagaaggcacaagtattcattgagcctctttgaggttagcgtgcgtgggaacagacataaggaaaggaaactgggaagcaactggtgacccctctgtcctggctgtgtttggggggctgggctgtggggtcataagttgagactgctgacattttccatagaggctgaaagaggtgcctctctagggcttatcagcaatgcatcagctctacctcgaccaccccacagcggcctgggtttcagagccgcactggcaggctatctcagaataacagttaggtatactgtaagcattttgttcaaccagaccgggtggaaccagccttgcacacccctgcagggtgtgagcacctacggtctccatctgaatcatcccccaggcttgggctctgaccatgcatgcactcagccacaggaggctctaaccctgacctactgaaggaagctgaagtcttcaagtttaacccctagcctgtccacagacctacaaaccaaatctggcctttgcgtgagggtgagggcacttgctgtcggccgtagcctgtttcctgcctatcctgcctggggactgtatgggtgggccacctgggagaagagacacccccagtgaggatgagtcaggtctggaagaggcaggtagaaatcagatcacccctcccctgggaactgcctgtggtcacctgttggaccgtgaagggccctgagtgctagctacagttactgtaagctctgagcagaggcgaagggcgtgtgccttcaaccctcaggacttggggccaacagaatatggaacaaagtccttgctgcccacctggaaccaggggagccctggttggcagagctggcagagacctgaggcagatggctgagtggtgtggaccagttgaatgctactgtaggggatttcagttctgagatgctatgcaggagtttcatgggcaagtcaccgacccctgcagccttggtttcccatctgagtgccatgctggctgcagatcccattctcacgtctctgtttctccctccccagactccgaggtgactcccagctgtgttggcgacatggctgacaaccctagagatgccatgctcaagcaggcccccgcgtcacggaacgaaaaggcccccatggagttcggctatgtggggatcgactccatcctggagcagatgcgcaggaaggctatgaaacagggcttcgagtttaacatcatggtggttggtgagtgttacaggccattcggggggctagcctcagccccagctgagatcttgcctccctttgcctcccgagttctgggattaagagtgccaccatatctggcctatcagctctccagggtagtgtctgggcaaatgtgtgccataggctgaggtcctaaaccaatagagtcagataggcttccgactgcagggcctctgtctggtgaattgtcaggatgtctgttctgcccagatcttcacacagcctacacatctcttaggggctgttgcagctacctaggcccacacctctggagtcttggtgtcccttcttgctttgggtggccttcctaggaccaggaaggagctctgctgagttaaaccaggccccaaatccccacattggggtttaaacccaaccctggacttccactgaggaggtgaagcctcaggcagggctatccaaggatgtcctggtcatagtgtgatgtagccatgaactgtgttcttggagagccttccaaccggccttcccttctctccccagggcagagcggcctcgggaagtccactttaatcaataccctcttcaagtccaaaatcagccggaagtcggtgcagcccacctcggaggaacgcatccccaagacgatcgaaatcaagtcgatcacccacggtcagcaccacggaggctgggtgtagggactgcgtcttcccagggtgtggggtcagagcatagcactagagaggtcacgtgaccccgtgggaaaattgggactgagtaatagtgggctggattcccatgggcccaccaggctgagctcccacagacatctgaggtttctttatactaagagtcatggctggcaccacccagaagaggtcacttgctccttggcatggcctcagctgttatcacagccctttctgggacgtaccaggctggccaggcaacctgaaggcttggggtgacccgcctgacttggggtgctatggtttgtgcagatattgaagagaagggggttcgaatgaagctgacagtgattgacacgccgggcttcggagaccacatcaacaatgagaactggtaggtcactgagagaaccttcctctatcagtaaaagccccactggtcttggggctccatgataccactggaggccagacccccctgccataagattatttcaaactctaaagccgtgcatttggggtctaacattctagatcaaaatggggtcacccggctcccatctggggtgggtttcccaccccagggcaaagatcagcatggggagtatggcagaaaatctgaaataaggctggtttgtctttgcaaccaccagcattcctgtatgaaatcagaggctggtgtcaagccagttctgggaattagcctgttataggggcctgggagggcgggcttagagaggacgcgggcaggagggagcattcagggtgcaggctaacccggctctccatgcagctggcagcccattatgaagttcatcaatgaccaatatgagaagtacctgcaggaggaagtcaacatcaaccggaagaagcgcattcccgacacccgtgtccactgctgcctctacttcatcccagccaccggccactcgtatgtcccatgctgggccctttgtcttgatggtgggaatccccagttcccatacaagcaggattctgtctgggcacagggacaggggcactgagtcagagctgtgtcagcaactgtcatggggcgtctgtgcctacagaagttctccatgacctctagactgggcggttccacgcccactctgccttcttccctttgtgcacagagctgaggacagggcagactctggggtgttctagaatccggtagtcagtctctgcagatggaatgagactctcgggctgtacatgtgcctgcccccatttcccgtccttgacaaagatgcttttagggcctgggaggcttcggaattccaggtgcctttcagaatctccctttggaatctcccggggcagctagactgtcagtggtctcagtgatcagggttcttggcttcctgtgagtctcatctgttcccagtacatccgtgttgttcctctccttgctggatatcctggtcgcttgtcctgactccgtgtagggtgcatgtctagtcctgggctcagagcagcaggagccggaggtggctcgtttagaagagttgaggagtcacagatttggtgctgctagagtgtgcacactccccggctgttcctggctcatccctgggtgtaagagcgtgggctttgaagggacttttcatcttgcaccctgtctagagggcaaaagtctcactggggtctggttggaaaaacccaaatatcgttgtctgagcttgccagtagtggctgtctccagtggggtccacaagagccagttctgggaattagcctgttataggggcctgggagggcgggcttagagaggacgcgggcagaagggagcattcagggtgcaggctaacccggcatgccattggcctcagctggggctggcttgtttggggttctgtagctgctccgagcacagcctcgggcaaggccaaggctgacagaggagacatggctgacatggcttcagcagggagagccagaggcagacacttccccagtggtgaccctctggactagggcccttcctccagccgctcagtcccaggggacagtagtggcttctggccatcattgcttggcttctgactgaagcttcacttcctgcaggctgtctgggcctgaagatactgctatggggaagatgccattccaatgagaaaatggtgcccaggcttggggtctgccagcctctgccccatccctggatcagaccctgggtctctgcagccaggctgacctgggaacagccagcctgtcccagggcctggagcttctggataccgtccctcgtgtctccttttccctggcattgaaaaccccacggcatgacagtgttgtgagccgagtcactctctgggtggacggtgtccagggccagttggactctgaagatcttgtggatgagggagcttaaagccagctttacaccagctccccaccctcagctccatgaggggagagtgctcaccctactaaggcccaaccttacccctccatcaacatggcccccactgggacccctaaacaaagtcttttgcactgttctgtttcaggctcaggcccctggacattgaattcatgaagcgcctaagcaaagtggtgaacattgtcccagtcatcgccaaggctgacacgctgaccctggaggagagggtctacttcaaacagcgggtaggactcatggcctctacccagccccttcccctccaggactgcccagacaagtgacaggcttgacaggggcctgtccagccctgggatatatgataggaaaggcgcctattcagctcttcacagcatgtgttcagccttgggggagcccctggcctttgtggatgtggggctcccccatatccagccgtctcagtggggttcagaagggagtagatcaagcagatgcaaatgtgtcagggccattggacccagcattcctgagttttattaagtgggacagtccacctcagtggcttcctccttctctgccatggtcagggccactgctgtctgggtgatagggctgtacctgcaggcgtctgcagtagggtaagccctgggcctcttctgtgtgaggtgactttggagcctcttgagagctccagcctggggttgtaagagaggcctcaaatccaattgcagaggctaccagggcttccttccctagctgtgtgttggggattttcccagcatgcataggggagggtagtcagggatgcatctgctggagaagagaccaggatgctccccggtgttttgagagcctggatctgcttgaacagataagacagtcagctattccctgggccaccctatattgacagccacgtgggctgtcagtaagtcgtcaagctggggagagtttcagcaggcaggtacaccctgggctaccatgctcatcctgagagggttttcggaaagagggcgcagcaagcctgagttgttttctaggggggagtggaggggggagctgcacagaaagcgcagggagactcaggacaatggctgcagggcccctcgggacaggcgagtgcttcttgatgcctaaggcttcagagctggtgatcctcggcgggggtggaactcaggcggtagagtgctctcctaccatcgagagggctcagggtttgatctcagcaccacatggaactgagcatgataactgtcgcctcccaggattaggaggtagaggcaggaggttcacaagtttgaggtcattcttgtttatgtagccagtttggggctagcctgagctacagactttgtttccaaaacgtggtggcagtggggctggaaagacggctcaggggttaagagcactcaggttcaattcgcagcacccacgtggcagctcacaaccagctccaagagaactcagtgtgccctcttctggcctccatgggcacttagcatacatgtggtacacatgcaggtgacacacttgtatatataaagtaaatgtaaaatgaatctttaaataaattagacatcctcagggtgggcccactcagagcctgcctttgttaggggatcatggctcaggcacctgagtggctgatagcctgattcaccctgtatctcccagatcactgcagacctgctgtccaacggcattgacgtgtacccgcagaaggagtttgatgaggacgcagaagaccggctggtgaacgaaaagttccgggtcagtgggtcaatctgcctctgggaggtcaggggcggtggacagatagacgggaggcagtctgtccactctgggtcctctgaaggcaaggcctgcagttttccaggcccaagacacagggtgttcgagggtggcactggccctgccgatcactgtgactaactcttccgtccctctttcaggagatgatcccatttgctgtggtgggcagcgaccatgagtatcaagtcaatggcaagaggattctgggaaggaagaccaagtggggcactatcgaaggtattggctgctatgctgctgcagtgttgaagctgtagttgggcctgggccgtcacccattgcgctgtgggtccctgtctcttgtaaggacactggctgtagtgtgcacctcatgtacaccagggtccctgaatttaatgactttgccagacttttgttactttgtcccacgcactgagggctggggctctgaactttcctggggtccagcaccccaggtgggatgggtccagggattttcttggctcttctctctactcttccaccctctttggaacggaggatggggaagggcagagctgcctggaagatgaaaacccactttgttccttgtgaccagtgtggtcaaaaggccccacagagaagcagagagttgaggctttgatttgggggaaatcccagttctctagggccccagtcttgcacccttcataggtgcaggctagacctctgtcctaaggtctaggcaaaacaggatggagcccaggatgacctggtactcaagtcctcctgcttggcctccggagcactgggatcataggtgccacaccccagctgctggaactctccgaggagcagtttactctaaggctctggtctggttggtgcttcctggctctgggcatagaggcctccagccaggaccaccctccccatagtggattaccatttaaccctttcagttccccaggtccctcccgctcatccttgtccagtgccaactcaaccttcctttaacacagttcctcatgctgtggtgacctccaaccataaaattattctcgttgctacttcataactgtaagtttgcaactgttacaaatcgtgaacatctgacactagcaggatgcctggggttgtaagtttgcaactgttacaaatcgtaaacatctgacacgcaggatgcttggggttgtgacccgtaggtggagaaccactgagtcactgggctagtaaccattggtcaggtgcttgccttgaattaaatgagttccacactctgccccccagaaaccaggtttgctgtttctgtgctgtttctgcgggatctatgatcttagtctttgagatgtggagccaggagggtcagggactccttcattttcacccaccctacagtgagctcggagccagcctgggctcccggagacactgtctaagaagaaagagcaagggagggaaagcagagtaagaaaacagaatgaatggacagccagggctccatactgggaggtggtctggcatgccacgtgaagccttgcactggagaccctggagttggaattgttgcctggtctttctgaggtgaccgctgaagagggcctgtcttccagcccctcccttcccctactgtgccctcctgtgggtctgccaggtggggtgtcctggggacagtctctgggtggttttggtgcccgtggcctcctgtagcactcccctcaatgtcaggtgttgaccccagaagtgactctaggggcctctctgaagctgttctctcaatagcttgtcctcagcttggttcccctcagtcgttccttcccatctttgatgtcttcctcatcctctaaatcctctccaggaatatgcaaggcaaggtttggaggagtaaagtttggggtaaaagccctgggactctaggagaggcattggatactaacgtgtctcttctggcccctgatggccaacttgggtactgcatgcactcaatgagaactcatttagccaggttagattactgttcccagctaaggatccaggcagcctctgggtacgccccctggtggtcgttcccacatccagcatccttgtaaagtgaacctggtgcaagttcctatcagggaccctgtgagttcataacttactaagtcccatccaatggggcctactcctaatccttggtacgcaccatctgaagtgtctgttccatccttggaaggtggccagagtactacctggaggatggaaagctacttggttcctcaaaagcgtcacaaagtcagaatacatccttggctcatttggtcttttgtgcccttaaggtccaagccatgctgatctcccgtttaaatttctcttacatttatttattaacttatttactttattggagggagagggcacgcacatgccaaaacacggatgtagtagtaagacgacagcttgcaagagttggctctcaccttctactgtgtggttctgggaatcaaactgcagtcattgggtttggcggcaaatgcccttatctactgagtcatttgctcattttattgagaaactgggtcagagaagccaacagaactcaccccagtccagaacacaaggaatgaggggtttatttgggctcacggttccagggtgcagtccatcatgctggggtgtcatggcggcacgacaatagactgttgatcgctgtgtatccgcagtcaggaagcagataaataaatgctggaattcagttcactttcttttttattcaactgggaaaactcggcccacaggatagtgctgcccacattccctgtgggtcttccctcagctgagcctctcatagacacactagaggcgagtctccctgttgactccgaaaccatcgagtggctgtcaatcatcctgcccagtgggcggggctttctggaagctgttggctttcccggggaggagaggaggggcttcctccccactgatcatctctccttctcttttccttagttgagaataccactcactgtgaatttgcttacctgcgggatctccttatcaggtgagtcagctctgaaggccccttgggaggaccggctctgggggttggtggtggtagatgggcgggaaaggccccaccctggccgcctgatgtcagccctgttctcgggaactgagctgaaaacaagctaacagaaacctgggaatggatgaagaaatgaggattctttctaacctttcgaagtcaccaggatgagaggggctccatccggtccccagtgggctaaacatgctagattcagctatggctactgtccacacagcacagcctggactatatgtcccaaacaaaactaacaaactaaaagaaaaaattcatttgtgtgattaatatacattagtagaaaaagtcctgccaggcaggactgtctgagggcctggggtggggattccaggaataaagccttccgggctcctcacctttcccactccccttcccaaagtaaagaggaggggaggtctgcagtgtgggccatagatagaagttgcctggcaggctttaaggctctggctcccacctgcaaaaagaaactttgtttaaaaagtcagtttaggaatgtcagggtaggcagcgctggggactgtggtcatctgctgcctcctgctggccacagcatgaatttctgtcttggagcacgaatacccaagtcctgctcactggtgaagaaggccttgagaccttccacagctttgtgtttttagtgcccagttctccatccttgtgcaggcccctgactagccaatgtgaacacagagacgggggtacgggttagaatgtgaggccacagaaggtctaaagttaccagagagcgagtgaacgccacctggttttgctgggtatgcacagagagcctgcaggatggctctaagagccaggaggggcaggcggttgtcatcccaggcaggctaagtggtcaccccctcccccccaatgctggccatgttccctgcaggacgcacatgcaaaacatcaaagacatcaccagcaacatccacttcgaagcctaccgagtgaaacgcctcaacgagggcaacagcgccatggccaacgggatcgagaaggagccggaagcccaggagatgtagaatgcgtcccgcccctggaccccacccccagatcttttcatcatccctggcccacccacctaccctgtcttattttatataattatctccttgtcacctgcctccatccatctcttcccacactttgccaggtaacaagagagggtttacctcccaagtgtgctcttattggctgcagcagcagggtgggcggggctaagcctgggcttgcctctgtgctctatttccacccgggctcagcccctgaggggttagaagagctatgtgtccgtcccccgctctgagttctaagctgaagcctgtgggggccaagtcctagggggtgcagaggagcccgttagaccacaagaccccatggccgcagcctcaagcaggttagagactgccccaaaggaggatggagctggccgggtattcctgaaacctcacctgcccctccgggggcgtttcttacagcgccctcagctgcctgcccctcaagggaactagaggcgtcacagccaaagttgccaatcacttagacaaagtgacaaccgtgcccctcgagcttgtcccagagcagaaagtgccttgatctacaagagccagtcacctcttcccagatgtccctttgggtgaaaagcagggacgtgctggagagagggaggtatcttttctccctcgcccttgggttctctctcccctgtgctgtagatatcgctactacactgggctttaattataaaagacgaagcgtgaaagatgctccccgatgttaggaagccccgcccccaatgtaaggaaggtcaaagcaagaagatgagtcgaagccatgagggaggaagccgtggaagggaggcataagagtgtgtgggagctctcctgcccaggtgccgcggaaggcatatccgcgtggtcctcagtttgggccaagatattctggttacattgatgctccgctgcctcaccctgtcccaccccacacaccccaggctcaagccttgatgattcagtgactgtactgggtgggagccagaaacctgaccattttgttgtctacatgagcctagactagccctgtgccccagaacccatcaaaaatacccctaaagagggaaagatgagggggtcagagatggatagccaggctcactcatcttctctcagagggaacattagggaccatccatgcacagctgaccaaagccgtgtccttcctgcctgcctcccattctcatttgcccctgaggagaaagtttggtgaggtgcgttaggttggacccgcttggggaaggtgcctctacagacccagggctagctttctgcagcccagaagtgcagtgggaggggtggggtgcagacagatggagacgaacattgtttcctgctttgggcgtctactccctcatccaagcatggaagggcccctcgtcatgccctgtggccgaacagttcgcttgccagcttgccaagttcttttgccaaaatcaggactttgaaggaaatctccagcacgctggacccagggcactccggccttcaccagcccaagtgaccctggggatttagcagcaacccggtcatcaggatgactttgtgcctctgtaaccaggtattgaaactgttcgtctcaccaggccggtccacgtggccctctgctgggggcttcctggtgggggggcagaaaagtctctctctctctctctctctctcttttttttttttttgtataaataacaaagtgttgaaatgtatttcctgaaataaatgtttcaaatacaaactttttttctggagttctctttggcaagacctgtctggtccattaaaggtggtgaggggagcacgggagtagaggctcccagtggaaggaagctataggactgtgtgagatccagaattaggaatcagcagcccagtggtgaaaagttagccacacccactgcctgtaatccagcttgtgggacatctgacgccctcttctggcctctggtggtacctgcacacatgtggcagacacatatacacataaatacaaatctaaattttattatgtgagaccctggtaactggccatttataataatgttattccaagagaactaaaccatgtgtggtcccaggaggctggctgagccaaccagttttgtgtacaggaatcaggaaaggggagggtccctctctgtgtgctttaatgtccccaagctcctgtggcaagtgactgcaatccagacaccctggaacaatactagtgtacactctcaccattcggaagcccgggaccgagtgttggcatggctccatccccagtcccctgccacccctgctcctggggactgcgttatttcaggtccatgcactttgctcttgagggacactcgtttcagcccaggataatctcatcttgattttaattacatctgtaaagatcctgtgttcaaataaagttttattctaagcttctgtgcaggtgggaatctggggcgatcacctccccacattcccttcctgcgtctcaggggttccagagctacagggacagcatgagagaacaacccgaggctcgtttgcatccaccaagccgagtgagtggtctaaggagtgaccctacctctctggcctgcccacactcttccgaaggccacctgaagacaaacgggcttcatcagccaatgagttgtgctcagcggcctcatggaaccaagcatcaagttgttgattttggctgttgatggcactggtagagggggtctggtccatggaggcagcttgcttgagtcccccagttctaagttccttgacaagtacacctcgaattcctccttcctcaagactgaactgttctctgtgcatcgccagtcccctccagccccaggtgcttaggcagtcgtcagctcattaacctgactggccaccagcccagctcacccgcacctccaagccagtgatgggggaaacctcacctcccactcaagcagacactgtaggaccagagtggccagccgttctcatctgcccaggaacgtgggctttcttgtgcctcctagctagcaatgagggaattctcacctttctactctccacagtaccggggttacaggcatactaagaggaaaaaagttcaggtgctgggacccacattcaggaactcaagcttatgcaatgtgggctccagccctgaatgtaaatgtgggctttccatggaactatcagagctagaaccaaagggaggagggaggggaagctggacaaaggacaaggtggcttcatggtgtgggaccccatgccagtgactttcttccctcctatccaactccagtgtcacatgtagccagctgggacagtggcataattcagaatggactgtcactaaggcaggagcgggaagaccctgcagcaggccctgctcttgatggcttaggcctctatgagatttggggtatcctgcagagtctgaaaatgccaggcatccccccccccattacaggcctcagggtttaaaggcaggaaacagaaagcccctgggagccactggagtgaggcctgctcagtgcagacctctcaggctggtcaaagtctgaagcgcttgctcagagagcaccgtgtgaggctctcttgggttttgtttgcaggtatcccttgtgtgtgtgtgtgtgtgtgtgtgtgtgtgtgtgtgtgtgtgtgtggtgtttgtatgcatctgtgtgcatgtggaggccagaggacaaccttagttgttttgtttatttacttgagacagtctgggctagccggccagcaagccccatgggtctgcccgtttggccactttgctgctggggttatgtgtatgcctccatgcctggctttacccgcttctgaggatcccaacctaaggtcccgtgctcccataacgagcaccttgctgactgagccatctctccactcaaaagatcaaagtttctttatttaatgtgtgtagatgtcttacctacatgtatacaggtgtgtgcctgatgcccgaggaaaccagaagagggggtgggatcgctagggctggagttacagactgccccgtgggcgctgaggatggaaattgagcaactggttaaccacggagccgcctctccatctctgtactcgcggttttttttttttttaaagatttatttattgattatttgtaagtacactatagctgtcttcagacactccagaagagggagtcagatctcgttatggatggttgtgagccaccatgtggttgctgggatttgaactctggaccttcggaagagcagtcgggtgctcttacccactgagccatctcaccagcccctctgtactcgttttaaaacaccactttctggctacaattctagccttatttaatatagaaaatgcagaaaaaattacacaacagagaaatagccccattcacacccagtaatgttgcctatcctgacactggggcacgggcctcagactctggggagcgtggtggtgaccccagcatttgagacaccgaggcaagaatctcaggggtttgaggtcaccatgggtatggctgtgcaccacagcccccaaccctgacccaggcccctgtgtcttctgcccagaaggactcctcagccaggggcttgcccttctatgcctctctctcctctgacctcttggaaggaggggggagggagaaatcttgtccccatcctcacttcattcccctgcctccctcccacccctgcactgtccctttagcccattggggaccagtgtaggattgaggtgcagttcctgagttcaagtggaaattccttccagatgctctgctgcccagagcgcagacaggaggggcctatgtagcagctgagtgcccatgggaaggatgctgtctggccccacaccaatacagggcggcagtcacccaacatccgttgctaggagcccttagagagtcctggtgcagagggttgtctgccttgatgcccagtgggtccatcaggcctgaagaacctctctctatgccgcctccaaacctggtttcctgctgccaagggccacagccggaataagacctataaagtggtgttagtcaggcatgctctgccagcctgccttatgccagcttacgtcatcacccacggcggccaggtacagggcatttccactggggggaggggcaccccatctggtctttctgtctcctggtctttctgtctgtccgtctctcccatattaccacgccgagaaggcctattactctctccttttcccagggaatgtcttgcattagatctgttgcgtgatgtgatctcttaacggtgcgccttgaccctggaccagccaacagtacattttctctaccttatcctaacagtaagaccagaattagaggcatcacacacagactatgtgtgatccctgcactctgcaaatggaagctggaggccagagaaccagagcccagactggctatatacaaaccctgtccatgaaagactaaagtaagacttaataaagaaagatgtaaaataagactcacatcactgataactcatacagtacctgcacactataaaacatttgaacagtaggcatgggaacagcaaatagtgacagtgacttccagttatatgatatatattaaaataaaaaataacatataataaaatataaaaataaaaatgtatgcatgtatgtgtgtgtatgcatgcctgcgtgtaggatgtgtgtgtgtgtgcgtgcctgtatgtagggtgtgtgttgtgcatgcatgactgcatgcatacatgtgtgtgttgcatgcatgcatgcatgtgagtgtatgtactcacggtgcacatggagagaggacaaaacaggagatcaagagtctctcagtgccctgtgacaggtctctcattgcgcgagaagcttgccattttgattaggctggccggccagtgaacagtcaggatcctcttgtctctgcatccagaagtacaagcagggattccttctagagccaaagacaggaaggaggttctcctcctctctcctgcctgctaaggtttgaatgtgaaatgtctctcacgggtttctgtgttggaacacttgttctccagcaggtggcgctgttctgggaggttatggtgcctttggatgtggagagggtgaggcttgaggtgcaggctggcccttcttcctgatctatagagattcaaggaagctgcagcacaagccttcctaccacactgggcagtatctccatcaactacaagccataaaaacaaaacaaataaaaatcctcccttaagtctcttctatcagatatttggcaacaatgataaaataactgtaattctttgtgcttcctctgctcctgtccagccttcccttcctggcttagggatagccagagcctcctactgagtgagcgcctgcgtgctgacagtgaattttaggtcagaggtgtgatggttagtcctcattgtcaactggatttgggaccacctaggacacagatgtgtttataagcacatttctaggatgtggacagcgccaccccatggactggcgtccttgagtgaattaaaaagaaaaggaaaactggtgagcccttccaaggaccagcatgcattgctccacttcctgcctgtgagcaccatgtggccagctacctccatctccttccaccatgatagactatcacctctccaaagcgggctgaggtcaaccctcctctcctgagggttcttgcatcacatatttctgtcacagtagcaagataggtagagctgagacacaaaaccaccccagcggtgcccttcctagattgcatacggaagcattcctggaggcacaggttcaagctgggccagtggacaggcggccctcagtagtgccggagggtccctcctatatcaatgtgactcagagggcagagtagaagtggggtgtctctttctgctgtgtggccttagacaagctctgttccaccaacagggacatggccactaaggcattgtttgatgccaatgaggaaggagggaactctgtgtttcattgctgtgataaagagtccaaggaaaacagctttgaggaggaaagatggattttggctcagaggttggaggtgtcaagccacaagcccgtagcaggacagattctgcactaagcctagggccacctggaccttgcatcgactcaccaggttcaggtctctccctatcacaatgtcaccctttcttcagccatggcaggtgggccttcttagcatccgtggagcctgagcatgtgtgttcgtgtgtccaatccagggctttcccttacatactggagaggcacagcagcactgtcctgctctgcaggatcagatggacccagatcacatctgaaacacagtttcctagggcaccgggacttcaccaccatttgctagtgggatctttctgcacccagcgcagctcctgagcacctgggatgccactgggactcatgcaagttgtcactgaatgagcaccgagcgctctgcggaaagatcatcttcctttcctttcgtataaggtgcttataaagaatctgaagaaaatagggcatgaataattaaggctgcccagagcaaagggatcttgatctgtctgcttgaattaaaaaaccatcactcggaggggcctggatgccagagagcatctgtaagatgtctttacccacagtgccactgcctgctcttccccctttcactccctccctcttcctccccttcttcctgtctctcctggacaccaaggacatcagctcttcagacagccctgccacccagactatcaccatggcctcttctctctccctggttaataccttcatcctaggcccaaagagaaacggcttgacctctgtagaagggtccttttgtgggagacggggtccaggctgggatgctcaggagtcccagaagcacagtcacctgtccagccaaggtgggcaaggctcagaactagggtttgtacctctgtcatggacttggggcttggggacaggcctgtcactgacttttgcctctgcctctttttacagagttgtggctgaatctgtaggatttcttgtccttgggatggcagctgccagggggttcaggggaggctgggtacggggacgtaggatctgtttgtctgtctagtttgccatgctggggggtggggggtggatctgcggcctttgcaatatatggtaggcaagtgctctcccctgagcaacagcccagcctctcgagctcttcagatgtttctatccctgttgaaatccccatctgttcacatgaagacctgtcctctcctcactgttcccccaataggtcttttcacgtatttttagttacttcagtgagctaggaccttgtctgttacagtttgaatgtgattgtgccacaggcccctgtgcttagtcccctgctggaacaggagtctgggggttgtggaacgcttagaaggtggagctagccgcaggagtggccacagctcttactctgagctctctgatcagctccatatagcagctgtcccctcaccctggccaccaggagccacgagcagccatgtcttccccaccatgaccgacttattatttatttatattatgtagccctggttgtcctggaactctccgtagatcaggctgtcctcgaactcacagagatcctcttgcttcagtctcctgcgcgctgggatgaaagctatgtgccccccactgctatggcagacttcttaaactgagtcaaaagaaccttccctcctttcagttccttctgctgggtattgtattgcagcaatgaaaagggaaattaacgttgacaaataacccccacattcctacctcatgatctcatgatcttgttttcttgctttttggcatatcctgcaacttattcctctgtccccaaatcatgccttttaaaaaaaaagtcaaaaaatggaaaataagcctctctccctgaagttagtgtggaggagagaaatggatgttgccagaaactctgacgtgggtagaatgttcttatacgcggggctgtgtcagaagcttggaggtgtggtgctgtggatgaaaacagccccagtggctcatatatttaaatgtttggttcacagttggtgggactgtttgggaaggcttaggaggcgtggccttgttggaggaggtgtgtcatggagggtgggctttgaggttttaaatcctatgatacttcccgtttnnnnnnnnnnnnnnnnnnnnnnnnnnnnnnnnnnnnnnnnnnnnnnnnnnnnnnnnnnnnnnnnnnnnnnnnnnnnnnnnnnnnnnnnnnnnnnnnnnnnnnnnnnnnnnnnnnnnnnnnnnnnnnnnnnnnnnnnnnnnnnnnnnnnnnnnnnnnnnnnnnnnnnnnnnnnnnnnnnnnnnnnnnnnnnnnnnnnnnnnnnnnnnnnnnnnnccctccctccctccctcccctctgactcctgctgcttcaggtatcagttctccctgctgctccagcaccatgcctgcctgcctcctgccatgccccccaccatgagagccacagactcgccctctgaaactgtaaagcaagcttccaaataaatgctctattctataagtccccttggtcatggtgtctctccacagcaacagaacagtgactgacacagaggatgtgatcgtggctcccggaagctggtgtagccacacaggtaccgttgctgtagagagatggtatgacctcctgacatgccagatgttacagatgtgaactgtgaaattcacactagggtcatcctgttcacacttactgtctgcctgaatgaccttaagatgaccttgaaaatccccccccccctccccaagtccactggctgcaagggactgctgatcttgtgagttcaagatacatcaaaatcccagccagccagcatccacctgggctggcaggctccacagctcccctggagactccataggattcactaccagaaacctggccctgatctctgtgtcttggcctccattgtaataggggcctccgttgactccctgcccagattcctccagaatgttctggcttttgtcagttcaaggctggccctggcagccgtggaagcagggagtgtgtgtctaataaagtcagcgctctgtaatttagcaattactgaaacccacacttgtaatttagggggtttcttgtaattctttgtagtctttatctctctttgaacaaatgtgcagcttaatagcttcctccatcctgttccaagggttggtatttgccacccctcccccactcagctccagttcatgaaagtgtctagattgtgtggaagccactttccagaatccaaaaggttaatttaaaggccagccttccccccaaccccagtgctggctcctgacagtcaagcagtatctccagggccccgagtttggcactccagctgttggttgggtagatggcgtgatccaccttcggcagggtctgtggttgggccattcccattgctgacctctgaccctttgctcaagcagttactaaatactttggttttgagactccgttgggaatcagagccatcaaggacgggctggacctctctctccagaggccttcagtctagtgagaaaaggatggctggctgtctaggacgtcacaggtcccaaccgagctggcacccgggaccatggcagccaagggaaccaccctgtcagaatgagctgtaagaggagggaatgggagtctggtgcggaggaggaagagggacaaagcctgaggaggagccctacagagggcacccagtttttagaaactgtatttgaaacagctttgggtcgaggatgtggctcagttggtagagtccgtgcctgagagtcttgacttggttcccagtgttccgtgagtgtgacaacacatgcctgcagccccagcacatgcctgcagccccggcacatgcctgcagccccggcacatgcctgtagccccagcacatgcctgcagccccagcacatgcctgtagccccagcacatgcaagttgcagatggtctgtcctctggaatcataaaccaagtttgagacctccttaaattgcctttggtcattgttggaaacaaaaaacagggggtgggggccagtggggcggggggagaagtgggggaggaaaaggggtctaacatccggccagagttcctgtgctctgggcaggcagacacaggcagagctgctggacacttttccattcggtcccgggtgagcatgcctgacccacgcagcagggggtggaaaaggggcagctcctgactggggatcccaagctaccttgctaaagccccagggctgtaggagagagggaatagggaaggagttcccaacactggcaagagagtgcacagcggatctagatggaacagagactctcaatagtttaaaagctttattatagaaattcaggggaaagagagaagatagagagagagagagaaaggctagagagaaagagagagagagaaagagagaaagagagagaggagaagacaaagagaaagggaagaggagagagaagtgagaggtaagggaacaaaggagtaagagagtgaggtgggggcctaacagccctttttatggtcttcactgttgctaggtaactgaggaggagtttggcctgaaggtcagaagcttgggccattgcttatgtgactactgaccatgctggatcaagtgtttttggtccctgagacatctccctgacctggaatgagggatccacttgcctctgcttaccaggccagatgccttgcttgaa

SEQ ID NO: 1541 - DNA, 2942 bp, Mus musculus
aattcggcacgaggcgccagaacacaaccggagtccctgaggctccagaacagagtcagggtgagccagccccagcccagccccaggttctggcttcctctcttgcttctccctcctttggttgcagccagcagagcccacttaaactccgaggtgactcccagctgtgttggcgacatggctgacaaccctagagatgccatgctcaagcaggcccccgcgtcacggaacgaaaaggcccccatggagttcggctatgtggggatcgactccatcctggagcagatgcgcaggaaggctatgaaacagggcttcgagtttaacatcatggtggttgggcagagcggcctcgggaagtccactttaatcaataccctcttcaagtccaaaatcagccggaagtcggtgcagcccacctcggaggaacgcatccccaagacgatcgaaatcaagtcgatcacccacgatattgaagagaagggggttcgaatgaagctgacagtgattgacacgccgggcttcggagaccacatcaacaatgagaactgctggcagcccattatgaagttcatcaatgaccaatatgagaagtacctgcaggaggaagtcaacatcaaccggaagaagcgcattcccgacacccgtgtccactgctgcctctacttcatcccagccaccggccactcgctcaggcccctggacattgaattcatgaagcgcctaagcaaagtggtgaacattgtcccagtcatcgccaaggctgacacgctgaccctggaggagagggtctacttcaaacagcggatcactgcagacctgctgtccaacggcattgacgtgtacccgcagaaggagtttgatgaggacgcagaagaccggctggtgaacgaaaagttccgggagatgatcccatttgctgtggtgggcagcgaccatgagtatcaagtcaatggcaagaggattctgggaaggaagaccaagtggggcactatcgaagttgagaataccactcactgtgaatttgcttacctgcgggatctccttatcaggacgcacatgcaaaacatcaaagacatcaccagcaacatccacttcgaagcctaccgagtgaaacgcctcaacgagggcaacagcgccatggccaacgggatcgagaaggagccggaagcccaggagatgtagatgcgtcccgcccctggaccccacccccagatcttttcatcatccctggcccacccacctaccctgtcttattttatataattatctccttgtcacctgcctccatccatctcttcccacactttgccaggtaacaagagagggtttacctcccaagtgtgctcttattggctgcagcagcagggtgggcggggctaagcctgggcttgcctctgtgctctatttccacccgggctcagcccctgaggggttagaagagctatgtgtccgtcccccgctctgagttctaagctgaagcctgtgggggccaagtcctagggggtgcagaggagcccgttagaccacaagaccccatggccgcagcctcaagcaggttagagactgccccaaaggaggatggagctggccgggtattcctgaaacctcacctgcccctccgggggcgtttcttacagcgccctcagctgcctgcccctcaagggaactagaggcgtcacagccaaagttgccaatcacttagacaaagtgacaaccgtgcccctcgagcttgtcccagagcagaaagtgccttgatctacaagagccagtcacctcttcccagatgtccctttgggtgaaaagcagggacgtgctggagagagggaggtatcttttctccctcgcccttgggttctctctcccctgtgctgtagatatcgctactacactgggctttaattataaaagacgaagcgtgaaagatgctccccgatgttaggaagccccgcccccaatgtaaggaaggtcaaagcaagaagatgagtcgaagccatgagggaggaagccgtggaagggaggcataagagtgtgtgggagctctcctgcccaggtgccgcggaaggcatatccgcgtggtcctcagtttgggccaagatattctggttacattgatgctccgctgcctcaccctgtcccaccccacacaccccaggctcaagccttgatgattcagtgactgtactgggtgggagccagaaacctgaccattttgttgtctacatgagcctagactagccctgtgccccagaacccatcaaaaatacccctaaagagggaaagatgagggggtcagagatggatagccaggctcactcatcttctctcagagggaacattagggaccatccatgcacagctgaccaaagccgtgtccttcctgcctgcctcccattctcatttgcccctgaggagaaagtttggtgaggtgcgttaggttggacccgcttggggaaggtgcctctacagacccagggctagctttctgcagcccagaagtgcagtgggaggggtggggtgcagacagatggagacgaacattgtttcctgctttgggcgtctactccctcatccaagcatggaagggcccctcgtcatgccctgtggccgaacagttcgcttgccagcttgccaagttctttgccaaaatcaggactttgaaggaaatctccagcacgctggacccagggcactccggccttcaccagcccaagtgaccctggggatttagcagcaacccggtcatcaggatgactttgtgcctctgtaaccaggtattgaaactgttcgtctcaccaggccggtccacgtggccctctgctgggggcttcctggtgggggggcagaaaagtctctctctctctctctctctctttttttttttgtataaataacaaagtgtctgaaatgtatttcctgaaataaatgtttcaaatctcgtgccg

SEQ ID NO: 1542 - DNA, 1005 bp, Mus musculus
atggctgacaaccctagagatgccatgctcaagcaggcccccgcgtcacggaacgaaaaggcccccatggagttcggctatgtggggatcgactccatcctggagcagatgcgcaggaaggctatgaaacagggcttcgagtttaacatcatggtggttgggcagagcggcctcgggaagtccactttaatcaataccctcttcaagtccaaaatcagccggaagtcggtgcagcccacctcggaggaacgcatccccaagacgatcgaaatcaagtcgatcacccacgatattgaagagaagggggttcgaatgaagctgacagtgattgacacgccgggcttcggagaccacatcaacaatgagaactgctggcagcccattatgaagttcatcaatgaccaatatgagaagtacctgcaggaggaagtcaacatcaaccggaagaagcgcattcccgacacccgtgtccactgctgcctctacttcatcccagccaccggccactcgctcaggcccctggacattgaattcatgaagcgcctaagcaaagtggtgaacattgtcccagtcatcgccaaggctgacacgctgaccctggaggagagggtctacttcaaacagcggatcactgcagacctgctgtccaacggcattgacgtgtacccgcagaaggagtttgatgaggacgcagaagaccggctggtgaacgaaaagttccgggagatgatcccatttgctgtggtgggcagcgaccatgagtatcaagtcaatggcaagaggattctgggaaggaagaccaagtggggcactatcgaagttgagaataccactcactgtgaatttgcttacctgcgggatctccttatcaggacgcacatgcaaaacatcaaagacatcaccagcaacatccacttcgaagcctaccgagtgaaacgcctcaacgagggcaacagcgccatggccaacgggatcgagaaggagccggaagcccaggagatgtag

SEQ ID NO: 1543 - DNA, 96595 bp, Homo sapiens
  misc_feature (47135)..(47940): n = a, g, c, or te.
tcccagcccagcttctctgtagatccacatctggccaatctcctatgtctgggactcttgccctccccagaaggacgaaggctcttctcgaggttgtgtttgggactgggccagggatgacatttctggcaaaagcttaaatgacaccatgatcaacgctttggtcagctcacacactttctttccttttaaaaaaaaaatggaattcttagagctacaaaacaaaaatgtaaagaataaggtaataaaacacctgtgtactcaccatcccgcttaagaagtgagacattgcaggtgtagccgcagccctgggtgaccctctccatcctagccccactcctgctgcggtgcccgcccctctggattgggatctggccccgggcaggcacatctgtgctgggcagtggtgtgtctgagaagcctaggtctccttttttttttttttgagatagagtctcgctctatcgcccaggctggagtgcagtggcaccatctcggctcactgcaacctctgcctcctgggttcaagcgattcttctgcctcagcctcctcagtagccaggattacaggcacccgccaccatgtctggctaattttttttgtatttttagtagacacagggtttcaccatgttggtcaggctggtctcatacccctgacctcaggtgatccacctgccttggcctcccaaagtgctgggattataggtgtgagccaccgcatccggcctggtctcctcttgcatacggtcatcagcatcgtgtgactgagcagcctaggtctgtctcctcttgaatgccgtcatcagcatcacatccttggtgcctcactggagtcagtggctgccctgcctgtgcccacaacgtgacggcgtggagacttatccatgtagatccacgaagccttggttcacttattttggcagctagcgagtgttcctctgtgtggggaggcagagtttgcccgtcccgtggcccactggtgacatcgccgaaggtcttctctgttactagtgctgccgggaacgtgtgtttccccaggtggatttggctgggctgtggagatgcgcttctcagcccttctagatgttaccaccacgccctcccgagtggccttctggtaggctctcccatgttcgctcattttctgtgcctcaggcagccgcctctctgactgagcgtccagctgacttttgccctgtttcccacggtgcacggagcatttcatctcagtggtgcctgagcttccctccctctggccctcagaccccggctgggatccttggagccaactcctctgcctgacatcccgtgtcgctaggtcctgctcttccatcttccaatacctctggggtgtgtggccttttccccagtgcccccatcatcccttctgtcctaggttgaaccgtgtcccccacaaactcatgtccaccaaaaacctcagaatgtgacctgggagttggagatggggtctttgcagatgtaagtagttaaggatcttgagatgaggtcattctggattagggtgggccctaaatccaacaactggtgtccttaaaagaagcagagaggccacagacacaccggggagagccacgtgaaggcaggagcagatgatggagtgacgcagccccaggccagggagcgtctgggaagaggcaaggaaggaccccccccccaccccaccccagagcctccctagggagtgtggccttgctgacaccttgattttggacctctggcctccagcatgggagagaacccgcttccattttttcaagccccacagctgtggtccattatggcagccacaggacactgatgcacctcccacctggccgctgtggatggacgaccccgcccgcaggaagtctccctcaagcactgcaggtgtctctgccctcacaggggacgcctgcacaagtaggtgtgaaaaaagggccctgtgggggcagggcctgggctggtgctcgctgcctcccttcatcctatgctagttcccatgcctcttccggcaggagtgcctggctccacctggtgaatcagagccaaactctcctgacaattggctgtcacttatttaactgccaccatccccaggagacagaaaatgccagaagggtggggcctgtgcagtgcctcctcgctatttccccagggcaccgtgccacgttgcctcaatgcacagagtagctgctcaaagtgtgtcggacgaacaggtgccccatgcccagccatgcagacaaaagtgtgccacgtggagggagctggtcgtggaagagaccaccagcatcttggctgcccgaggaccttgcccctgggctcttgcaggcacccctagttcattacttcctctctcacccatagctacccgctcttcctctatttctctgatatcagccttgccacccacccaggtttgcaagcaggaaatctcagagttgaccttgacctctgcctccccagcacccccaggtctcaacaggctgccaagatctcatcaactcgccctctgcatactgacccttggacaggctgccccggtcacggtcatgtcttggttgggcctccatcatccctccttggaccagcaggtgccatcctccccacccctgccctgctgtggctccttcccctccacggccaacatttagaggacgattaccacttccctccctgtgtgctggggaccgggtgataggatccctccacccgatcatttccattagacctgggccgggtcttcttactcacagagcccttagtttccgcccccaaagcctcgagggtggattcgtgctgccgcccagcctggccctgataccgctttccagcctggagccccctgcttctgcgctcctggctctgagtgctcgggccccccctggatgggttgccacttgtcctctggaaagcagggcttccatgctcctggacctcctagctgactcaggtgactttgggccatcttgtcacaccccttctatcagcttggccttggttatttctgtgtcctccatagcctcggaccagagccacggcgggatgctttcctggtgcgtggcaggcagtcaggaaatattgctggactgaccttgataggagatgcttgggagaattgcccaaaaaactagcttaaaatgcaaatattggccttcttttgcgttggctaaagagtagcatttctccgtttgcctcccgggtaagaaattgatggcgaatgcaatgtctctagggaggagaagaaggtgacaaaaagggtctgtataacggggcacacgctaggcatttgtgactatttaagtttaaattataacataaatgcgaaactctttgccttggtagcccttccacattgcaagcgttcactgccacatgtggctgccatattgactacggcagatacagaacattgacatcattgcggagagttctatgggggggcgctggtttagatcatcttcacgttggatccacaaattcattgtttatccagtgaacggttactgggcacctactgagcaagcaggatgaaagacacccgctctcgggggagtcttccgttggctgcagagaagcttaaactcaggggacctggggcaaactctgcaagggcccttggcctctgcacccccagacctccctcgctctgcaggggcagtcgggggccccctctaggaatggagcgccagctccagctcctgtcaggctacagcccagatggttggctgagcacgagcatgtgagagtggaattgggcccaaccgggctgcttctccccgttgtcttggtttccttccacgctgacctggaaggactcctaaagcaacaggcctgcccaggcggtttgcaccagtaaaccctgcagcggccccaagggcagagatagctggattgtatttatttaggaacagccaaagtctgaggcacaataaaaagtggagaaagattccagagaggaatgcagctggcctcagcctgggaatccgtcttgcttgggaggctgtaggcgggccaggctggggccagcctggagggtcttggctggctctgctggcaggtacagtagcagggtcagcaggagggagtccaggacggagctccttcatttttaattcagggaagcaaacttcagtggttgagtctgaggatgagcaggaaatgaatggaaaagtcttttttttttcttttttctttctaggcagggtctttctctgtcccccaggctggagtgcagtggcacaattatagctcactgcagcctcaacctgccaggctcaagggatcctcctgccttagcctcctaagtagctgggactacagttgtgcgccaccatgactggctaattcttaaaagaaatgttttcaggctaggcatggtgacccatgcctgtaatcccagtacttttggagccgaggtgggaggatcacttgagctcaggtgctccagaccagcctgggcaacatgacgagaccccgtcttgactaaaaatacaaaaagttagctgggcgtggtggtacagccctgtagttccagctacccgggaagctgaggctgcagtgagttgtgatcacgtcactgtcctccagcctgggcaaagggagtaaggccctgtttcaaaaaaaaaaattttttttttttttgaggtggagtcttgctctgttgcccaggctggagtgcagtggcatgatcttggctcactgcaatctctgcctcccaggttcaagtgattctcctgcctcagcctcccaagtagctgggattacaggcatgagccactgtgcctggacttttttttttttttttttttttgtagagatgggatttctctatgttgcccaggctggtcttgaactcttggcctcaagtgatcctcccactttggcctcccaaagtgttggaattacaggtgtgagccaccacacccagcaggaaaagtcactttttaaagcgagaggttgtgcgtcctctatagcttggcgctcatcagcatggaggatttactggaacgtgtgttaggtgaggggacatggaagatggcagcaaatccgagcccagagcatcagaaagcatgctttcagccaaagatgcgttctctccacctccgcgcagcacccttccccagtgtgtactcctggagcaaggtggggccgatcctacgaagaccctttcccgaaggcccctgctgcccacatcagtgtcacctggaccgcctgctcccttttctggatggctggaccagccccagggcctcctggcctggtgtggggagcacagtccaccctggggaatgcctggtatgtgtcccctccccactgggtaccaggggatgaagctgtgcttcgtggaaggggacagaggcgctggtgcccaggatggtgcacctggggcggctgaactggacctggcccctactgggcccctgtggagcccagattgttgtgagaaggggtggggaaaggcaggtgatccgcacctttcacttttgtttcacatgggaacaggggcttatcctgcacacatattcagtttggagtatgaatttccatgaagaggaaaatctctattaggctctgatgtcaggattgtccgtgagggccgggccgtgttctggggcaaggacaggagtggagggggcaaccagggaaggcttcctaatggaggaggcatttgatagcatcttgaaaaagaagcagttcctaggccaagccagagactgaagaatgaccacctaacttcttttttttttttttgagatggaatctcgcgctgtcgcccaggctggagtgcagtggcgtgatctaggctcactgcaacctccacctcccaggttcaagcaattctcctgcctcagccttctgaatagctgggattacaggcatgcgccaccatgcccagctaatttttgtatttttagtagagacggggtttcaccatgttggtcaggctggtctggaacccctgaccttgtgatccacctgcctcggcctcccaaagtgctgggattacaggcatgagccactgcacccggccacgaccacctaacttctttctacaagatgccccctggctgacgcaaagcaggttgagtgagtgtgacacttccttcctgtctgtgggttccggcctttccagagcccggccagtgctattggagacaaagtggccttcgctcttccttcccgccctgccaggcccagcctgtgccgctgagccccactttgcaattaagaggagctgtgaaccagtgatgctgatgtcgcagaaaagtggccaggggtctatggggggtgaaggacagggatgccgccctgagaactgtctggaaggggcttttgggtaacagtgcccactccagggtgtgggcaggctggggtggctgggagctgggctcataggctggcacaaccagagtttcccaaagccgtgggcctgagggccctgccttcctgggacagcaacctttggtccaatttgggaaaaggtgggttaaaccaagcccggctccctcactgtaggattactcagtgcgtttagtatgcaaatgtgcctctgaatctaagacaggaccacagaaacctcttcagtgttcctctggagggagggaccgcgggggatccaccgcaggggcctgggtctgcactggcctggtgaagtgcccccttagtgcttacaccatgcgcggtgagaggttggccctcgcctcccccaccctctgctggccttacctcaccacctctgcactcgcctcccagccggctcatgactaactcctgcctcttcagagccaatcggtgctgccaggttttccatttcaagtgatcccccgcctgggccaaaatgtttggattttcaggcacggaggggagatggacctcaggccaaaccatgctgggtaaaactgagggtcaaggctgtgctcagcaagtgctccagccctggccgtcaaacccatagtgtgcacagcgtgcaggaggtggctgggtgaatgaactcagtcatagcccggcccctcactcggggctgttcccaagttcccaccgccagccaggctgggtcagagcctcgtggggccttcctgggcttccctgccccacagcaggagttcgtatggagagtctcgagtgaggttaatgggttttcttcctcttctttttttttttttttaatttgagacagggtctcactctttttacccagccagggtgcagtagtgcaattatagctcacagcagcctcgaactcctggcttcaagcaatccttccgccgcagcctcccaaagtgctgagattacaggcacgtgccaccttgcccagctggggtttctgctttttactttttctcttgtttctaaactcaatacaaagaaagatattacatttataatcagaaaaaccaacaaggaatattatttcaaaattggaaaagggattaaagaaacaaaccaagaaacctctgcgattcctgcccatcggagtcagtggttgttagtggttggcttaacacaatgttttaggaagaaatagaataacagaaagcaactccagtgagctgagccctggctccgtctgtggcgctgcatcagtttcctgcagctgctgtaacgagtggccacaagctggctgggtcacaacaacgcccagccatcctctcacagctctgcaggccacacatccgagatcagggtcaccaggctgaaatcagggtgtccactgggcatagccctctggaggctctagggcaggggttcccagccccgtgtgtcctattaggaactggcctgcacagcaggaggtgagtgactggcaagcgagcgaagcttcatctgtatttacagtcactccccattgctcgcattactgcccaagctctgcctcctgtctgatcagccatggcattggattcttataggagagtgaaccgtattgtgaacggcacatgtgagggatctaggttgcgtgcttcttatgagaatctgatgcctgatgatctgtcaccgtctcccatcaccaccagatgggaccgtctggttgcaggaaaataagctcagggctccaactgattctacattatggtgagttgtataattatctcattatatattataataataatagaaataaagtgcacaatcaatacaacgtgcttgtggccgggtgcagtggctcacacctgtaatcccagagtgaaactctgtctcaaaaaataaaaaataaaggccaggcacagtggcttatgcctgtaatcccagcactttgggaggccaaggctggcggatcacgaggtcaggagttcaagatcagcctggccaatatggtgaaaccccgtttctactaaaaatacaaaaattagccggacacggtggcaggcgtctgtagtcccagcttcttgggaggctgaggcagaagaattgcttgaacccaggtggcggaggttgcagtgaactgagatagtgccactgtactccagcctgggtggcagagcgagactctgtctcaataaaataaaataaaataaaataataaatataatacacttgaatcatctcaaaaccatctccccactccctggtctgtggaaaaattgtcttccctgaaaccgatcccaggtgccaaaaaggttgggggccactgccttcatcgcctgcccctttgagcctctggtggctgtgggtgtcccttggcttgtggctgcatggcccttaccttcaacaccagcatctacagatctctccgggccccatctccacttggccatccctgtctgtgtcaaatctccctctgcccccgtcttgtatgagcaccgagactgcctttagggaccacctagaccatccagggtgctctcgccacagcaagatctgcaactgaatcacagatgcaaaaactcttgttccaaacaaggtcccatttgcaggtctagggattaggacatgctatccctggggccattattcagccttctctcgtgactatgatccctcccttcctccccagcctcccacctcggctgagatgctgtccccacctccctcactgtctggctgcctgtggggctgtcctccaggctctttgggaggaggtggttgcttgatgtctcccagaaggctgggaatggtcctccccaccccccaggaagatgtcctttctgccaaggagattgcatttggggtcctatcccaggcagagagcggacgggactgtggcctgaagtggcacttcagggcctttggctctgtcatctagccgagggctgtgcatgggcctcacctggtcacaggtaactcacctggctctgtggggcagggattgtaaactcagaggcctgcggggtgtgtcgaggtagaggggtgcaaatattgtaaatttgttgggggccttggggagcagcacagactgaaaagtgttttgtctgaagagcagaactgtcttataccagccctgtgcggccaggcaggaaggcttccgtggtgcggccacgcgtcctccctttctcaacagaagctgacagtctggagttttcagagagattgcctgagttctcagccttggcacaaacacacattctctttaaacaggcttgggccaacagaaccagcctccgtgtctcgggtttgaatgaacccttgaggtgaagcttaaagacagagaggatgcccctgatccccaccccagggacccacattgtaaacccccacctgctctgctgagcccttggcctcagcatggaccctgaccatgtgctggtggggaccccccaggtaagtaagcagcctctgaggaccccggatgaacagtggggaacagcactgatcccccagtggggccccgagttcccggagaggaagactcgctccctcccaggggacggctagagactcactgactcatgcgtgtgtggtaggaatcttccaggaagtccccgtcccgttcgccctctctgcctgggcggggacggcaactgcctctgtcactgcagactaatgggacggaggggggtgacttctcagggttcctcctgggcaggtgctccggaaccttttctcagcacgctggcctggggcacggccgttcctcctgcccagccacgttggggtacagggtgaagaagggctggggccagcccaggacagaggaaggcgaggcaggcacgcaggaactgggctttttaaacccttaagcccaaggaaatcgtagcatcgcgggacagggaaaatgaaagactttggaagtcgtcaggaatttgactctgtgagttggtttccaagagtctaagttaagcatctccaagtggatattaaaaaggagcagcaagcctcggggcggcgggggctggaggaggtggagagaggaggctgccggaagccgcactcgggacctctgcagccaccgaccagaccgggcggccgggactctgggactctcgcaggcagacccggtggtctgccggactcctcggggcccacttcgggccctctctcctgcctcctatttttggatttctctcctttgctccctttttcctcccgttttgaagagacaatgctacttcagtttggagcacaaacatatgatcagcacatggaaatgtggtaattcggatgcattcgtgattgcaacagattgaagaaattagaccagacaaagagtgtttttagaggaggaggaggaggaggaggaggctgagagagggagggcgacgggggtgagaaaggggaggccgcctctgagcgggacgccgggactcccgccgctgctaaatatatccgtaggaatggagagggaccggatctcaggtacgcagacagccccctccccatcggccgccccccactgccctggactcggggctttatttatgcctgggggaataagcatgcaaagggcgcttttgctcatttttcacagaaatatttcttttctttttgacggttccaagctcgtgggatgaactccgtctcagaagctaagctctcctgagtctggcttttatttaaactcggctctcctctctcctggctacttccctttcattttccagtgtgccattcttgcatgtcatggccactgtcaatgctgaggctgttggcgccgaaaccttgggagggtgtgggggacctgcccccctggctcgggtctggggcggcggcgcttggacctggctggtggttggtttgtccactgtgtggtttgttttttgcttccagccaaagtctgtcttcaaggctgcctcggtctcctacctaaaatagcatttctgtgccttcctggcagttgattatagagggggaagctcccggcgctcagaggagcctggcgtgtgtgtgcacgtgtgtgtgcatgtgtgtgcgtgtgtccattcacgctggcagcccccttgccgcaggcacagacccatcagggcgtgaacaggcaaatgaagagaaagggggctcccctgcctttagttcaccccagctttccaggccctccctcccaggcccagcctccttggtcccttcactcacatgcggtgccgtggctgccatctcacgtggccagcgccgtcatcggtaattagcagtgatgacagtttctgccgctcatgccgccctctgagcccagcgctgggagacatggggtggctgagccaagctccaggctttgggtattctgaagtgacctacgggccatggagcgggaggtcgctaagagtgtcaacccctacgtgccttgggccctggtctgttggttgccactatgtgtgtgttggggggtccctgagaggcctgagagagggaggcccatctcggtggctcctctctaggacgtgtggtcccctccaccactgctcccagggccacatctttttttttttttttctttgagacggagtctggctctgttgcccaggctggagtgcagtggcgcgatctcagctcactgcaagctccgcctccctagttcatgccattctcctgcctcagcctcccaagcagctgggactataggcgcccgccatatttttttgtatttttagtagagatggggtttcaccgtgtcaaccaggatggtctcgatctcctgatctcgtgatccgcccgcctcagcctcccaaagtgctgggattacaggcgtgagccacggcgcccggcctcagggccacatcttgattgtcacgttgggactggtggagcgggtgtgtgttgtgccgctgagcacacccagtcgggcacagcaggcggacctcaggagggggccaggggagacggcagaaggcttgggtggcagtgaaactgcatcttatctgtttgagctcgggggctcaggcccgctgggacgggtgggtgtggagcccagcgtcctgctctccgcccagcaggagccgcagggcagggagcgctgagagggaccttcgtcaggcttgcacagtggagccgtcctcggagtgaccaccccaccaggcagcctgggcagaccacagtgggtcccctgcctcctgggccaccagccccaggaggacgtcactccacccgcctggctggcaggggcctcggggagcctcgggttcggccttcactttatagatgatctagccgaggcccagatgggtgaccagcaggggatctgagagctgagcagagaggcgtgggtttgggggtggtgctccctggggagctggaagtgatggcaccctcccaggctcacaaaacacgggcttttcatgaactgaacaaaacactctttgaaagcagccagtgctgtgccccagagaccactctgatccctgctgcccttggctgaggacagcacagccagggatgaagcggggacctcccctcgggctgtgccttgatgaaagatgctttctacaaaatcccattcggatgtgttttcatgtaagaaaacgtacatttttagaaactcagttgtaaactggctgccttccgaatgaacacgacagtcccggagctgtttcccttaatgaggttctcgtcctgggcaaactttagcgctggtctttaattgtcactgaactcccgcacagtccctggggaagtgacttccttcctgtccctgctgggtggccttgagcaagccacttggcagctctgggccgcagttccgtcatctgcaaggtgaggggtgggagcggcacggcccctaggcagcgcccccacctcctgcgggtttctgcgcgtgtcctgagttttgtgggcgcctcttccctcactgaggggctcttcttctctgcagggcatggctcacgccgcgttgtcaggctgcaagccactgcgagagctgctctgatccccaagcatgctctggcctgaggaggagccatggggaggacgctgtgcctgtgtgacagaggcctgcccggcagatgccggcccgctgacttccagacgtggctgtgggtgcctcatgccccactgggctggcgtgtgaggcgtgtccagctcaggctgccctacagctgcccaggaagggtttgtgggagggggtggtcctaccctggtgagtccacggtggtctgccagccccagggaaggcttaggagccccaagacctgccctcttgtccctccctcggcagtgtctggctccggtctggtttgtgaacgggggcctgggtactctcccgccctccctgggggctgtggccttcccctgggaaggtgctggagggtttgtcagcagggccggcatgagtcatggagtggtgactggccgctgaggcatggaaggccactccttccagccaagggtcggagctttttttttgttctggaacggctttgtggcttttacaaattaagcagttttatcttgttccaagagcttgtatttcagcagggagagagtctccaagaagggaactttccactggggagctctgttgggctgggaggctaggaacaggccacgagggagggctgcaggcaggggaagtggccgtctgtgcatggtcatgaatgcaggcccggggtcctggagggggcttggccacgctgtcgctggacgtctgtccccaccagggtccatctgatgcagtacggcacagggtaaagcccagctcctcttacggggttcctgggtcatcagtgggcggggaaccgaggcctcctggagggcggtgcctcagccctcacccctccctcctgtccctcgctgtgctgtccccgatggcctctgccatcccctgggagttcttacccctggacgctcggtgcctgtccggtctcaacctctccagctctgcttttccatctccgaggtgagaggcctggcctgacgcgctctgcacccgcttcctgcccagccccgtgggaactctggtccctgtagtggtttcctggggctgccatcaccaggtgccacaaactgggtggctcaaaacaccagacatttcttctctcgccgttctggaggccagaagtccgaaatcacggcatcagcaggcctggttctttccggaggctccgagggggagcctgcttctcgcctctggcagcttctggcggctcccgaaacccttggcgttccttggctcgtggccacaccactcgacctctgcctccgttgtcacggggcctccttctgtgccctaaatctccccctgtctgtctctcatacggacagtctttctcggatttagggcccactgggtaacccaaaatggtcccatctcaagatccttaacttcataacgtctgcaaagaccctttttccaaataggccatgttcataggctctggggtggatgtaaattttaggggccacctttcatccccctgttgtccccgtgtgtctggatgcacagcatggttccatgtcccagactccttgctggacccctctggccctttggggtggcctttggccttttccactcgtttctgtgctcctggtgaggtgtcggggtcgggcttagcccctgcaggaattctggggacagcatggagccggcaactccccaccaggcgtcttcctacctgcccagagctcatggttgtgaggggtctctccttgtggttttgatttgcaattccccagtggttagtgatgttgagcatcttttcgtgtttattgctcatttgcacatattcttgcagaaatgtctgtccaagtcctttacctgtgtttgatttggatgattgttgttgctgagtgttaggagatctgtagattaatatccagatactaatcccatatctgacctatgatttgctgccattccatggattgccttctccccacgttgttagtgccctttgatatgcaatttttttttttttttttgagatggagtctgactctgttgcccaggctggagtgcagtggcatgatcttggctcactgcaacctccgcctccctggttccagcgattttcctgcctcagcctcctgagtagttgggattacaggcacccgccaccacacccagctaatttttgtatttttagtagagacggggtttcactgtgttgactaagttggtctcgaactcctgacctcaagtaatccacccgtctcggcctcccaaagtgccggagttacaggcgtgagtcaccgcacccaggctgatatgcaaatattttaaacttctatgacgttccactttatctatttgttcttctgttgcctgtgcttttggcgccatatccaagaaatcattgccaaatgcaacgtcaggaagcttttcccctgtgttttcttctaagagttttgtggttttagctcttgagtttaggtctttgatgcaagttgagttgatttttgcatgtggtgtaagggctggtccagcctcatgctctgggctcttgattcacttctcttcttttctcacgcccagctggttccgctgggtggcggggaggagtggggaagtcccgggctgggcctgcactcgatcatcccctctcaggccagccagggagtctcagctcctgcccaggacctggctggacgtgctccctaccgggaaagcctgggccgtctttctaggctgatggcagggccagcccggggcgtcctgaggcctgccctgcggacatgccccttgttctaggtggtgtggctgcccggcctgcgtgtgagaccagctgtctgtgcttcaggccatggaggctgagtgtttccagcctgtccccttgctcggctctccctctggggaagcccctgcagcccattctctgcctccgcttctgccatctgtgcctttgtctgcttcctgtttggaggtggtcatccctggggccacccctcatgatctggacacaagtctccatcctgaagccaccacccaaacccctgtgcctcaaacccctcccacccaccacatggggttccactgtgaccaactcagcagctgatgaagcttcccttggggctctcctagcaacggggagctggctttcccggaggcctggcctctccctaagtggaagtggggcgtgagggtgtcagcctttttctgctgcctggtgctctaggttggcttgtcacccctggaagcacttgccatccttatacagcaccccacacccacctccccgcctcctaccccttcttccaaggggtcatctctgcttccctccccacccaacctcacccatgtggtccgcccagcaacctttgacccccaacatgacaaaataaacctcccttgccggtcactcattcattcattcagcattgggtgctccctgtggacttggcgctggggtcccgtggaggacaaagccagacacagtccttgccctcatgggactgcacaagtgcaagaccacatcagtaaacgtgaaacacaggaagtgacaggtgtgacaaaggggaccagtggcaggacagaacctgcggttcgtaggaccaggtcaggagggctgcctcggggggacaccttcgggctgagcgcagaaggatgaggggagtaaaccaggctcaaacccagcaggcagaggcgatcgctgcaggcaaccggcaatgtgttcaaaggccctggggcgcggggggctgaggccggcagcacggcaggaagtaagactggggttgaaagagactgactgtcatgttgtgaaatatacacttggttttcatctccatttcctggcacacaactcctaaaatccttggaatctccaaagtgatgtctttttggatgctcatgattgacagaccagctggcagcttcaggatggttcccagggaagaccaggtagaatcacaaggttcagcaccaccccgcaacctccaggtaggggagaggggctgaaggttaagcagatcatcagcggccaatgattgaatcaatcatgccttcgtaatgaggcctccgtgaacactcagaaggatggggttccgggagcttctggatggttgagcatgtggaggctcctggagggtggagcgcctggggagcacatggaagctctgcgtccctcccccataccttgccctacacatctcttcccctgtatcctttgtaatatcctttataataaactagtaaattccatgagccccaggaacatgtgtaaaagaaaaaaaaaagaataaaccatagctgctgtagcaagttaatcctaccagcactggctctcatctgccgaccttacctctggcaatgcctccctctcctgggctcctgggacccctccggccccaccacccctcctgtagtggtctcgctggctgctgccctcaggttagtttatttttacccggcctgctcccaccaggggctgaggcctccctgctcactccagcttcctggcccgtctcttgctctgggcacccccccactccgaacggccagagcttctgaagccgctcgctgtgtgcccccgcctggccccatgcatcccgcacggtgctccccagggtctcccactggcaagggcattggcatagattctggggctgccttggttcaagcccaccctgactgggagcctgagggtccctgagggggtcctgaaggccagggcaggcaaggctggcatgctctgggcagtgggggctgggtatgggaggggatcgtgggtggggagattcctcttaaccagcggcccacgtttggagactgatttgggctccaggctacgccttgaaattgggacagagagtggcgcagatctcagcccggagactccctctgcctgtggacgccctcatacctccatccgtggagccaccctcctctttttttttctaaatggggaaactctgacttgaacactgaataaacaacacaccctcgaaatcagcgaagaggcactggctctgaaactttgccatgaaagcttgaaaatgctctttggaccgatttgctggaacagacgggtgtgatggggctgcggggtttcaggtggcaggaggcgtccccgtgcctagggcatcccgatgctcagagtttccccgtgcccagtgtgtccctgtatccagggcatccccatgcccagggtgtccccgtgcctagtgtgtccctgtatccagggcatccccatgcccagggtttccccgtgcccagggtgtccctgtatccagagcatccccatgcccagggtgtccccgtacccagggtgtccccgttcccagggcgtcctgtgcccagggtgtccccgtgcccagtgtgtccctgtatccagggcgtccccatgcccagggtgtccccatgcccaggcactgcctctccccactttcctaatctccctccaccaacaggtgtcagctgtgaaatgcctgctgtgtgtgtcctttggttgagttcatcttgtgctcttaagttcctgttagacacaggcaggctgctttagttcttctggcaaatgttttgttgttgttgtttgatacggggtctcactccgtcacccaggctggagtgcagtggcgccatctcgcctcactgcaacctccgcctcccaggttcaagcgattctcctgcctcagcctcccaaatagctgggatgacaggcgtccgccaccatgcctggttaatttttgtatttttagtagagatggggtttcaccatgttggtcaggctggtcccgatctcctgacctcaagtgatccacccagcttggcctcccaaagtgctgggattacaggcatgagccaccgtgcctggcccgtctggtgaatgtttattgaggcctactatgtgcagcccctctcttaggtgcttggcctgtaatgaggagcaacaaagacacagtcgctggtcgcttgttacttaacagttggaactgagaggcagtccacaaatgagcaaatccataggtggttttagatgaggactgtgaagaagctaagaacaggttgctgggggtgcatatctgtgtgtgtggcgaggggattaatggaagccctttctgagtggtgacactgagctgaagctgtaatgaccagaaggacccagccaggccaaaatccaagggaagagcaacctggcaaaggaaacagcaggtgtgaaggcccgaggctggagcctggggaaggtgggagtggctggagtgtgttttcagagacgggccatggtgacaccaatgcgacaggcagggccaggtcgtgccgggccttggaggccctggtgagggcttgattttattctcactatggtgggacctcagtgccctgtggctgctgagaatggccaggggcaggcagggaggcctgctagggaggaggctgctgcaggccctgcagctggagagggaggatcaggatctctttagagaggaagttggagagggaggatctctttgattgctggatggacccacctgcctggctgcccccgtcagcatccagcagaggccactggatgctgacaggtggccggccctgcccagccttgcactgccctgtgctgccctggtggctgccggctttaggaggagcgcttttggtgtctgagcccagtggtcctggctgtggtttggtacacttggccgtgggtgaggccaaggtggtttggatcctgggaaggttgggtacctggcagcctcaaggcaggagctggggtgttggaggaggaagcacgctcatccctcgttccttcctgtttcgtgggatgctgagtctctgggcagggacatggtgagccctggtgtgatgcacttaacacctgctggtgcccccatccccaagcaggaaccctggtgcctggtgcctgaggactgctgtccaccgtcccaccatccttcaggtttcttcccagcctctgactcggggcaaggttcagatatccagaacattcttggctggctcttggagctggggtgaggcagaacctccctcccatatttacagcaccagccaaggcttcggggtttggacaccatccctgggaggggtgagcaggacaagtgaggtctccagacttggggtggcttcggactggccaggcaggtgggtgggggctgcagtccatgcccccgctccaggcaacacagtcgagctgcagcccccgctccatccccagctggggctccctgtgctcaccttctgcttccttcctctccctcggaatggggggtggacactccaagactagcctcccagccactctccctgcctcctgcctcctctccttcgggacagacccctgtgatcgctgggtgttcctgatgctctgtcccctctgcgtcctgtgccgtgggtgagagagggcttcggggggacttccccctcttggagcacctgctgctccgggtgcctctgggggcgggcccccacctcacattgtggagctggtgtaggaaggaaggtgccgggagccagctccaattcacgtgctggctgtggccctcaaggtgtggatggcaggaggtggtgagacagggactcattgatcatgggactgacaccccctcatgttgatgtgggccctgagccataatctcaccagctcctgagttttggcgctgctcttggcgatggcgtggactcagccaggctctcgggcagcctttcctggattcttcctccgttctcccctgggcagtgtttctgttcacctggaaaggatgggtaggacttggagacaacagggattcaaagaagtcgggagtgggggcacctgtgcagctcaccctgcagaacagacaatttggttaaagcctaaagcctgctgtcaggagcctcgcttgcctctcagagagcacatggcttgaccatcacggggactgggggagaggcacaggcatgcctgtccggcagcagaagggaaccccgggcctgggcctctccattctgtggcgttgtctttcctcagagttgcactgtctccctcactgtccctgcctggccccagtgctcatgtggcttgtggccctcagtctgggcttggtctcccgcaattcaccctgcccagccccacacagcttgtccctccagctgggaatcggagctcacctggagtcccaggcagcagattcgatgcagtgatgcagggctgtcagccatgccagcaggccctgctgctcacagagggatgggtattgctgttgacaataattaaagaactacggcttcaggctgggtacagtggctcacacctgcaatcccagaactttgggaggccgaggcaggagaatcaattgaatccaggagttccagaccaggctgggcaacatagcaaggctttgtctttacaaaaaataaaaaataataataataataaaaactacagcttcagaatgattgacttcagcatgtttataaagtcaagggtcttcagtgtcctgggcctatgtcactgcgtcagagggagagaggaagaggctggggtgatgggcactggggcttatgctcctcctggaatgggtggtcttggactgtgcctgtgtgatatgtttgtcgagcgggggcggtgtccactgaggactggatgttgaggtgtgggtggggggaggttatgaagcactgggcatttcccgtgcaccagtgccccgagattgcagagaggggacccgcccagcctgggcagggaggcgggtggcagcgaggaaggggagaggaactcgggtgcagaaagcctttcctccagcaggtggcgccgcaagctctcgagagtccagctcctgcggggtttgcattttcactgaatttgtgggcagaggctgcctgggtgtagtttccgccaactgtgactgctcactgcgggcgaggggaagtggagtgcagagaatgcaccggagggcagatgaccagcccccgcacaggcacgggggtgcctccttccccgcacaggcacggggggcccgagcccttggggttcctgtcctaactgggcggggaaagggagggttggaagctgagttagggggaaagggggtggtctcctgccatctcttttattttatttttcctatttttggttgataggtttcaatcttttttacatttttccaactttttgccgtaaaacttttcaaacatagaaaagatgaaagagggctgagtgtggtggctcatgactgtaatcccagcactttgggaggttgaggtaggaggatcacttgagcccaggagttcaagaccagcccgggcaatatagtgagatcccatctctataaaggatacaaaaaattagtcaggcatggtggtgcaggcttggagtcccagctactcggaaggttgaggtgagaggattgcttgaacctgggaggttgaggctgcagtgagctgggattgtgccaatgcactccagcctgggcgacagaacaaaaccctgtctcaaaaacaaaacaaaacaaaaccacaaaaaaaaaaaccatgaaagattctaaagtaaacacccatgcacctaccacctagattccacagcaaccattttgctgtttgcttcaccacaaatccctctggccaccagcatccacgctggttttgatgcacttaaaataagctgcagaaatcagcacacaacatcctgtcaacacctcagtttgcatttcattaactagagtccggcatttgtctgtgattatttttgtttttctttgaagtaaaatgtatataccctgagatgcacaggtgtgaaacgttccgttctttgaattttaacaaaggtatccacgtgtatcccagcctgaccagaacatagaacatcactatcaccccagtaagttcctcatgcccctccaggtgcatcacagtccccaccttccccagggcaaccacaattgtgctttttttccaccacgaaataattttgccagtttgagtgtttcttagagctacccatgttgctgcaggtgccagcgatttgttctgttttattgctgagtaacgtccactgtgtgaacattctgtgggtttttagtcattctcttgttgaaagacccctggctgtttccatctggaggctcttatgagtaaacctgttacgctggttcttcttgtacaagtttttctgtgcatatgggcgttcatttattctgtagaaacacctagagtaggtatagggtaggtatacatttagttttataagaaactgccagatcttttcccaaagtggcccttccatttcacactcccaccagcaatggatacgagttctagttgctccacatcctggccaacatttggtgctgtcactctgtgaaatcttagtcattctggtgggcgtgtagtggtatcatctcattatggctttaatttgctttggcctgatgactaatgcggttgagcacattttcatgattggctcttcatatatttttcctttgtgaaatgtcttttcaaatctgttgctcattttaaaattgggttgcttgactttttcttctggatactgatcttttgtcagatacgtgttttacaaatattttattccagtctgtggcttgcctgttcattttctttcctttttcaagaacaaggtctcgctgtattgcccaagcaggtctgaaactcctgggctcaagctgtcctcctgcctctgcctccccaagagccggttttacaggcatgagccaccatgcccggcctgttcattttcttagtggtattttccaataagcaaaagtgtgtcactttaatttttatgaagtctaatttaacaaactcctttctttgtggttctctctctgtgttctttgtaagaaacctttgcctaccctgccaaattgcaaagatatttatgttttcctttagaaggcttagagttatatagcttttatgaattaacttttgcatatggtgtgaggtagagggtcagggttcattttgttgtcgttttatgtgtttattcagttgttccaaacttcatttttttttaaagcttttattttgtattttcttggtgacttatgaggtcgcacaattttccaagatccttgttggtcatttacgtattttcctttgtaaaattatctgtccacgtcttacttctttttaaaaattatgttgtttcaagatcgagtgatttctgaagccttcattttataatgcttgaaagaatgaacaccttgttccccagctacaggcttctgctctttgtcctgcagctgcacagtggggtaagacttgggttttgttttgttgctgctttgttgtttcttcatttgactgtttccccatgggtctcatttaaaaaaaaaattggccgggcacagtggctcacgcctgtaatcccagcactttgggaggccgaggcgggcagatcacgaggtcaggagatcaagaccatcctggctaacacggtgaaaccccatctctactaaaaatacaaaaaattagccgggcgtggtggcgggcgcctgtagtcccagataatcgggaggccgaggcaggaaaatggtgtgaacctgggaggcggagcttgcagtgagccgagattgcaccactgcactccagcctaggtgacagagcaagactctgtctcaaaaaaaaaaaaaaaaaaaaatgttgtttcatatgttttttatatattctggatataagtcctttatcagatatatgtatcataagtttttttttccacattgctcctttccttttggttttcttaatgatgttatttaatgagcaagagtattttgttttcataaagtccaatttatcaactttttccagtttcgatttatgatttttgtgacctatggaggaaatctttgcctacactaaggtcaaaagaagttctcctattttctagaaattttatagttgtatattctatgattccttttattttttaattttttaaatttttacattttttaacctattatagccgtcaggatgttgtatgatccattttaaatcagtttttgtatttggtttgaggtcagggttaattctcgtttttctatactcatatccagttctagcaccgtttgttgaaaagacataccttactctattgaattacctgacacctttgctaaaaatcattgactgtatatgtggccctatattagtatatgtacgtatatacatgtaggccctgtgttgactgtatgtgtggtcctatattagtatatgtacgtatatacatattggccctatgttgactgtatatgtggtcctgtattagtatatacatatcagccctatattgactgtatatgtggtcctgtattagtatatgtacatatatacatgtaggccctatgttgactgtatatgtggtcctatattagtatatgtacatttatacatgtaggccctgtgttgactgtatatgtggtcctgtattagtatatgtacatatatacatataggccccgtgttgactgtatatgtggtcctgtattagtatatgtacatatatacatgtaggccccatgttgactgtatatgtggtcctgtattagtatatgtacatatatacatataggccccgtgttgactgtatatgtggtcctgtattagtatatgtacatatatacatgtaggccccatgttgactgtatatgtggtcttgtattagtatatgtacatatatacatgtaggccctatgttgactgtatatgtagtcctatattagtatatgtacatatatacatgtaggccctatgttgactgtatatgtagtcctatattagtatatgtacatatatacatgtaggccccatgttgactgtatatgtggtcctgtattagtatatgtacatatatacatgtaggccctatgttgactgtatatgtggtcctgtattagtatatgtacatatatacatgtaggccctatgttgactgtatatgtggtcctgtattagtatatgtacatatatacatgtaggccctatgttgactgtatatgtggtcctgtattagtatatgtacatatatacatgtaggccctatgttgactgtatattatatgtggtcctgtattagtatatgtacatatatacatgtaggccccgtgttgactgtatatgtggtcctgtattagtatatgtacatatatacatgtaggccccatgttgactgtatatgtggtcctgtattagtatatgtacatatatacatgtaggtcctatgttgactgtatatgtggtcctatattagtatatgtactatatacatgtaggccctgtgttgagacactattgtgttttcttgatattttgtccattcctttgctgatgccacatcttgattaatgtggctttacagtaagtcttaatataaagtctctcaaatatctaaaatattactttgaatattctaggtcctttgagtttccttataaatttaagaagtagcttgttgatgtctacaaaaatgcagtgtgaattttggttgagattgtgttgaatctgtagatcaattaaggaagaattggcattttaacaatattgagtcttttgtatagatggtatatctccgttttaaaggtccttttgtatttcttttatttctctactgaaaaaaaatctctacagaattacattgttttgtagttttcaagaaaaagatcttgcatgccatttgttaaatttattcctaagaattttacttttggcactattttaagctgaaatagattttaaatttcatttttaattatttgctgctagtatgtaaaaatacaatagatttttgtatgtaaatcttatatcctatgatcttttccaaagtcatttattactctggtaatggttttgtaggtcttttaggatttaaatacatagttttacttctttctgatcttgatgccttgtttttttttcttgctttattgcactggttagagctgccagttcagtattgaatagtagtgattagtggacatccttgcctgtgccaaacttataatgttaactttagatttgtcatatatgacctttgtcagattgaggaaattcccttctattcttaatttgctgaaattttttaacatgaatgggtatgattttagtaaatgctttttctgcatctatggaaatgatcattgttttgtcttttattcgtttaataggataaattacaatgattgatttttgccccccgttttttttttttttttttttaaagaaacagagtctcactcttgcccaggctgtagcacagtggtgccatcgtagctcactgcagcctgaactcctggacttaagcaatcctcccacctcagcctcctaagtagcagggactataggcacatgccaccatgccaagctaatttttaatttttaaaattttttgtacagatggggtctcattgtgttgctcaggctggtctgcaattcttgagcttaagcaatactcccacctctgcctcccaaagtgctgagattacaggtgtgagccactgtgcaggcctgattttttaatattgaaccaaccttgcatttctggaagaagtccaacttgcttatgagatatcatcctttttatatattgctaaatttgatttgcccagtttttaaggatttttgcgtgttgattcatgagggatattggtgtggtattttctttgtttgttagtttgtttcggtaatgtctttgtcagcctcattttggcttcataaaattagtttggaagtgttcccttctctttgttttctgtgttttcataaggttgatgttgtttcttccttaaatgtttgatagaatccaccaagaaaaccgtctggacctagaattttctactaggaaaggtgattgtttgtttttaatcacaaattcaatttaatgtatagaaagagttattcaggtttttttacttccccttgtcttacttttggtaagttgtactttgaaggaatttgtccctttcaggtaagttgttgaatttactcatttaaagttgttcgtaatacaagcatacctagggtttgcttccagacctcggcaataaagcaaatattgcaataaagcacgtcacacaaactttttggtttcccagtacatataaaagttatgtttaggccaggcatggtggctcatgcctgtaatcctagccctttgggaggccaaggtgggcggatcatttgaggttaggagtttgagaacagcctggccaacatggtgaaacctcatctctattagaaatacaaaaattagctgggtgtggtggcacatgcctgtagtcccagctgcttgggaggctgaggtgggagaattgctcgaacctgggaggtggaggttgcggtgagctgagatcacaccactgtactccagactgggtgacagggcgagactccatctcaaaaaaaaaagaaaaaagttatgtttacactatactatagtctattaaagtgtataagatcattatgtctttttgctaaaaaatgctaataatcatctgagccttcagcaagccataatctttttcttggtagaaggtctgcctcaatgttgatggctgctgaccaggtggtggttgctgaaagttgaaggtagctgtggcagcagtttctttgtttcttttttctttttctttttttttgagacagagtcttgctctattgcccaggctggagtgcagtggcacgatttcagctcactgcaacctctgcctcccgggttcaagcaattctcctgcctcagcctcccgagtagctgggactacaggtgcctgccaccacgcctggctaatttttgtatttttagtagagacagggtttcaccttgttggccaggctggtctcaaactcctgacctcaggtgatccacctgccttggcctcccaaagtgctgggattacaggcgtgagccactgcacctggccggcagtttcttaactgaagtttttgacatgggttgactctttctttcatgaaagatttttctgtggcacgcattatgtttgatagcatcttacccacaatagagcttccttcaaaattagagtcaattctttcaaccctggccacggattgatcaaataagttgatgtaatattctaaatcttttgttgtcatttcaacaatgttcacagcatcttcgcctggagtagatcccatctccaggaaccactttgtctgctcatccataagaagcaactcctcatctgttcaagtttgatcatgggattgcagcaatccagtcccatctccaggctccacttctaattctagttctctgctatttccaccacatctgcagtgacttcctctgctgaagtcttaaaccgctcatccatgagggttggaatcaacttcttccaaactcctgttaatgttgatatttcaacctcttcttgtgaatcacaagtgttcttaatggcatctagaatggggaatcctttccagaaggttttcaatttactttgcccagatccattagaggaatcactaactatggcagatactgctttataaaatatatttcttaaataataagacttgaaaatcaaatttatcccttctccatgggctgcagaatgggtgttacattagcaggcatgaaaacaacattcatctttacatacatctccgtcagagctcttgggtcacaaggtgcattgtcaatgagcaataatattttgaaaggattcttttttcctgagcagtaggtctcaatgatttttttttttttttgatggagtctcgctgtgtcacccagaatggaatgcggtggcatgatctcggctcattgtaacctctgcctcccgggttcaagtgattcttgtgcctcagcctcctgagtagttgggattacaggcacacaccaccatgcttggctagtttttgtattttttgtagaaacagggtttcaccatgttggccaggctggtctcgaactcctgacctcaggtgatccacctgcctcagcctctcaaagcattgggactacaggcatgagccactgcaccgggccctatttgttttttttttgttgttgttttttaattgagacagagtctcgctttgttgcctagactggagtgcagcagcgctatctcagctcaccgcagcctccgcctcccaggttcaagtgattctcctgcctcagcctcctgagtagctgggactgcaggtgtgcactaccatgcctggctaatttttgtatttttaatagagatgaggtttcaccaccatgttggccaggctggtcttgaactcctgaactcaggtgatttgcctgccttggcctcccaaaatgctgggattacagctgtgagccaccgtgcttggcccttttttgtttttttgttttttttcaaattgagacagagtctccctctgttgcccaggctggagtacagtggcacgatctcggctcactgcaacctccgcctcctgggctcaagcggttctcctgcctcagcctcccaagtagctggaattacaggcgtgtgacaccatgcctgaataatttttgtatttttagtagagatgcggtttcaccatgttggccaggctggtctcgaactcctgacctcaagtgatccccccgccccggccttcaaaagtgctgggattacaggcgtgagttgccgcaccaggcctcaatgggtttttaatattcagtaaaccatgctgtaaacagatgtgctgtcaagtagggcctgttattccatttctgaagcatagacagaatagatttggcagaattcttaagggccctaggatttttggaacggtcaatgagtattggctttaacttacggtcaacagctgcgttagcctctcatgagagtcagcctgtcctttgaagctttaaagacaggcattgacttctcccctctagctatgaaaatcctagatgacatcttcttccagtagaaggtgggacatctatgctgaaattctgttgcttagtgtagccaccttcatcagtgctctgagctagatcttctgggtaacttgctgccgcttctccatcagcacctgctgcttcaccttgcacttttacattatagagatggcttctttccttaaacttcatgacctgacctctgctagcctcaaactttccttctccagcttcctcacttctcttagccttcataccattgaagagagttagggctttgccctggattaggcttttgtttaagggaatgttgtggctgatttgatcttctatccagaccactcaaactttctccatatcagcattaaggctgttttgctttcttcttcttcatgtgtgcactggaatcgcacttttaatttctttcaataactttttcttggcattcacaacttggctagctatttggcataagagatctcacttttgcctgtcttggctttcgacacgccttcctcactcagcttaatcatttctagcttttgatttaaagtgagagacgggtgactcttcctttcacttgaacacttagaggccattgtagggttattaattggcctaatttcaatattgttgagtctcagggaatagggatgcctgagcagagggagagagagcggggaacagccagtcagtggagcagtcagaacatacaacgtttattgaataagttcactgtcttatctggatgtggctcgtcatgccccaaaaacaactgcaataatggcattgaagatcactgatcactgggcgcggtggcccatgcctgtaatcccagcactttgggaggccgaggcaggtggatcacctgaggtcaggagtttgagaccagcctggccaatatggtgaaacctcgtctctactaaaaataccaaaattagccaggcgtggtggcgggtgcctgtagtcccagctactggggaagctggggcagaagagtcgcttgaacctgggaggtggaggttgcagtgagccgagatcacaccactgcactccactgcactccagcctgggcaacagagcgagactccatctcaaaaaaaaaaaaaaagggccgggcgcagtggctcacgcctgtaatcccagcactttgggaggccgaggcgggcagatcatgaggtcaggggattgagaccatcctggctaacacgatgaaaccccgtctctactaaagatacgaaaaaaatagccgggcgtggtggtgggtgcctgtagtcccagctactcgggaggctgaggcaggagaatggcgtgaacccgggaggcggagcttgcagtgagccgagatcgcgccgctgcactccagacagagcaagactctgtctcaaaaaaaaaaaaacaaagaaagaaaaaagaaaaaagagatcacagatcaccatagcagatataataataatgaaaaagtttgaactatttcaagaatcatcaaactcctacacagagacacagtgttaacatgttgttggaaaaatggtgccagcagacttacttgatgcagggctgccacgaaccttcaatttgtaaaaagtgcagtatctgtgaagcacaatgaaatgaggtgtgcctgtgttccttgtcactgtaatgtcggtaggatccgtaaggaaaacacttcattccttttattgtgactttatgttcgccatctccctctcatcagcagcctggctaggaggttatcaatctagatctttttaaagaaccagcattggactccccttttctggtgtccatttccttgagtttctctgttatcttcattacttccttccttgtacttgcttcagcgcattagtcagggcccagtcaggaaacaaaaaccacaccggcaatttgaatagcaacttgtaatataaagtgttcttaactgtaagaggtagttaactattaaagggatcacaaaggggtgacattgtgatataagaaagatgtatttgggctgggctcggtgcagtggctcatgtttgtaatcccagcactttgggaggctgaggcaggtggatcccttgagctcaggagtttgagaccagcctgggcaacatggtgaaacctcatgtctaccaaaaatacaaaaaattatcctggcgtggcggtgtgtgcctgcggttccagctacttgggaggttgaggtgagaggatagtttgagcccgggaaggcagacgttgtggtgagccgagattgcactactgcactccagcctggatgacagagggagactctgtctcaaaaatcaatgtatctgtctgtctgtctgtcttctatctatctatctatctatctatctatctatctatctatctatctagtctctgtcccccaactttgtttggcatgtagctcctaaaactcttgaaatctccaaagtgatgggtgtctttttgtttgctaaggaggcgactggtggctggaggctcctggacagcctggggataagggctggttgccaggggacccagccttgtgattagaaggctagaacttgcagcctttcccatccacctcctgcgaggcaagaggggatgaaggttgagttgatcatcaatggccaaagatttcatgtcatgcttatgtagtgaagcctccctgaaaacccaaaaggatgaggtttgtagagtttcaggttgttgaatacctgcaggtgctgggagggcagtgtaccctcccgtggaagctccatgccgcttccttcatacctttcttatgcatctcttccagttggctgttcatttgtatcctttgaaatatcatttgtaataagtcagcaattttaagtaaactgatttcctgggttctgtgagtcactcaagcaaattattgaacctgagaagggagttgtgaagacctcaaatttgtagccaagtcagacagaagttatgggtaacctggtgtcttaccacttgcgactgatctctgaagttgagggcagtcttgtgagatggaacccttaacctatgggatctgcactaactctggttggtgtcagaattgaactgaattgcaggacacccagttggggactgctgagtattggagaattgcttgggggtcggcgggaggaaaccacacatctggtgtcagagctgaagcactgagtgttgtgaatgagagtggagagatagagtttgttttgccttatgcaagaggactctaaggagtatagaaagagcaaatatgagaagcagctactttagaagaaaacataggaggaaagcttcgtgacattggagttggcaatgctttcttggatgtgacaccgaaaatacaacaaaagaaataaatgataaattggacttcaccaaaacttaaaacttttgtgcatcaaggaatactaccaatggcgtgaaaaggaaatccacagaatggaagaaagtatttgaaaatcgtatatccgataaaggactagtatccagaatatataaagaactcctacaactaagccacaaaacaaaaaaaaacaacccagtgaacagacatttttccacagaagacataccaatggccaagaagcacaggaagagatgcgcagtgtcactaatcatcagggaaatgaaaatcaaagccacaataaaatatgatttcacaccctttaaggtggctgttagccaaaacatggataacagcaagtgttggcaaggatatggagaaattggagccccgtgcactgctggtgggaatgtaaaatggtgcagctgctgtggaaaatatataacaattgctcaaaaaattaaactcagaatgaccataacatccagtgattccacttctagatgtatactccaaagaactgacagcagggacttgaacaggtgtgctacattcttgtttgtagcagcacttttcccataaccaaaagatgcaggcaacccaggtgtccaccagcggatgaatgaacagacaaaatgtggtccatctgtacagtggaatattattctgccttaaaaaggaaggagaggccaggtgtggtggctcacgcctgtaatcccagcgctttggaaggccgaggtgggcagatcacttgaggtcaggagtttgagactagcctggccagcatggcgaaaccctgtctctgctaaaaatacaaaaattagccaggcatgggggcatgtgcctgtaatcccagctactagggaggctgaggcaggagaatcgcttgaactagggaggtggaggttgcagtgagccgagaccatgccactgcactccagcctgggcgacagagcaagactgcctcaaaaaaaaaaaaaaaaaaaaaaaaaaaggagattctgacacatgctatagcatagatgagccttgaagacatgctaagtgacagaagccagacatgaaaagacaaatactgtatgatttcacttttatgaggtccctagagtagtcaaattcagagagacagaaagtgggatggaggttgccagaggctgggggaagggagaatgaatgggaagttggtgtttaatggggatagaattgcagtttgggaagatgagatggatggtggtgatggttacacaacagtgtgaatgtgcttcatgccaccaaactgcacacctgaaaatggttaaaatggtaaattttctgtgatggatactttaaggcatgtatgcaaacacacagaagcagttactaccactggggttgatggaaaagaaaccaagaactcggagcgtcctccacaccttgccacgtcttacgttcaggccttgttggagagtgtgtgactgccacagaaacctgcagcctactggtaacaaaaaggttcttgccagaaggtgtagaaagagtggatctgcaggatcagcttactgggtagccgagaaacctactagagggtatgggtgggcaggagctgggtgtctgagaagtttgctgaggtcccattgggctagagctggggtgctggagaaactcagtacagagcaggccccactgggcacacgccactggcagctgtgccttcagaggaaaaagagaccctggaaccaggaagagaagctgctacctcagcaaggcctggcagctccccacagtgttgtcccctgtggatagagcctgacatgactgtatttggccaaggagaaagactcataaggcctcggtccagtatcacggagcggggcctggcaggatgtatgcagagttaagaggcaatacatgggtaactggcatatttttccagattctttgttttttttgttgttttgttttgttttgttttgttttgttttgttttgagagagcatcctgctctgttgcccaggctggagtgcagtggcatgatctaggctcactgcaacctccacctcccgggttcaagccattctcctgcctcagccttctaagtagctggagatgcccaccatgcccagctaatttttgtatttttagtagagacagggtttcaccatgttggccaggctggtcttgaactcctgatctcaggtgatccacctgccttggcctcccaaagtgctgggattacaggcgtgagctacactgcacctggcccatttttccagattcttaaagcagatccttaggtctttttttttttttttttttttttttttttacttcttttctaatataagcacttacagtttccctctaagcactagcttcagcctacgtattttagtatgctgtgttttcattatcatttcatttgaaatattgtaaaatttttcttgtgatttcctctttgactcatgggttatttagaagtatgttgtttaatttgcaaatagtcaaggctcctctgagtatcttagagctattgatttctaatttaatcttactttggccagacaagcatattttgcatgcttttaaaatttgagacttatggcccagaatgtgtatcttggtgaatgcactgttttcacttgagaaaaaaatatgtatatatattctagacttcctgagtatagagctttataactgctgattaggtcaattgctagttaccagtgttcttcagattatctgatgcttgtttctcagatgttgagagaatggtgtttgctatggcctacctgtttgtgtcccccaaaattcatatgttggagcttaatctctggtgcagtggtgttgggaattggggcatcagggaagtattggctcatgagggcagagtcatcgtgaatgggattagtcccttctgccatgtggggacacagcaggaaaaggacatctctgaagcagggagctagctctcaccagacactgagcaccctgattttggacttcccagcctctagaactgtgagcactgcaatctgtttataaattacccagcctaaggcattttgttttaacatcctgaatgaactgaggtggtgttaaaatctccaactatgcatccaggcgcagtggctcacacctgtaatcccagcacttcaggaggccaaggcgggtggatcacctgaggtcaggagtttgagaccagcctggacaacatggtgaaaccttgtctctactaaaaatacaaaaattagctgggcgtggtggcaggctcctgtaatcccagctactcgggaggctgaggcaggagaatcgcttgaacccaggaggtggaggttgcagtgagccgagattgcaccattgtactccagcctgggcaacaagagtgaaactccgtctcaaaaaaaaaaaaaaagagtctccacctatgattgtggaattgcccatttctccctttaattctttcaggttttatatcatgtattttgaagctcctttggttaggtgcatacacatttatgattataatggtgtctcgatgaactgatcatttaaccatgatgaatgtattcctttatctcgtaataattttatcttggactcaactttattgatatttatgtagcctctccagccttcttaaacatgctgtttgggatgcataagaaggctggagaggcttatggagaaacttatgatggtttgacttacagtttttcaactttaccatggtgcgaacgtggtatgtatacagtagaaactgtactttaagtatgtgtgaaaccattgtgtttctcactttcagtacagtattcaataacttacatgagatagtcaacactttattataaaataggctttgtgtttgttgattttgctcaactgtaggctgaagtaagtgttctaatcatgttaaggtaggctaggctaagctagaatgttcggtaagttagatgtattaagtgcatttttgagatgatatttattttccacttatgatgggtttgtcaagacataactccatcatcattcaagcagcatcagtatgtctttttccaaacagaaaatttcaacctgtgtttatactgaaacagcatcttttgtagatagtatatagttgagtcttgctattttattcattctgacagcctccgccttttaattggaatattcaggctatttctgtttaacatagttatagatatgactgggtttagagctactaccttgctctttgatatttatttctttcatcttgctttcttggcttcttttatgttaattaagtattttttagaattctattttaatttatgttttttttttttttttttttttaagacagagtctcactctgttgcccaggctggagtgcaatagcatgatcttggctcactgcaacctctgcctcctgggttcaagtgattctcctgcctcagcttccctagtatactgggattacagacgcctgccaccacggccggctaatttttgtatttttagtaaagacggggtttcaccatgctggccaggctggcctcgaactcctgacctcaggcgatccgcccaccctggcctcccaaagtgctgggattacaagcgtgagccactgagcccggcctgttttgactttttaattgtatctctttgtattgctattttagtagttactttacagattctattgcacattcttagcttttcacagtctacttagaattaacattgtttttcttcatggaaaaaaagtgtaagaactaggcaatcctatgggttcatttaccactttccatcctgtatgtgatggttgttagatatttactacatccatacacattgtaaactagacaatacaataaggaaatttttgctttaaacagccccatgcattttaaagaaattaaaagtaaaacagaatcttttctatttgcccatgtatttgctatatcctgtgctcttcattccttcctgaagagctgagttcccatctggtctcatttcccatgatcttggagaacttgcttcacggtttttgtagtgcaggtttgcagacagctaattccctttcattttcacttatctgcaaatctttattttgctgtcattctttctttttttatttttatttttatttttgagacagagtctcactctgtctccccacaggctacagtgcaatggtgtgatttcaaaactcctgcccaatctcaactcaccaaccttctcctcccgggctcaaacgattctcctgcctcagcctcccaagtagctgggactacaggcatgtgccatcatacccagctaatttttgtatttttagtagagatgggatttcaccatgatggccaggctggtctcgaactcctgacctcaagtgatctgcctgctttggcctcctaaaatgctgggattataggtgtgagccactgtgcccagcctgctgtcattcttgaaccataatttcactggttatagaattctgagttgtcagttttttctttcaggactttaaaatatagggttccagtgtctttggcctccgttgtttctgtcaaggaatcagcattcatctagctattcccctgtagaccacatgttgtttttccctggatgcttttaagactttttatccaagtttgattgctcagtacctacctctgggcaaaaaagcctccagaaaccagaaacttatctagttttattcccctctgtcaggtgtagactctactccagcttctacctacttgagatattctatactgactccaggctgttgttattttgttctttcaaatattttgtccagagctataatgttttctgcagaattgaccagatagcagctactctctgtgaccaggagccttgatcttccagacttgctgatgggctcacaaagctcctgcccgtggccctcagttggcagtggcctctctgccttgaagttgccatgagtgtgtaaaacctacaggctcaaccttcctcattagtacagtccagaaaagtggaattcctggtctgggtggctatggtgccctagaccactggctagaccagggtggtgactgccagctggccgaatgtggggtctccagcctagcacccttggactctaccccaggagttatggctgtttcagggccaggggcctggcctcagcccctgtcccccttctcttctcctcaagttgcccagcatcaggtcccaaccagcatcttttgcagacagggtgggtcggctcctcactagaggggcagggttgggagggaagcctgttgagccctccttcctgtgcagcccacagccctggggttagctccagaggggtgcagaaaggagcccccaaaggcagaaactcacccttctctctgttcttgtgcttccagggataaaggagaggtggtcctagctggggggctaccagtggcatgcaggaggcccacatgaccactgtttgctggggcctttccttctctgtgagagagacgagagagaggagagagagtgtgagtcagggtagtgtcttcttccagtaacgcagacttctgcacgtgttctctaggagaaatcccgtcactcgctagagctctagatctggaagaagctctgcctctcttctctcctccagtgcagtgtgtgtgtgtgtgtgtgtgtgtgtgtccccacatgcattacacccttctacagaggaaataattcccgtccaagtgcaaaggttgggattggagcaggcagcatgtgggctaaaggagcagagaggaggaaacgggggcgggggtgagggtgggaacaggaggtgggtagatgccacgaggcatgccttccacaactagaagggctggtggagatgaccagaatgctccagacagaccttttatcaaacttccaaaattcaatcttgtttcatgaagcctgaggaccctgcagagtgaaagacaaggaagggctttcctgcaggggggtgtgtgtgcctgtgtgtgcctgtgtgctgtgtgcccccatgtgtgtgcacgtgtggacctgtgtggtgtgtgcctgcacatgtgtgcacgtgtggacctgtgtggtgtgtgctgagtgtgtatatgtgtgtgcctgtgtgctgtgtatgcacttgcacatgtgtacacagatctcattttccttttttctggcttactaagtgccagaaagaatttccgtgagcctctccacccttcccaaggctgcacatggagggacttgcgcaggcacatgtgcgcgtgcacacaacacacacacacacacacacacacacacacacacacacacacgagtcaggggcgagcactcctgtggattgtacctaggcctggcaggaaaccgggttctgggaaactgtaggccccacctttggcagaaaaccatgtttttgttgctgctcgttgaagggaacattaagtggggctggggacagtttatgttgagaagagcaaattttgcctatggcactggggacattgagtggctcctgtcccgggctctggagggcttgggagacacgtctgcagctctgggcatctctcaaggtcacgggcggccacactcaaggttaggccctcctctgtgtgagctgcggtcagcaggaaggctgacctcagaggcggccccagggcccttggaggccctgcccctgagacatgggccaaggtcagagagccgagaaggctgctgctgaggactctggttggcgcccagcccagcggcccttcaggcgggccctgtgcaggggctgatgaagtcagctgggaaatctgtgaaataaagcacaggtcccccaggcttgcccagagccccggcatcagatgaggtgcagagaagggaactgagctgccaagtgtgaacaggagagaggagccccaggaccacacaggggccccgacatggcaggtgcttggtcagcagcggtgctgcccttactgctggacgtgggaaaatgcactgacacttgctgaccagagccggggtgagcatctgggtgaccctgcagatgagacaaaataagggctgccgtgggggaggggcccttgccgggccaccctgctgaggccctgtgttactgtcctgcggctgtcataacaaaggaccacaaatgaggtgactcaaaacatccgaaatcggccacgtgcggtggctcatgcctgtaatcccagcactttgggaggccgaggcggttggatcacgaggtcaggagatcgagaccatcctggctaacatggtgaaaccccgtctctactaaaaatacaaaaaaaaaaaaaaaattagccgggcgtggtggtgggtgcctgtagtcccagctgctcaggaggctgaggcaggagaatggcatgaaccttggaggtggaggttgcagtgagccgagatcgcgccattgcactccagcctgggtgacagagcaagactccgtctcaaaaacaaaaacaaaaacaaaaacaaaaacatccgaaatgtcttccctaaagtttctggagccagaaatcccagaccgaggtgtctgaaggttcattcctcctgggggttccgagggagactgtcccatgcctttctccgagctctgcggcggccagcaacccctggtattcctcggcttgcagctcggcctaccccccacctggccttcaccctgtgtctcttcttgtgtctctgtccaaactgccctctctgttgtctttttaatttatttttagggacaggttctcattctgtcctccaggctggagtgcagtggcgtgatcatggctcactgcagcctcagcctcccaggctcaagcaatcctcccacctcagccttccaagtagctgggacacaggcgcacgccaccatgcctggctaattttttaatttttttgtagagacgagggcccaggctggtctcaaactcctgcgctcaggcaatgagactttgcctcccaaaacactgggattagagacatgagctgctgtgcccagcctacctctgtcttataaagacacctgtcattggatttagggcccactctgattcaatatgccctcaaataacccaattacatcttcaaagaccctatgtccatataaagtcacattcataggtactggggggtcaggacttgcatatgtcttttgggggaacacaattcaacccacaatgggtctcacccacagaacgaacggcctctccagggtgtgcgcaggtgggtgaggggcccaggagagggacctgcgtggcaagagggcttgtgttcacgtcagagattccagaaggagactggatggggtggctgcatggagcaaggggctacagccactgtctccaagtagttggtgggttgtctggtagaaagggagcatttattttgagttcccccaagatatgaagctagtaccaggtacctggaaggtgctagcgagtagagcttgactctttacagaaagaggtgtttttctcacaatgttcacttgaggacggtggaacaggctatttcacaaggtagtgagttccccatgcctggaagcattcaagcaggggccatgtgggagttgttcaggagtgcatagaagggacctcagaggtccctgccaataccatctttgcttgtcttattttacgacaacttgaatttcagaatgtaatgttattggggatatgtctactagaggggcctccagcatcaggccccacacactatgcatcatttttagggcagggaatgagagcaggctccattctttttggttgtctgtgaggaccaggaggcttgctgctgaggcagcttcctgtggaaacagtgtctcagccccgcaatccattcatcggagctccaacatcttaatgaaacactgtgtcagatgggttctgggcatgtgtgtgcagattgtcacaagtccatgagaatgcacacacgcacattgcatgtgtgtgcacacatgtatgcacacatgcacaagaacacgaagacccgaggcaggtatagtccgtgagacagatccctctaggctgaaagactccccacaagggtccctagaacaaggctccagcctcggcagtccctcccacttctggtgggaggatctccacagagaagaagggtcaagaagcacagctcttgatgctcacggtgtaccaagctctgctttaagcttgtgtcttattttttacttatttagcaaatctgtcgctcttgttttgtgccagatgctgttctcagcactttacaaatattgatgcatgtttgtttcatgacaaccctgtgaagtaggtagtgttaccccgttttatagatgaggaaacaggcgtagagggataaagggacttgcccaaggtctgtctctaccttacacgcacatgaacgctcactcatgcggcaggcgctagtttccctctgatgtgagtcaggccttgagctggttggggtctgggtcccactttggttgtgttttgctgtgggcaccaaggaagcttctagcagcctcatctccctggtatgacctagctccagggactggatttccccaaatgctcctgcccagcctggagcctcctttccagctgggggagggctgaacgacccctcactcttggaggctgccggagcccctcctgcctgcatgcggccgctgccgggtggacaggcctgcttgtgggttgaggctcccagcagctggggtggatcatttctcctcccaagaagctttgggagaagcagctgagggggccagcgtcctcctgaggccaattccctgcctcccccagcgcaggcgcgaagccatctttgcttgtgtgtttgccacagacagtggagggcggtgcaatcgtgacgcctgcttgttgcactttgcgtccttgaggacgttgacccctggccggtgctgggcgcttgctcttcagtcatcttgccctgacctggcgtggcaggcccgagcactgctcttttacaaggaaacaggctcagaggccttgagtcacttgcccgggctcccccagccaataattggctgagccaggatttccatccagctctgtgactccagaagtccaagttcttcccatcacgtcagggccaggaaaggattagaatgcttttctacgtgccgattatttggatgatctgtgcagcttagctcgttgtagttgctcaataaaaatgtggaatgaatgggcctatatgtcccattgtgtgactcagagccaatgactctggctgatcctcctgttttcattccgtggcccagcatctccctttggggtgtgtgaccttggaagcagtgactctctccatcccaccttgaatggtgtctgcgccgcagcaggggagcagctggggattgccagcgcctgttgctggtgggctgtgcgccagatcccgtcttggatgtgtgggtgattgtcagccacatgtgtgtgaagggctgtgcgtgtaggatttgtgcaaatgtgcccctccctgctgccagcccatgggaggctgtcaagattctgcccctgcacattagcccacactctctttgtggcccactgctgtggctgttcccttgtgtcacgtggctgcaggcacagcccccaagtggatggggatcgtgggctgaatgtgcatcagatgctcctgcttcttggtgggtggagaccctcaacccatgcaccgtggctgccgcatctgaaaggccttccatggtgaaggacttggacctgagcaaccctccgcagaggtcttagaagtgctccctggccgggcgcggtggctcacacctgtaatcccagcactttgggaggccgaggtgggcggatcacaaggtcaggagatcgagaccatcctggctaacacggtgaaaccccgtctctactaaaaatacaaaaaattagccgggcgtggtggcgggtgcctgtagtcccagctactcgggaggctgaggcaggagaatggcgtgaacccaggaggcggagcttgcagtgagccgagatcgcgtcactgcactccagcctgggcgacagagcgagactccgtctcaaaaaaaaaaaaaaaatgaagtgctcccagctcttcctcctgtggtgaggttctgagtttccatcctcagaagaaaacctggctggggagggcatctctagacccggacataaacgccaggagaccagggctgccctctcaggtgaccaatcacagagactcagggaaagtcacgtttggaagaggcgacactgtgtctcagcctcattcatttctccatcctacagacactgcctggtgcccagcccgcaccgcgaggcttcctaagcagctctgggcaccgtgcacctggcatggcctccagccccatctccctgccttgggagacccggtggggactccgggctgagctcctgtggctgtggaaccttggtggtttattgtggtggctgagaacagggacgtggggttggacgggttgagtgtaactcccagtggctccgtgaactgcctgggagccttgggcagctctttctcactctgtgcctccgcttcctgatggaaaaatgggggccaggggggagcgaccttgaaggtattcgtgggaaccaagcgaggtgataaatgtagtgtccttggtagagaactggacacagagtccacccccatgaagggggctgctcctcctccttctatgtttcctcttgttcttatttctcctcttgtatcttctcttcctgctttccctcccnnnnnnnnnnnnnnnnnnnnnnnnnnnnnnnnnnnnnnnnnnnnnnnnnnnnnnnnnnnnnnnnnnnnnnnnnnnnnnnnnnnnnnnnnnnnnnnnnnnnnnnnnnnnnnnnnnnnnnnnnnnnnnnnnnnnnnnnnnnnnnnnnnnnnnnnnnnnnnnnnnnnnnnnnnnnnnnnnnnnnnnnnnnnnnnnnnnnnnnnnnnnnnnnnnnnnnnnnnnnnnnnnnnnnnnnnnnnnnnnnnnnnnnnnnnnnnnnnnnnnnnnnnnnnnnnnnnnnnnnnnnnnnnnnnnnnnnnnnnnnnnnnnnnnnnnnnnnnnnnnnnnnnnnnnnnnnnnnnnnnnnnnnnnnnnnnnnnnnnnnnnnnnnnnnnnnnnnnnnnnnnnnnnnnnnnnnnnnnnnnnnnnnnnnnnnnnnnnnnnnnnnnnnnnnnnnnnnnnnnnnnnnnnnnnnnnnnnnnnnnnnnnnnnnnnnnnnnnnnnnnnnnnnnnnnnnnnnnnnnnnnnnnnnnnnnnnnnnnnnnnnnnnnnnnnnnnnnnnnnnnnnnnnnnnnnnnnnnnnnnnnnnnnnnnnnnnnnnnnnnnnnnnnnnnnnnnnnnnnnnnnnnnnnnnnnnnnnnnnnnnnnnnnnnnnnnnnnnnnnnnnnnnnnnnnnnnnnnnnnnnnnnnnnnnnnnnnnnnnnnnnnnnnnnnnnnnnnnnnnnnnnnnnnnnnnnnnnnnnnnnnnnnnnnnnnnnnnnnnnnnnnnnnnnnnnnnnnnnnnnnnnnnnnnnnnnnnnnnnnnnnnnnnnnnnnnnnnnnnnnnnnnnttcccttcccctcccctccccccccacatgcaggcacactccatttggtgccccaactgcctttctccattgtccttctgtaagtggttctctaagtgggaactcaggcctggaaagggtgggcaccctgtctggtgggctctggcaggccaggcgctgagcagcctcaggagacacaaccctaggaaaaggctcatgcaggctggctgtcatgacggactgttggtgggagaggggaaggcgccgtggtaggggaagctttggaaacatccactagtggccttatttatgactcaggacacctgccaggtcactagaacacagctgaggaagctgtcggccagacgtccagaagcatcaacctggtggctgggctgtggggggacctctctggacaggcagacaaggtgtcggaggaaggggctgacactcactcagtgtctgtcatgcactgagggcacaaagggcaggatggagagctggcccacgccacctgtggaatcttccaggtgtgggggcagatggggaagcaagggggcttgaagacacatgcgctcattaaatgtccttaaatcccaagaagaagaacaaggacacatccacaggggcagggctgaaagtctgatgcatggtgttttggggtctgctcctgctgcaacagctacagtggctccctcttacctttctcttccctccattctgttgtgaaaatgttcaaaacacatggtcaagttgaaagcattttacagggaacacattcagccatcacctagattctaccactaacaccaagctacacctgctttatcacctcaccgtccatctatccctccttcgcctggccatgaatccattttatttttattttttggtgcatttcaaagtaatttcaggtcatcctgattatctctggaatcactgtcagaaattccctcccttcccctcccctctcctttcctttccttttctgagatgggatcttgctaggtcacctaggctgaagtgcggtggtgcagtcatagcacactgcagcctccaactcccgagctcaagcaatcctcctgcctcagcctcctgagtagctgggaccgcaggcatccaccaccacacccagcttcattttcaaaatttctcaccaactcctcactccttgtattcacccaggaccacttctcacaaagccagggtgctgcaggaggggtcagaaccccaagccctaatcctggctctgtcattaacactgtgcgaccctcagcaaatcattttgcctgtctaggtcctgttttcattcctatgaaacgagggcgttaaactgtatgttataaataatgagggctaccagttaccaagctcctattttaggccaggcacttttcacatgttattatgagtcctttcaatctaggtattgttctcaatggacagcttagtcaacggaagctcagagaggtggtgtaacttgccaaaagtcccactacccagtgaatgtccccacggggtctgcacccaggagtctgacacagagcccaggcctcagcacctggcgatgttttgggggtgtgagcagcccagcctactctgggcacgtgtttacttgctgttccttctgcctcatgtttgtgtttgtcccctctgaagctcagactgttattttccagttccaaataccaaaactggctaggcacggtggctcatgcctgtaatcccagcactttgggagaccaaggcgggtggatcacttgaagtcaggagttcaagaccagcctggccaacatggtaaaaccccatctctacaaaaaatacaaaaattagccagacatggtggcgtgcacctgtagtcccagctactcaaggagaacccagctacccagctactgaggcacgagaatcacttaaacctgggaggtggaggttgcagtgagccgagatcgcaccactcctctctaggctaggcaacaagtgtgagactctgtctcaaaaataataaataaataaaataaaataaaaattaaaaccaaatgccaaaaccaacccacaaaataaaccttggttaaagtagcctgttcattttgctttaactatgtatattgcaccagattctgccaggggctcagcgtataaagatgagacccctgccctgccagacaggtgggatgatggccataccttgagttagtcaaggcaccatctggctgtgtaacaaaagctaaaacatcagaggctgagcagcactcggacccacgtcccagtccaagtgtcagtcgttatgggggcccaggacagcccggacctagttcattcctttggtgcatcctcgacacacagcttccatctcttgagctgagatggttccagctcctgccgtcatgtctgcactccagccagagggaagggaagaagggagaggggaaagggcaagtgtccctctttatttttaagggcatgacctgaaagttaaacacttcagctccttcccactggccagaacccagttgtatggccgctcctgtcatcagggaggctgagcaatgtattcttcagctgggcttccctgtgcacaaccaaaacttcagttactatagaaaaaagggagctcagatattggggaaacaactagcatctgtaccacatgcactgatagctctctttgtatgaacagagctgtggcaggccctatgccagggagaaagtaagattggaaaagagcttaccaaggaggtggcatttgcactgtgcttaaggggcaagaaaaacgtcttccaatcaggagccacaaatgcttggctgaagtgctactgctctttcatcctggagctggaacagacgtcaccagtcaatcatgatggctgctgggtgcactggctaacatctataatcccagcactttgtgaggctgagggtgggaagattgcttggggccaggagtttgagaccagtttgggcaaattgcaagaccctgtctctgcaaaaaaatataaaatgtagctgagtgtggtggcacctgtagacccagccccagctactcgagaggctgagatgggaggatcgcttgggcctaggagttcgaggctgcagtgagctatgattgcaccactgcactccagcctgggtgacagagcaggacctgtctctaaaaacaataaaataaaatcaaagttttaaaatggaaaaaaaatcatgagcacataactccagatgtatcctcaagatagcaaacccgggtgggcgcagtggctcatgcctgtaatcctggcactttgggaggccaaggtgggtggatcacctgaggtcaggagtttgagactagcctggccaacagccccatctgtactacaaatacaaaattagctgggcatggtggtgggcacctgtgatcccagctacttggaaggctgaggcaggagaattgcttgaacccaggaggcggaggttgcagtgagccaagatcacaccattgcactccagcctggagaaaaaaagcaaaactctgtctcaaaaaaaaaaaaaaaaagcaaacccagggccaggtctgtagccacatggccaccttcttccctgagcatggaggcagcctcagaaacctgccccacatcacatcagtgggcagttgattgggtcagcctgccagttgaaccctatttgccacagtcattctccatagtaaggggcattctagacataccccccttcccagggaagaataagccgtagctgcctgagcgttttatccagtggtgtgcatgtcttttcccaactctgtgtttagtgatgtcctgtttgtagcttgaaatttgccacagtgggtgtgtttacaccacaggaattggcaaacactacatatcaggccttacctcctgctccctactagggtaggttgttttttttttgttgtttttgttttttgtttctttttttttttgagacggagtctcgctctgtcgcccaggctggagtggagtgatgcgatctccgctcactgcaagctccgcctccctggttcacaccattctcctgcctgagcttccagaatagctgggactacaggcgcccgccaccacacccggctaattttttgtatttttagtagagacggggtttcaccgtgttagccaggatggtctcgatctcctgacctcgcaatctgccctcctcggcctcccaaaatgctggcattatgccactgcgcccggcctagggtaggttgttagaaatgtaccagcctgccagtttcagccttgtttgtctttcatcctttttttttttttttttttttttgagacggggtctctctctgttgccccccaggctggagtgcagtggtgtgatcctggctcactgcaacctctgcctcctgggatcaagtgattctcctgcctcagcctcccaagtagctgggattacaggtgcccaccaccacgtccagctaaattttgtatttttagtagagatggggtttcaccacattggccaggctggtatcgaactccttacctaaggtgatccacccgccttggcctcccaaagtgctgggattacaggcgtgagccaccgcactgggcctctttcgttctttcttaatgaaaatcttcctgaaagatttgcctactgatgtctgtgtcaataggtactgcctgcgggacagagcctgccctccttttgaaggtctttctctgtctgggtgaccatctgcatgtcactccctgctgctcagaactaaagatgtagctatgcctggggtaggttgggaaaacctgtgggaatcacagagcttgctgtcatgctgtgttctggatacctgaagcttggcaggcaggtgggatcgagggtgggcattaggaaagtgatgtggctctataggaaggggacataggtcctgagattttaggtccccaattggacaaagctgttttttttttctggataaatgttctagcttattcataatcgagtggtcagttttcttttcttttcttttctttttttttttgagatggagtctcgctctttcgcccaggctggagtgcagtggcgctatctcggctcactgcaagctccgcctcccaggttcacgccattctcccgcctcagcctccggagtagctgggactacaggcgcctgccaccgcgtccggctaattttttgtatttttagtagagacagggtttcaccgtgttagccaggatggtctcgatctcttgacctcgtgatccgcccgcctcggcctcccaaagtgctgggattacaggcgtgagccaccgcgcccggccaagtggtcagttttctcagctgccgggtcttgcacaccttgctggctctggagaccatatgcaccatgtagaccccatttgtttcctaccctcagtgttgggggaggggccaagggcctgtcgatgtgttgacacctggccattcactggccttgaatgtccacattcacctccttgaaatcgatgccccgtatcggaggctccatgtggatttgggggcagaggcctgtactccagatggtggggtggccttcaccaatcaggcagattccctgccctgccctgccctttgggctctgtagctccagatgtgtgctcaagatctgtggccacatggatgggacaagccacagagactcagactccgtggtccctgtgaccagagtagccgtggccctgtctgggaatgttcccaccctgttgctgaaggtgagaaatttctctgtgctggagaacagctgtgctgagaagttggcccatctggcttgcaggactgctggggcaagggaggtctgctgccggtctcttccttcctcctctgactgggtgctccttgtctaggttccttgcagcaaaagaattctctaatttattttgttcccttattgagtctctactccatgaagcccacctcctaatcccagctgactggctcccacctcctcaagaggaaggccaggggcagacgaggctgaaggaggctgactcccctgtgccttcgcagtctgagctgatgctgctgtatgttcacagggctccttcagcttttaaaaaggcttcaacacgttcgtcacacgcttgtggctctcctggatgccacactaactcagtaaggcctgagttagaggctgttcctgaggctgtgaaaatagaagaagggtccagaggagaatcccttcatctgacgatcccaggaaggcttcctagaagaagcagcctctgagctgagacctgaagacagatcaggcctgagtcaggccagggagggtgtgaggggcccaccaggcagagggaacaggatagggcaggcacagaggtctggcacctggcttgtggggaagtgtgagcccctgggcatgaccaaggcggggagaagtggcgtgagaggaggcagatgtggctggcaggagatcggcggccccggccttgctgagctccactctgtatgcaccaggtgacggaggctgcccaggacggtgggcagggaagtgacaggtcacatggtcatcccaccaacagccgggagtccagcttggggggacccaagaccctggggaaggcacgagtcaggggcctgctagagccaggagctagtgggagaaggaaacagtgttgcttatgaattataaacagacactcccgcaactttctctgacgtgatacaatctcaaagtgggccacccagaggtgggaaggtgacttctggctctccaggccttgggcctgtcttttttttttttttttttttttttttgagatggagtctcactctgttgcccaggctggagtgcagtggtgtaatcttggctcactaccacctctgcctcctgcgttcaagcaatcctcctgcctcagcctcctgagtagctgggattacaggcacctgccaccacacccggctaatttttgtatttttagtagagatggtgtttcaccatgttggccaggctggtctcgaattcctgacctcaggtgatccgcccaccttggcctcccaaagtgctgggattacaggcatgagccactgtgcccagccgagcccatcttcaagttctccctggccctcagtgtttctgtattagttcacccttttggctccctgcttttaagagtctcccttaagactgtccccaagtggacaggtccccagaaccaaggagcagccttaggagtccccagttacagacactccagggggtccgtgtggccctcagcctctggcctggttccggcagccttggtcctttgtgctgtctctcacatagcctggccagagctggccaggtcccttggctgggccgagtcatcgtggccagtgactcatgcagggggagaaaagtgaggagggggaacagagtgcgagggggactgtgttaataacaaacccattaggtccctgaggtcacttcacaggagggacaaatggttcatttaggttgatctggctgccggctggcttccagagacactcagggtggggaagatttcattatctggggaaagcaataccagattgtctggaggggcccagccagcgcaccccgcgcttcctgtctgcctcccacgcagagcgttctgttcccaaggcggcaggccaagagcgcgagccgaggctcaggtgcaaagaggggtgcggcatgggggcactgcagggcacggggtgcatgcatttttatttatttttttactgagtgttagggtaatttgttaatggggtatatttggtgacataaaaccttctgtcgattcatggcagtctggaacggagtggaagcgtcccactcctggggaacccccacacacatttggctgtgaacgtcggtgcctttgcactggagcctctttggagtgtgctgggcagagcggagaggttcctcttctctcttctccatcatcctgtggaggtgtcaacatgtagccagagatggtcagtggcagtgaggagaggggggcaggaagagaccagggctgggggcttgccagcccacagttctacccctgaacacccatggcctccctgttcaggtcagcgaggctgggggcagagacgggcaggggtcccccaatgttgggcatctccccgctccctcatactctggatttgccctctggagaaagctctggagcacccagaagtcctggggctgctggctgaggtggggagcagagcccagctgtgcctggaggctccccacttccactcagcttccagggacagtctcagctgtgcaggcccaggccgctgaggctggctccagaaatttcttcacaaccaccactggatggaaaaccagttctctaaagggccccagagccagttttgtttcttcttccacaggttcccatagttagagcatcgggtctttgttagagatgcagaagagacgatgtccccagcccttatgtggttcggtctccactgtggatgttggtgatcttagtctccttctcaaaaccaagagggctgatgccccacattccaggcccccagaaagagccgccacccacccacaccgctacatcttctttccacttttctgttccggaaagagtagagtggatatgcgctcctgtagaaatccatctacagcctgactgcagatgtattttgctcccttattgagtctctgctccatgaagcctgccttgtttgtacctctttctctctctttctctctttcttccctctcttccttcccttccgttcccttcctttttctttccttcctgtcttattctttcctctttctttctttcctctctctctctttccccctttctctgtctttcctatcttttctttctctctctttcctcttttttgaacagccaaagatagaatgaatggcataggtaggtactgagctccctgtaactggaggtgttcaagtgtagggtggatgggcatttatagggcaggcattgaggaaggatctccctgggattgtggatggcaggacaggccctgtggagccttctgagcgggtgcagaagagggagggcatgttcctgctccctgcccttcccgggttgccaggccgccactcccaacctccaccctctttccttccacctgctgggccttacgggatgggcagaggcattgttagaacatggagccgcggtccacagagggccagcagggaggagagctccctggggaccacgtcgcctcagtcactgtggtgactttgaaaataaatgctttcttctctgcttgagtccctgttgttcctgctgacgtggaactagggcaggctggtgactcagccctcatccctgcactgcatcggtggcaagttgcctccagcctcagaccccacagagcagggtgccttcttcagaaaaacagtagggaggccaggacaccaagggccccagggacagcctgtttctcctggctggcacgagttctagccaagcctcctggtaccctgggggtgaggaggtaccagctgtgtgctttagtcactggctgctttgaggctgggtcggtgccaggctggccactccttcttgtcccctagtgtgactttgcagagctcccggaagggtcagagggtttttttccatcactggtgtccatgggatactgtgtccccatctcatttttgtactccagtctcagacgggtgctaggaagttggagactttagccatttcacgactgtgtcttgcggggctggagtaggaacaggagtaggaggaacgctctggtcatgggactgtgtgaagagagaaggatcaggaagaaaacatgagctatcatgtctgggttatacctcagcagagccgctggtggcctcccaggcatctgaatttactaatcacaaagctcaccaggtgtgcaaataaacaaatgctgttcaggaggcacagccagggttctgctggagagggatcatcttggaggggtcatactttccacccagtccttcagtccttctgtcctgtgtgtgtgcagcccctgaccaccaccatccctgcccccgccacttgctcccagggttccatcaggttggatgttattgcaataaaatgtagcaacagaaggtccaggcagtgctgcagtccctggtggtatcatcagagccagcaggcagcagggctggggaactccaagctgattcagtcccaagtgccggagcggggagctcggatgaggtgggggtggggaaccggggagccatggagcagagcatttgctgtgctgaaggccaggagcctccttgggagatcatgaatttagaacactaatactttgtttaaaaagtcccctgccttggagataagagctcaggccgctgtggtcaggttttgctgtaaatgttctgcacaaagcaggctggggggatcactgggaagtctggggaacagattggtcatgtgcttctttgagtgaaaccttatggttgcattgaagcggccaggcagagggtgtgatggggtgtggtagccgcacaccggctcagtcaggctgaatggggaaatgcaaactcaggtggcctgaaagagacttagtggtccacagcctggtggctgctcccagtacaggtgatgtaaagagagaaggggttccgggggcttggcccaggtggaaaccatgcactgtctgtgatcctgggcatgtcgaggctggagcaggtctgcttggtggctggcagaacgcacatgaagaatccatgtgtgttctgaacgtcccctctgcccctttgggctcatgccccatcaggagtctcccgactctgccattctgcaaaggaaactgcgctttgtcattgcacaggatcgaacaggtgtgtgtggagtccctaaagccactgtctcaaggggtctcatgggacaatgggagagttgctgtgatgtttaagactaaagtgatggctgggcgcagtggctcacgtctgtaatcccagcactttgggaggctgaggaggatggatcacttgaggccaggagttcgagactaccctggccaacacggtgaaaccccatctctactaaaaaaacaaaaattagccgggcatggtagcgggtgcctgtaatcccagctactcgggaggctgaggcaggagaattgctccgatctgggaggcggaggttgcagtgagccgagatcacgccactacactacagcccgggcgacagagtgagactgtctaaaataataataatgctaataataaataaaataataataataaaataataaaagcaaggacttgaacaaatatttgcacacccatgtttgtagcagctttactctcaattgctcaaatgtggaaggaatggatatacaaagtgtgtgtacacacagtggaatatcattcagccttcaaaaggaacggaattctgtcactacatgtgaaccttgaataatgaaccttgaagacctcatgctacgtaagcctgtctcacaaggacaaatattgtatgatttcacttatgtgaagtcaaattcatagagaaattggaatgacggttgccagcagctaggggaaggaaggatggggagttattgtttaatgaggacagagtttcagtttgggaagttggaagaagtttcggaggtggatggtgttgatgggtgtacaatgtgaatgtacttaatgtcactaacatggaaacttggttaaaatggtaaatttgtcttttttgtttttgttttttttttttttgagacggagtctcgctctgtcgcccaggctggagtgcactggcgtgatcttggctcactgtaacctccgcctcccaggttcaggcgattctcgtgcctcagcctcccagagagctgggattataggcgtttgccaccacgcccggctgatttttgtatttttagtagagacagggtttcaccatgttggccaggctggtcttgaactcctgacctcaggtgatccacccaccttggccttccaaagtgctgggattacaggcgtgagccatggtggctggccaaaaatggtaaattttatattacatatattttatcacagtaaaaatgcattgctctattagaaaaatgatagatttttacaatatgaattaaattacaagttatgaaggaaaaattaagcaaaacattaaaaaattacttataagtaattatatttaaaacaaaagataataaatacacaactttcatcacctcttaggttttttgcaacatttaactattgtctgtcctgttgcggttatgttcttgaggttgtatttgtatgatagaaacactatattcgtggtgactaaacatctcttctcagtctcacctccaatgatgtcatacagataacttgaaattggccggctgggcacgatggctcatgcctgtaatcccagcactttgggaggccaaggcaggcagatcatctgagttcaaaaccagcctggccagcagggtgaatcctcatctctagtaaaaatacaaaaattagccaggagtggtggcgggtgcctgtaatccgagctacttgggaggctgaggcaggagaatcacttgaacctgggaggtggagtttgcagtgagccaggattgccccactgcactccagaccgggtgacagagtgagaccctgtcaaaaaagaaaagaaaagaaagaaattggccaaggcaggaatattgacaccacaggaataggcaagcgctacaaatcgggaaactgagtgttgttgcttttgctggccccaggtggccggttgttgaccgttaactggcacactactggaggagggaggttcagactgattcgcagagagactagaggtagaaacgcaccatggtttggatgctgagggtgagggaaagagaggagtcaacagtggtgcccggagacttggcttgagcaactaggtggatggtagcaccgtttcctaagatgaggggctgtgggaacttgaggggctgtggaaggctctgccactgacggacccagggctcggcagctctgggaggcctactttgtgtcaggccacgcagagataagaccatctgggccctgcccttgggaagtctctgtctatgaggacacagcctgccacctaatggggtgtcccgtctggagcctcagtgttgctgggagaaagcccctcaccttccttcgctctccgagcctcttttgcttccctgccagctgagcctctccatggaggctgtgcctggaggggggtcatggatatggatgtgtgcgccaaacgctgcttcctcgtggatttcctccccactccgttcccacgctttgtaagcttcatttccccggggcctgacctgtggggtttctctccagacctgctccttcccatttccagaaaggcgtgcaggggtttcctatggctctcttccctgtccccatcccccttcccttgggacagtgatctgctggacgggtgggctacccacagggtttgtgattgcttagacatctttgctgtatgaagctttgacctcaaggcatgatgcagatgggaataaggcacgagtttctcctggctgctgtaacaactgtcgaaactgggtggcttatagcaaggggaatgtgtcctctcacagttctggaggccagaagtctgaaatcaaggtgccagcagggccagcttcctctgaagactccaggggaaaacctttctttgcctcttccagcttctggtggccccaggtgttccttggcctgtggctgcatcactccggtctctgcctctgtcttcacaaggcctttttctgtgtctctgtactttcttttctgtctcttagaaggacacagcattgaatttagggcccaccttatcttgagatccttgcctaaattctttctgcagagacccttaaacagaatcaggtcacatttgaggttccaagtgggcatatctttgttttgggggggatcaccagcccactgtaggtctcgttgtgcactgaagacgcaggcggtccctttggccaggcctgcagtcggtcttgccttcttttgtgaccgtggaagaatgcaccttgctggatgcacaggcctttatagttcttttgttcttgccaaatttcagctcagtttcctctctgctgccggcgtgcatcttctctgcccagtgccccttctgggactgtgtgtccaggccctgaggccctagaaaaggggggtggagggcctcctcactatcctgtagcaatgaggcctcattaaaatcctggagccccagactggacccagcccttagctatgatcaaaggacagctcgggatatgattaaagggctagagaaagatgatttaggctgagaaagaggaggccaaggagcaactggattgtccttgaatgtggaaaaggtaattatgacttgaagggtggtgcccagctgtttcccatctcctctgaggacaggaaaaaaaaggaaataaatgatgtacaattagagcagttggttagatacgagggtgaacttcctggctgggagtatggccaagccctgatttgggtttcctgaaagagctcggggaacctccttacctggaggtttctaggcctggtcatgtggctctgagtgattacattgaaggggcagtggctggggctggagccggtgggctctgagcacagtcacgcaggcatgcgcactttctggctgctctcctgccattgtcccttgggttcccattttggtgaggcgtgcaccctggcggcgctccccagggaactaaatatgtttgctgcactgtgcgtggagatggagaatgtacaattggctgaccctgtgctaatctggtggaactccatgccagccctgggaaagaacaattgcatgggtgtgtccacactcaccaggtgctttttagaaaaacactcgagaataatgctgtggcttaggatggctgttgtgccggacccggcatcttcccaggggggctgtgttgttgggctgagtttcttaggtactggacccccaaatccccaaatacggcgtggacaggtggcccagtaggggctggactatccgataggcccaggtgctggagttcagacaagacataccctggcctggcgtggaagatacggggtgctattaatggcagcaatggctgcatttctgaaacccgggctcccaggccgacgagggtgtgcacgcatctgaaatgtctgtggttttgcagttcccatgtccacaaactcacttggttgaaaatagttcaaaatatccaaagcatgagggagggagtgcctgcttttcttaaaaaggaaggacttgatttcatctacttaaaaagccacccaaacctagaacattttccgcaagagaccccctgccccccgcctctccagaatggctggagagtctcagcactcctgcacatttgggatatttcagagggggtggggaggggcaagtgggcagcgagcgacctcagacccaggatgagctgtcaggcgctccccggccacacattcaagggaccggagtgcagttgtagcgttgcggcctgctgcttcgggggtgggggtgttgttccatgctgtgaattctcacatggcccctgactctgggcagaggccgagggtctaagggacggggtgacagggagagcatgcaggagtgggtttctggctttccagggcgagtggaagaagcgcctctctctcttgtaggtgacagacctggggggcccttcttgaggatgagagcctgttgcttctcaagttctgtgtctaacccaggtccccaggtctaccccagcccctcggccctgcctgccttgtggatgatatagtttaagggtagagaccgctggcctggagggaaggctaggcctcaggttagggcccagaagggagggagaagcccttggggcagctccctttctgctcactcactgcctagctccttccttcacaccttccttcggaaacgtctgctcctgacaaggtctacttcctgctctcaggaggcccttattgtggaggaagggaggcgtcgcccgtccctggcttctctgacagccgtgttccatccccgccctgtgccccttctcccggacagtgccttctccagggctcacccaggagggtgcagcggtggcccccggggcggtggtcgtggtgggggtgttagctgcaggggtgccctcggtgggtgggagttggtggcctctcgctggtgccatgggactcgcatgttcgccctgcgcccctcggctcttgagcccacaggccgggatcctgcctgccagccgcgtgcgctgccgtttaacccttgcaggcgcagagcgcgcggcggcggtgacagagaactttgtttggctgcccaaatacagcctcctgcagaaggaccctgcgcccggggaaggggaggaatctcttcccctctgggcgcccgccctcctcgccatggcccggcctccacatccgcccacatctggccgcagcggggcgcccggggggaggggctgaggccgcgtctctcgccgtcccctgggcgcgggccaggcggggaggaggggggcgctccggtcgtgtgcccaggactgtcccccagcggccactcgggccccagccccccaggcctggccttgacaggcgggcggagcagccagtgcgagacagggaggccggtgcgggtgcgggaacctgatccgcccgggaggcgggggcggggcgggggcgcagcgcgcgaggaggggccgtcgcccgccttcctcccccattcattcagctgagccagggggcctaggggctcctccggcggctagctctgcactgcaggagcgcgggcgcggcgccccagccagcgcgcagggcccgggccccgccgggggcgcttcctcgccgctgccctccgcgcgacccgctgcccaccagccaccatgtcggaccccgcggtcaacgcgcagctggatgggatcatttcggacttcgaaggtgggtgctgggctggctgctgcggccgcggacgtgctggagaggaccctgcgggtgggcctggcgcgggacgggggtgcgctgaggggagacgggagtgcgctgaggggagacgggacccctaatccaggcgccctcccgctgagagcgccgcgcgcccccggccccgtgcccgcgccgcctacgtgggggaccctgttaggggcacccgcgtagaccctgcgcgccctcacaggaccctgtgctcgttctgcgcactgccgcctgggtttccttccttttattgttgtttgtgtttgccaagcgacagcgacctcctcgagggctcgcgaggctgcctcggaactctccaggacgcacagtttcactctgggaaatccatcggtcccctccctttggctctccccggcggctctcgggccccgcttggacccggcaacgggatagggaggtcgttcctcacctccgactgagtggacagccgcgtcctgctcgggtggacagccctcccctcccccacgccagtttcggggccgccaagttgtgcagcccgtgggccgggagcaccgaacggacacagcccaggtcgtggcagggtctagagtgggatgtcccatggcccccatccaggcctggggatatcctcatccgcctcccagaatcgggccgtgggggacagaaggggcctgcgtgcgggcagggagagtattttggctctctcctgtcttcggggtttacaaagtgtgttgggacttgcggggctgctctgtccaagcctgggtctggcgtccgcgtctctgagcctgtgagtgcgtgcgctttcctgcgtcctcgtgactgccggtgctggggctctgcgtcctgcgtccgcgggagtaaatacagcaggcgaaggggaagctcacacaatggtctccagcgctctggggcagggcttctgaggggcgggcctgcctctgccgggacctggagcccccgcccctcggagaggctcctaggctgacttgggcagagccctctggtgggccgggagggggaaaggctgtgttgaaatgagcaaactgtccaggtgtcaggccaagctgggaggtgaccagcctgaggtcctccccgctccatggccagaaccagggctgacatctgggtgtcctgagcccagctgcccacacggcccacctggggtcagccctatctgagtgggggaggcggggcctcctgggggaccagaactttggctggacgccaagcagagtgccagtggctgttcttcagggctgggcctgaggagggtgtggggcggcgaagggacgggagggggttgtgatccagtggccactggcgctgtgcagagtgtgagctggaaacatcgtagttactttgtcagcttagtggtgaaagccctttttcaggctctatccctttgcatccctgcttcccagagggaggggaggtctgggtctgcagagctgggagggcttgctgttcccgcccccctcccccacaacacctcctcatctggacatctttgggcacatgctcatactggggtctccctaggtccactgtgttccgttgagcctcctgcagtccccgagtgaatgtgacctccctgcccctgcctctttgcaactcttccctgcgaccgctcctccaggggccttccttgtcccaaatgtccaagtggcacgacttagccggtctgaccactttccagtaagcccttatggagagaggccctgtgttgtgcagagctctcctcctgcctgcgggatcgaggtctctgctctcagttcctaacagaaagtgtcgggcccccagtgggatttctggggaagaactctcgtgtctcaacgggagccctgtggcgggaggggaggccagggtttggggttgtgttcgttgtacagctgtcaccatttgcactatgaaagttgttagtgccccttccttgggtctctgggtgtaactccacccttgcccccatgtgcctccatctggagctgcttctgcggctgtctcccaagccagttttgtgaccctgtaatttagtccaagacaatgggctcattgagaccatcctggtgcagcagttggcaatcctttggctctgggggaaggtttctcagtctcggggagtggggcctcaatctgctggttccctgtgtttatcagtctcccccttgtgtgccctgaatggttttgctgggaattctggtcttagagccatcaggtggcccgagtcgataggcgtgagagagtgtgtgtgtgcatgagtgcgcatgtgcatgggggctgacctggggtatggaaaggtggccctccctggtgcccaaggagcctggagtatagttggagggtgtgggggtgtgtatatgggagttggacaaccttgggtggacagacagacgtggggaagggatgattgaaggaggtggaggagagagtgtgattcagcccagccaggggtgatgtggacaggcagcttccgaatcagggtagagaaaagtcaccactagctagcaggggagaagtcagtatggaggaggcggaccttgagggagagtaggaattggattgcaagaggaaggagagccttctggccagcagcagccagcagcagtgggggaggctggaatgagctggctggagagggggctggggcataaggaggggcctgcctgtgaagatcatatgggccaggctgtggagggccaggcatgcccgccgggagtgcagctggtccacgggaagcatctggagtggctgggaatgggcgcaggagcagcgccgtgggagcacaggtctctttcccggggcggctcacctggtgtcttggttcctgcaaggtaggccgaaagggtggggaggaaactgccagctccttacagcgctgggatggtggccccagggttcctgaggccagcggatgtgggtgcctgtcaccatgtgggttgctgaggggcggagactccaggggccaccccaaagcaggacgagctctgagccacggcatctctgggggcagttttccaatcgagcagacgtctaggcctggaatcctgtaacagaggccacagggccctgatcagggtgttctgggaggcttagaactagtggcagtatacagggtagacggcaagtgacctggcatggggaaagaggcaggtgcccaggccggcacagcacacccgtaaggaacaggtagacgggaagccgtccgtgggcctgtgtgtgtgctcggagttaaaattctgccaatgtcccatgtcctgggcacatctaccccctccctggggagcacctttctcttcaccttttccttccccgcctgtccccttcacccagggccttccccatccctcccgtcttggggaccgagggcaccatggctttatgttccatcaccgatgagttgcacagggattcagtccttccgctgttcaggccgggtccttcaggctcagggttcccaggaatggagagggtatcagtgtcttccatggactcaaacttcccgcatcccgcctttgctcccccttcaagataggtctccgagcttcaaggtcttagggctctgtggaggccgccacgtagcagcaaggagaatgttttgtatttggctgatgagatttttagagtctcattttctacttttccactgtacaaacgggcctccaggcgactgcagcacccgccactgcccgtaatagggtgacaagagggatgaccctttcctctttctcccttctggttggtggaggcacggggctggcggacggcatgtgctttcgtgaattcaggccaaatctgttatcgcaaacacgattacaactcgggtctttgtgtaacaaaagcctttccaagtaccagctgttggcctgctttgctcagcggtgtttgctgtaaccagatttgcacaccgagaaagaatccaaaagtccttgatgtttgttgaaacaatctggcccaggacccacgtgctcagatcccagagctgtgtggcatctgagcttctcccgagcccccactgtcgcccgaggaggacccccagatctgtgttctggaggcagagcaggctgtgggacgggcttctgggtgggaaggaccatgtggatatgccttcttgtctgagagtcccaacacctccgggacgtgggagctggcgcgctggcaggattcaggtgcctctttcctctctagagaaaaaggccccgttgcttggtaataggtgcagacctgtccctaattaatgccagtaggcctcttgcgtgatgaaccctgcctttcagccaagactcaaggcatcctgtgaatactgcctctctgcagtttgagcttttgtggtgggaggcaggagccatggggagtgggggcaggcctcttacacgggtcccacagccactggcagcactgacttgatgctctttgagttcagagcccagggccagacagacccactgtcccgactacgagttggttcatttagaggggggcggacacagcacccaggcagcagatgcactgtgatcagccttgcagcggggctgtgggttctctgggctggatgtccgggaagaggcaggtggaggtaaacgccaggacacccctgcagtgactgggtgactgcaggctggaaatgctttctgtgggctgtggctgtccaggaaggttttgaatggggctagtggacagagtttgcatccagaggggcagtgctttggaggagtgaggggtatggcagtgtagggatgcccaggccgccctcactctgccattggaaagctgggcggcttcggtttcttcagtttcttcgcctgtttccctgcctgcaaagtggggttagaaacagctctctttgagggttgctgggggactctgagatgcagcccatggcgctgagcacgggtcctgcctcctacgggtgtggtgggtgtcgcggctggtgtggcatctgggcgggaaaagggggcatttgcaaaggacaggtaggtttggatgcttaaatatgcagatctggggatgggaggtctcaggcaagggcctgtgtgatgccactgtatgaatgaggccggacagcatggtcaccactaattatggaaagcacggcagacactagtgccagtagcgcccgcctgggggtccctctgagcccgacaggtactcaggctcccagtgcagccatgggaccccccttttcctgcctggctgacattctggaggctggcgtcatgttggctgcaggttcctcttactgggaggttgtcctggtcttccctgccaccatctacccccacccccaccctggagtgtcacagatgggtggaccatatgcccatctgcagggccaagcgctgacaatgaggtgagcacttgctggatgaccggaccatgaggacagcgggggcgctggcagcctgcgttcggctctgcaggctggcctttccctgaaaagcggttgtggcagagtgtgcatcccagggagtggtgcctgctgccctgaacattctcatccagcaggcctctgcaagggcccagtcaagtgtggtgcagagctgggctggcagctggaacagtctcatcttgtctagtggtgagaccaagggctgatgggccaaggctgcgtgctgcttgcccagcccgtggacccatccactgagcacccccatacccctacactgggcccggggtgtcaggaggtggaggggggactgggtgcctggaaaaacaagcccaccgagagcctgagcccccaggggtcagtatcaggcagtcaccacggtgcccggtacacagtggccacctggtctcgtcggctgtcttggtggtggagagcgtgcatggtggccgtacgtgatgggcatcacccagggtaatacagatatgcagactgtgcatttgtctgtaggagccagggacttctcagcctggcaacctgtgacctctgcctacccgttgggagagaggtgctgttccctgatagcctggtgccgggagagcagaactagggtctcctcctcctttctccacctcccatttcttacatgcccaggcatcaggggaggtcacactcagggatgagtcttggccactgggttcagggcctcactgttgccatctcttccctttgccagccagccaaatgcccgtccatcatcgtgccggggatggggctggcctgctcctctgaagtctccttggtgtatagcctaggctggagccccggacgattccgccaccccctcccccgactttttctttttattttgattcatcccagaaacccagccaaaaaccaagttcctgtgctctcccttgacaaagccactgaggaaaaatggtcaaacactgcctttctttccaaagccctcttggtttttcccaaatttggaggctctgagttgcttatgagaccaaagggtccggaactctctggaacacagtcccagaagtgggaggatttgtcatctctccagccaaacagacccaccagttggcccctagacacccccaggcgcctggggcatttctgggctcaggctgtttaatttggtctgcagagccccgaggctccgtttagactgggccagcagacagttctagagacttcaagtttgttgtcgtttttaaaagtcctgccaatgcccagaaacttagagggacaagaagatgacctcgatgtcagccgggaccataaacagtgaggcccgccccccccccccgcatgcccgcctccccctccatgcccgcctccccctccatgcccgctcccccccatgcccgcccccccccaccccatgcctgcctccactgctcccgtagctgggtctccaggggattgcccgtggccatgggggaggccgggaatgcggggctcagactctactgggcttcttgtatttttttgtttttccttgtccatcttctttctcggaaatttctgaatatccccctacagcctttggcattctgtcactcctggcatctctgggccaactgggaaagccatcatttgtccaatatccagaaaatcaaggggcctggccttaaatacattgcagtgccctcctccccacatggcatcgaatttcctgtgtcctcaaagccaggagcctgtgccttggatgtgggcgatggagccttgcagacacctggagcggctttcctgggagagtctccctcgccttcccatccacccgcttcccctcccctgccccaagctctggtcacagcctcggaggggtcatctgagtgtaggttgcctccaggtgtacagttggaggggggcagttaccccacatccccctgtctgctaggggcacccccagggactcaggtcttgagggacagcggaagggtggggtggggagtaggccgttgtctcgtgccacctgggtgttatgtagactctgaatgggcagttcctgggagctggtttttccttctcaccccttctacagtgctgcccctctgaggggctggagctctctggagccctttgcagcctgtggcaggtctttctgattctgtgcctggtttcgcagcctccaacccatagccagtggcatgaagaacattcctggctgtctctacctgtggcctttgcaggcagcagttccctggggcagggcctgggggtcctggcacctccttgtgggaccccttgggtatgagggagggagccacctgggccacagatagacccccttcctgtatccaggaggttcaggatggacctgtctcatctttctttttggtgggaagagagcattcctggccatggggaatgtggcctggacagagccacctagcctctcccctcccccaggcagggccctgaaagatggagatggctctgctcctgccaggtcaacagccagcagtctggtggatttccatgcagtccaggcaggatctccttctgtccccaccccccaccccatgtgcaggaagctggttccaagcagggacccttggccccgctttccacgtgggtgggcagtttccctgcgaggggcaggccaggcccctgccctatgtcccccagagaccgatgttatctacagtaagagcatacaagtctttttggctccaaaccaggcctggaggggtggtcttctcctctgtcctctgcctcttgccccccattaaaggtcagggaatggagtgctctgtatgtttgctggggttgggttttttcctttggtttaaaatgaagggctggaatccctggtgcagactgcacggtgagaggtgctccttgggatccactcgaggagcattactgctgaatgccctgccaggccaggagcatcgctgggggtgggagaggcagttggcttatttgtttatccaacagccatccatgggtaccccaagggccagctctgttctaggcactgggggtctaggcatgggctcaggagaaggggtagaacgggagggcttcctggaggaaggcttcctaaccagagaccggggtaggagtttgccaggcaggtgatgctggccagcttctcttgccattttccttttctttttttctttttctttctttctttttttttgagacagagtttcgctcttgttgcccaggctgcagtgcagtggcgtgatctcggctcactgcatcctccgcctcctgggttcaagcgattctcctgcctcagcctcctgagtagctgagactccaggcacgcaccaccacgcccagctaattttttgtatttttagtagagacaaggtttcatcctgttggccaggctggtctcaaactccttacctcaggtgatccgcccaccttggcttcccaaagtgctgggattacaggtgtgagccactgcgctcggccttctcttgccatttctgcagactcatagtgtgtgtggaagactgtatgtctgtgcctggcacagctgccctcggcactcaggtgggaggtgggggagagggctgttggtgccagcacaggtcatggcatgagacaggctcccgcagccaagcggggtgcaccgcagcattggaggggccctgctgcgcacgagatccaggctctgcatctgtcctcctccccaggaggcctggagggctgggagggaccagggtggtgaaataacccaggtgggagagaggcactgttggagaggcagagggagctgcaggtttgtagcagcgagctttaaaccctgggcctccaccagaaaacctcagaaagggctgctttgcttttttttctaaactacaaaagaaacccttggccgcctgggccccttggggtcgggtgggggaggagatccttcattcgcacctttgcaggcccagtactgtgcagagggaggagggtggaggcaaaggcgagggaggagggtggaagcaaaggcggggtccctccctagcccccctgccctgcctggttgctgctctcagacccctactcctggcccggaaacatggaatcttgggacagctggggtagggggcacagaacggagaccctggtgagggaggaactctttctccagccctggctgtggccacagcaaggccaggctgggaggacctcactcaaatatttacatctctcctaatatttaaatgatgaagcaggctcctgcacacagctgccctggagccagctgttgcctgccctaccctccctctctccctccctctttctttccctccctctttctctccctccctccttctctccctccctccttccctgcattctttgtctctgacccaagtccaggcccttccagctgttctctccttacccacaggcacctcctgtgactgagcttctccttgttatttttcataaccatttcctttaattgagcacctcctaggtgccaggccctgggctggtactttgtatacaaggtgtcttttaatccccacgagagcccaacaaggtagattgggctgctgaggctccagcgctggaaggccggcccgggtcctcccagtccgcacctgcatccatccatcactcccccactgtggagacctgttccctggcccctggctgagcacgatggaaatctctgtctactagtccttggagagtggggatggctgagggtcccgaccctggggtctgacgggggctgcctctgccccacttcagcctggctgctcttccactcaatgactgagtttgcaaaaccagaataacagtgctacctggctggtactttgggtggctgggaggcgtgggagagggtgcacggaggggctgagcgaggtgtcagcatcgtggggatctccgagggtagccttcccaggcccagggcggagtgtaggcagagggcgcgatggcccagcgtgccggctcacatctggccttgcccttgcccacacggcaatgtgggggagtcatcagcctctcagtgcctcagtttcccatctgtgcaatggggacaagagtaaatcactgtcttcaggtatggtaagcactcatacacattgactattgcagaatgaacacagtgagcccttcttaggcttctactacatgccaggcagggtgccaggccctagtggagaggggacaatgatgggcaagctggctcctgccctcaagggctgtcgagcagggaggaaggcgccggctgccctgactgtgacccggagtggggtgattcgcaaagaggctggcgggaggctggctgggggctggctgggggctgctccctctcctgcctgtgttccgtggcagggtattaaactggcttttttcatggatttccgaggccctgactgtgggacctcgggcaggttttgggaccttgtgactttgttcccgcttgtcattcaggcctttgtcctcagcagtgcccagcacacggcgacttctgcatgtccttcagtgtgtgactgaccctggagctgagacttggcagctgaggctggacattgtccttggataactcccggggaggtgggggcagggtggggctgtgagctggcaactccgagtccctagcagcctccgaatggaggctttcctcttgtaggattctcggggaggaaggaggggatgggggagatgaggcttgtgagtcttcaggagggcagaggttcacacctgcagcgccccagaaacactccggggtgcccaggcttacccagccctcctgagccagaaccaccaagagttggggaccagcagtccattttttagcaagatccagaaatgattctcctgaacagtccgagccaagaatgacatatctggaatcagaacatcagaactacagaggaatcgagagaacgggcccaaaatgtgtagggacctcagccacatggcgccacatggaggaaagcacccaacatcatcactgtatgaacctgtttaaacacacacacacacacacacacacacacacacacacacacacacactccccagtaaagagtggaaagacatttgtcagaatattgatggaagttacctgggttgtgggtttatagattttttccctttgtttttgtgcattttgcaaattttcggctttgtgcctaaattccttttacagtcaggaacaaagcaatagatgttattttttaaagttcatgggctcgtgcccgtaatcccaacactctgggaggctgaggcaggaggattccttaagcccaggagtttgagaccagcctgggcaacatagggagacccccacctttttttttttttttttttgacagagtttcactgtgtcccaggctgaagtggcggtggcacgttcttggttcactgcaacctctgcctcccaggttcaggtgattctcatgcctcagcctcctgagtagctggattacagacactcatatttgtaggatttgagaatcctacaagaggaaagcctccattcggaggctgctggggacttggagttgccagctcacatattttttagtagagacagggtttcaccatgttgaccaggctggtctcaaactcctgtcctcaagtgatccatccatctcggcctcccaaggttccaggattacaggcgtgagccactgcgcccggccatgggagaccccctcttaaaacaagaataaaaataaaaataaataaaagtttactgtcaaaaagaaaaacacatcacccaacctaatctccccctaggattgagagatgaggaagcagaggccggaaagtgtcacattccctggtcgctggcagtcaggggacctgaggcctgggctggttttctcgtgctccaggcctggggtgtcaggtggagcccctgctttgcccaaaggtctaggtgcctctgccagcactgcttgcttctgcatttttggccacaaggaatgtgggccaaaggcagggtccttgacctctgcccaggagggtgaagtgggctggtcctccttgtccctgctccaaggcccctgcggctgtgcctttggaaattgctggcccgagctagtgtgcggagctgggacagacctcaccgtggccctcgtggggtcattccatgtccgggctggaagggatctttcggtccagcccttcctgttcctcatcaggaaactgagaccagagaggtcatctgcctggcccggggtggggtgtagatggcgcttgtgactcctgcatgccacgtgcagacagtccctcagctgtgggcttcccacgcaagcagccatgctggggataacttggctgaaacctgcgatttaatgaagagaagaatgactcctcctgcagccctgtgccccacaggctccctcctgcccccacccctcctgcagaggggcctcatgctggtgggtgggtccctgttgctgcaatgggcccaggcagtttctgggcagtggaggcttggctgtcttcctgcccaatgtcccctgtagcccacgctgtccgggaagggcggggaagcactcagccactggggacttcacaagatgggtatctgggagatgctgattggcaggccaggctcccgtggcccacaggcaggtcagaggtcacagtgctgagctgggctgagttggcagctcagggcagtgggggtgggggtaccttgctcagccatgggcctctctggcacaagggtttggagtttactgtaaacaactccttcagtttttccttctctcataggccaccagcagaattgaggggccctctgttgatgaggtgtggcctgggaggggctagttgtctgtccacctgatccttgcggacaggtgaccacaggcttcctgccccagggggctgggggaaagatcggggaggcctctctggcttccccacttggaaggaaaatacgggcataggggagacactttacagggacacatttcagccagtaccctctggctgtgctgggggcacagtgcctgccctgcccacaagaggggtcagttctctccaggatttaacttcagccttcagtgcagggcagatgagcactcagaggcccagaggactcatatcacgagagagaagctgtgaccgcacaggcactgaaggttaaacagaagagtgggacacacgggtgacctgaaagtcccagggtcagtgtggttagccccagatagctggggagctttgggtaccaggcttagcaggggaggagggcccccgtgacagtttgctggggctgctgcaacaaagccccacgaactttgggggctgaagatggttctagaggccagaagtccaaaatcaaggtgtcgaccaggctgatcctttggggcctctgcgggaggctccggcccaggcctctctcccagcttctggtggctcccgggtgctcctgggcatgtagatgcgtcacgccactccctgctccgtcttcacatggccttttctctgtgtctctgtgtctcgtaaggatgcttgtcattgcatttagagcccaccctaaatccaggatactctcctcttgagatcctttattgcatctgcaaagaccctattccaactcctgtcacattcacaggtccgagggctagggctctggcatgtcttttgggggtcactattcagtccactgcggcagctgatcttaggggaagcagaatgttctaagcttggggtgagcggagggaacgctgctgggtggggagtgggagaccaggctcggagacaccgcggatctcctctgtctgatgagggcgtgatgaggttctcatctcaggtcctctgaatggcggctgcttctgaggagaccctttcccctggatctgcccctccagaaacctccacttaggtccaggtcccaaggtggatggtaagaggcggctgtccctgccacacttgatgggtgagtgtgtgaacggggctgggagcaggacacttgtcacttctgtggacagattccagaggctcatgaatctgctgctggggaaggtgcctgatctagcctgaccctccacccccacctcccccttcccgccccccttcaccagccctgttcccagagcttcacttccccaaaggcaggcgccgtttcctggacttctcagcagctaccccctaccccagacccctctcttgtaggcccctctggtctcagcgcctactcctccctgggcttctgcccctctaccgtgaggcttctgggcagaagtgtggggccccctcgctgtgtctggctctcgcggtataccaggggtcctcccaggggcccgccctgcccgctaggtttccagggagcttttcaagttcttagatgggcttgatggagtttcccaatgcgttgtctcagagcaggaggggccccggctgagtccgagagtcccctcagtcacaccctgggctgtttggggcagccaggcagcccgtcttctggaggtgctgcctctctctggttaccccttctggaatcttctgcgtccagttgcggcccctcctacacagcacacccaccacccccttttacctgtgactcttctttgtcaacctcttcatgtctttgagaatggagaccaggtcctcctcaccctggagttcagcagaacctaaaccaggcagatccgtgtaggttcacgtgggggctctgtggccactgtggctctgccgtcacctccagcccagcttggcgcgctttggatcatgtcattcagtgccggtcctccaaacctctcccctggctctgcaggcctgggaagcagctggctcctgggtgcagctgtgaccggagcctgaactctgctccctggggtcaccgtcccctgtaattaggctgcagctcatattggctcgggcagaggccatcggctgcccgccttggggccacaacacagagagccccgtgattaatggaggctccacctgggccaagtggcccctggtgttaggcgcttttttttttttttttttttttttgcattttttaagtgcttgtaacatttcccctaatggacaatgagacgaggagggagggaggggtggcttctctgcccaggcagatcaggaatggtcaccgcctgtgtgtgcagtgacaggtctgggaacagacaagggagagcttgtccgggaggctggaccctcacaccgatgctgcctgtgcctggcagctctgtcccgggcctcagaacagacactgaccaacacgctcctcagggtctccaggtccgggtcctggtccccggcagagcttcccatccatgggaagaagcaccgagcagccttgctggctcctcgcagggagctgggatgcatttctaagagcagcatgcgtgaagcccggggtctgggcaaaggagtgtttggggaagagtctgctgttgttggagggtcggaagtagaggggaaggaggggcacgcggtaggctgaggaggtggctggcgaccctgtggtggggacgagggggctatgagcagaccaggagccagcatcacgtttctctgtctccagaatcgaggacggagagctgccagagaggccctggcggggtgtctggggccacctaaagggcgtgggtggattaaagctgaggaaagcctcattttgggggactccgtacttaacctttgaggccctcagagctgcagcctgtggtttttcgaagtcaatcacctcccagggcctcgctcctgccttcagcgacagccatttatcagggagtctttgacccaaggagacctgaaaggtcatctggtccctctcctacccccaggcaggccacacctagaccctcccacacagatccgtcccacccttctgctgccttccaccagggacggagggtgggcggccctcccacccaggccctggcggccccaccccagccaggaaattcttcctctttatctgcctcacatctcttcccctgcggcttccgcccatttcccctcaatctgctcctagtggagcagccagcagctggtttagaacccgggggtggggggagcgctagaccagtgcagcacatctgagagtgtgccagaggtgctcccattcccatagctgatttagtaaagaaaagaggaagtccagcaacttagcgccactttaaagtccgcctggaatgaccctgtggctgccggaaccaggggcacgcggtagatgacgggagcaggcacagagaggccttcgtcccggatcagtcgctgttgccctcttggaggctgggctgcctttcaagaagaggacccaaggccctgtgagcggtggcctcctctggagcctttactgtggtcctggttctgctctgcgtaaagagagatggcttgaagcagaagctgctacgtggctgtcccaggcaggcgcccgtagtcccagctactcgggaggcggaggcaggagaatggcatgaacccgggaggcggagcttgcagtgagcagagatggcaccactgcaccgcagcctgggcgacagagcaagactccgtcttaaaaaaaaaaaaaaaaaaaaggagtagagaaatctttcccagaaggcctgcagtcacctccccttcatgtttcagaggtaaaaaaaaaaaaaactgcacatttcgctttttttttttttttttgagacggagtctcgctctgtcgcccaggctggagtgcaggggcgcgatctcggctcgctgcaagctccgcctcccgggttcacgccattctcctgcctcagcctcccgagtagctgggactacaggcgcccgccaccacgcccggctaattttttgtgtttttagtagagacggggtttcactgtgttagccaggatggtctcgatctcctgacctcgtgatctgcccgcctctgcctcccaaagtgctgggattacaggcgtgagccgccgcgcccggccacacgtttctgttcttgaacaggtggctccctgaccctgggtgtggttactccaagaccttgctctggtggggcacgattctggccccaggtagggcgaccgtataacttactgtcccttgggggacacgttagtgaaagggacccttgaatgactacggtgggacaacagatgtgagctgggtttgtcccaggaaggctggatgtatgggcctcttgagccagaggagacaacagcagaaagctctgcggctgatgggaccgagcaggagaagggccggcggaggctggggcaacaacgcacttgcccactgtgaagggcctgtgtgagctgatggctgatgagagggcagtggggcgaggctgcctcctgccaggctagaccagctccaggacacccatatctccttttcagaaccggtgactcagtggctagaaggggcttcagaattgacgggacactgagggagtcgaatggaatggctggagtggccacagcaggctctaggcctcctcccgtttcttttctgtgttctgttcctggggtctatatcctggggttgctgtaacagagtgccacaacctgggggcttacaaacatagcttccggcggctcctggagattcctggcgttccttggcctgcagacgcatcaccatcatctctgatctctggcccctgtctccacgtggctttctccccctgtctgtgtgtctttctccttttctgtcttttataaagatgctcaccattggatttagggcccactaaattcagaatgatctcaccttgagacccttaccttaattacatctgcaaagatccgttttccaaatgtgatcatgttcgcaggttccaggagttaggacttaagacatatcgttttgggggacactgttgaacccactacatttaataaacccagagttggtgccaatgtcccctgcggacaccatagcagattctggaggttccttgtaaaggaatccgtaggacttcttttcccttctggagggatgagactgtagctgggctggggaaagctgctggttcaagctggggctggttcagctggtgctggcttgccaggttgttagagagctttatccagggagaaattaacatcacaaagttgggggataagagaaggtttggaatcccaagggctggctgttgaggtcagctgcccacccctttgtgttccatcttacagggacccaggcctgccagtgctccgtttctggaaggaatgctgtgggctgctgtgccccataggcagggtggagggtccccttgcagccagcgagctgctcttcctgtagcgtgcagagggaaggaggaggcttgtttatttctcttggcctcagccgaaaatccaaccacaggctctggcactaggcagacctgctcattctcacatcatcattgcagagtgagccaggcctcttgggtggggctgtgatgagcaggaaggacctccggagtgcctgggacttcttgggcccagggttgccagaggcagagagaaagaagcctcctcctaacacttgagcaaagatagtcatcagaatccatcagagtggcctcctgtggctcttccctgggtgctgacccccctggtgcatttgaagttttcagggatactattgacgctccctgcacctccatccaggggttagtggaaatggttcttttcctccttgtccagaggtactgtggatgatgaccccaggtcccagacctcagtcattgggccacgtgtgcagataagcctgggcagtcagtaacctttggccaccaagctggcctcctgcggactgggccggcactggaggcgggtcttagctgctagcactgtggcccagccaggcctggccttgggaaggcagagggggaggggactgggaaagggattgagctgggggtggggtggtaccctggttcttccctcccagacctttggcaggtttgaactatctggctgcggctctctaaggagggagcgcctcctccgccttgatgtggactttgccttctgttcacgttgtccctgtccctaaacaaatgtggctctctgtggggagcctgggggccgccctccactgacactgctgtttcctggcttccctttgcaggctccgctcagcttcactgcgcctatttttaagcctttccttttggacggttttgcttcctgagaacacacccctccccatcaccccaactgtgtcctcctccctatccggagcctgctccacctgccccaggagccacctccctcctccaccaagcagcccaggccaattctggagggctaatttgtgtccctccagaagcaggtcctgagacagggatttcagtgggaggggacaccaggggatgcctgagtgtgggaatgggccaggcagggaatccagccaataaagggtgcctcaccagctcattgtgaccacaggtggctgcccagcccccataccgggcagcatggggagactgcagaccgtgcccccagccttgtcccacctggggttgggtaagggagctggggtttttatacttcagttcttggccaaggactgcactgctcactccttccagccttccgagggcttgggcactaggaaaggctctgggtggagacacggaaataggccatgtgaagtcagtgggcgtgattggtagcagtaaggccaggacagccttggtcaccagcaaggtgaccacacatttcagcatgcacagcccccacagacacacacccaggagatggtaattacaccagcaacagtcacccctgccgcgtgccatgcctgcacccagggaatcttattttttatttatttatttatttttatttgagatggagttgcgctcttgttgcccaggatagagtgcaatggcacaatctcggctcaccacaacctccgcctcctgggttcaagctattctgcctcagcctcccgagtagctgggattacaggcatgcaccaccacgcctgactatttttgtatttttagtagagatggggtttctccattttggtcaggctggtctcgaactcctgacctcaggtgatccacccacctcagcctcccaaagtgttaggattacaggcatgagccaccgcgcctggcctcaggggcaccttattaccccatcacctcctacagcaggtgacactgaggacactgaggctcagagtagactgtggttatgtcactctcctgtttggttctcctgctctcagccctgaaataaagagcacggtccctgtgcaggcccatacgtcctgtctccagccctggagcagtccttaagctccttgaaggcacaccaggcctttgggcctcgtcccccaagtcctggataaataggaggtgaaggagcctttgcaactggaccccactctgccagcgccaaggccctgcctgactacccaccccaccctacacagatcagggacctgtgccaaggtccagtgtcacaggagagtgaagacaaggaggtgcccatggcgtacatgctgctggactcactctgtagatcctaagggttatggggagttatctgccaggtgaggttttcccgtggctttttcctgcaggctcagggtagcatacagggaggtgcttccctactccttggcaccatctgtccggcttccctgagccctgaccctggctcctagatagccagtgtttcttcagggacagaacctgctttgctgctgctcagaggagacccagtttgaccagggctagcgttcctggaacctgagcctggaattccaccctgccctgggcagaggccacgttgctccctcctacgagagctgagctgcgcatgagattattctgaccttgggctctaccatttctttgcatgacatttgtcccaggctggagcagggctctgtggctcgcttggtgttccctccccagactgaggcctgatatgtacaccaggaagtgcttgatctggtttcaggagctgggagcggtttgccaggcagcctgtggtcagagcaggggccttaacaatggtcccttgtgcggcacattcctctctaaacaggcccaggtccaggctgctcctgtttcgaccccgccatgggcctggaggggaaagtttgcatctggagggtggcccactgtggcctctttttgtgtagcagctgagaccgtaggtgcttgagaataggagaagccctgtgcccatcctgggctgtgagatgtttttccagaggtggggatggggatgggccagcatgcagttacccacaccctccagcttgttggcatcaaggtctgtgtatgtgtgtgtttttttttttttaattttgtttttccaacatggagtcttgccatttgcccaggctggtctcggactcctggctcaagcgatcctctagcctcaggttcccaaagtgctgggattataggtgtgagccaccatgcccagccagtaccaaggtgtgttttttaagagcaatattggccgggtgcagtggctcacgcctgtaatcgcagcactttgggaggccgaggcaggcggatcatgaggtcagcagattgagaccatcctggctaacacggtgaaatcgtgtctctactaaaaatacaaaaaaattagccagacgtggtggccgggcacctgtagtcccagctactcgggaggctgaggcaggagaatggcgtgaacctgggaggtggagcttgcggtgagccgagattgcgccactgcactccagtctgggcgacagagcgagactgtctcaaaaaaaaaaaaaaaaaagaacaatatcgatggttttattccctgaacatgctaagtgatccccatgtagtataagcatctcagaaggcaggaaaatgtaatgaacaacacccaccgccattcattccatccagagatcgttattttctgcccgggtgtgagtgtgtgtgtgcgtgcaaactgcacatgtgtgtatgaaatggaattaggatctttgtatacatcttgtgtcctgctatttttacttaatattctcggcatttctcatcttcaaaaatgtgattttaatgatggtgcaggcctttgacatatgggtttagaaaatctgcggaaacccggactgtttccaggttttgtcagtttaatgctgatgcaaatgtcctcgtacgtaaatctttctgtacttctgattatttccttgggataaattcccagaagtgggccaaagcacatgaacggtcttcaggcttttggagcaagttgagatcggtggggattggagaagggacccagggaggcttttgggagcttgcgagattggagtctggctttaggggacttgaattcacagatgaaggagatggctggcaaaggtgggaacctcctgctctatgggtgggggggtgacactgctttaccttccagtgacagcatggggatcctcccaacatgacctggctccgcatctttctgacactgtgcacggtccacagttgtgatgctcagctgggagcctcttctgtgtccttcagttgcattaactccttgcagacagaggaggaagctgtccggtgctcctccctgctgcgtgggtcctttgaatctgcccagttgggcctgtggatctgtgcagtcacgtacggggttctaaaatctgcaaaatgacaagctcacgaacactctcgcttctgtgggtgaatgtggataccccttggctgcgtctccctccacagggaagatggagacgtgtaaagtgacaaggacctgctacccctgggcaggttatgccggttccactgtgaggatggtggcagggggcttcccaggaggcctgcacattgggaagagaggggcgaccgtgtgtgactgcaggacccagggcgcagtcttaggactctgatgggggaggagatgctggggagccctgttctgccagcctggtgacagacatctcctaatgtttcccggctgggtacaactcacaatgtcctccgtggggaggcaattgcccatgaggcatccctggcagggatgatcttgtttcattgccacatatcccagcaatgaaacaagaatctagagtgatgtgattcctccgatgacttctccaaccatctggggtttttgtgcgactccaagaagggggaaggaggcagctctcgctcctctgggctcctgatgtggcagctctggaatggccacgtgtccgttggcccacagtgggccatttgtcgaatgtggttgtggtgggattggggctgggctggagagtgggtgaccacaccagctagcctcaccctgggccactgtgcagccaggggtttcatcttcccaggggtctcgttgtgagtgtcctggggctgctggaacaaattactggaaaccaagtggcccaacaaagattgattcgctcatggttctggaggccacaagtttgacatcaaggtattggcaggaccacactccctccgacagctcgaggggaggacccttccttgcctcctccagcttgcgttggcccaggcgctccttggctctggcagcatctgcagtctctgctctcatcacgtagccctccccaccgtgtctctttgtgtcccaagtccccttctgcctttctcctataaggacaccgagcactggatttagagcccatcccaaatccaggatagtctcatcccgggatccctaatcacatctgcaaagaccctttttccaaataaggtcacattcgtgggttcttggggttaggtattagacatgtctttttgggggtcactagtcaaccctctacagaacctcagacgaaagtgaatcttcacaggctgaaatgggggtgaaggtctagtgcgtccctcctccttgggagctccctcagggcttgtgcctatcctgtgatcctgtgatccagccttttttttgagatgaagtcttgctttgtcgcccaggctggagtactgtggcacgatctgggctcactgcaacctctgcctcccgaatttaagtgattcttctgcctcagccttccaagtagctgggattacaggcgcccacccccatgcctagctaattttttgtgtttttagtagagacagggttttaccatgttggccaggctggtttcgaactcctgacctcaggtgatccgcctgccttgggcctgccttggcctcccaaagtgctgggattacaggcatgagccaccacgcctggcatttagtaggttttggttgttttttttttttgagacagagtctcactctgtcatccaggctggagtgtagtggtgtgatcatggctcactgcagccttgatctcctggcctcaagtgatcctctcacctcagcctctcgagtagctgggattacaggcatatgccaccacccctggccaatttttgtattgtttagtggagtcggggctttgccatgttgcccaggtttgtcttgaactcctgggctcaagcgatctgtccaccttggcttcccaaagtgttggggttacaggcgtgagccaccacgcctggcttagtaggttttctagaagcgcctgaggcctggtgaaggcatggtgtcatggagtagagaacattcaactctgttcccggggagccggaacacacccctcgtagccaatctcaacagtcatgacgtggccaggatgacatggggagggggtggtgtggactgtgtgggaggccagctccccgggaagggggctggagtgggcttggctttgaggaggattcccaagaggaggaggaggcggtggcatgctcgtttggggggatggcgtgagccagggtgggcacctcttcatttaggtgtcaccttcttgacattccagccgggacatggtttccttggggaagatggacacccccagagtggggcatctcctggggaagatggacacctccggaatggggcgcctcctgttctcactgttcttctagcacacagttgtattctcttgcagttctggaggctgtgagatctcctggctgttatctagaacaaactcgcctttgagcagcgccgtcctgatggtggggtggcccctgcgggtggaacagcccctgctgtctcagagcttactgagagctagtgggcatgggagtggtgctggaccgaaacacccagagggatcatagagccaggcagtaagcacagaggccagctagtggggagggagggacccatccatgaaaagacaccaagcattgaaagagaggagaggatggttggggaccggcacacatgtgcattttgcgcagatggccaaggtggtgaggcgccagccacgcagacaactggaggaaggaggagtgccctaggggaggggccagctccggttctagaatgatccgcttgtgcacgtgggcctggctggaataaatcattgcatccgcaccgtagactcaatcgtaagctcacaccagggcagcctctgctttggtgcagtgtcttcgatcatgagttggccatggtgggggtgactccaaggggactcccaaggagggggttcaccggatctcccagggaaggtcatttgttttcttgggttggacctgggacaaggccttctcctgtctagtttctgttctccaacttgaccgcacggaaggatgctgaggacacctggaagccggcccctgctctacagcacccataggacagaggcacaccatgtggggacagtttggacagtgctcaggaggcagggagcagatcagaggaccgcgggaggccctgggaaccgcacgaggacccaggcattgagctctgcactttctggcatcagcccgatgtacagtctggctctgtgtctaccccgtacttcactttccccatctgtacgggggcggtaataatattctttacagcccaggtttaagcgggtgtagatgtgatgagcttggtaagcccatctcattacattcagttctgggcattgaaccctggactttctggctggtagaagtggacattcaacctttccttggggccctggggcttctgcagaatcagaacacagccagcagtttgcatgcagggtgcagagggacagagggacaccatgtcgggagcccacacctggcacacccctgactctggggctcagtgtcctgctgccctgcggccacgtgatcagctagaggtcatggctggacccataggcgaatacagcctgtggatttgattttgtttggccctgcggtgttttattttatttttagttttagtttgtggagacagagtctcgctctgtcagtcaggctgagtgcagtgacacgatctcagctctgcaacctctgcctcccgggttcaagcgattctcctgcctcagcctcctgagtagctgggactataggcgagtgtcaccatgcccagctaattttttatttttagtaaagatggggtttcaccacatcagccaggctgctcagtgttttaaaaagggcttgttttgctttgtgccagcatttaaagatcaggagatatcatataaagatccagatttctactctcttgagaagtgaacagctctggccacgccgggcccatatcctctagggcagtgacggagctgagacagggcctgtgacaactgagagttctctggagtccacacggctccttgcccagcttctggtggaggttgagcttagtgacccaggatttcgtctgtgtccaccaagaaggagaggtgcctgtggcttagagagggcgcccacaggagtgccttgcccaggaagctggcagctgaggcggccagggttagggggttgggcttcctcttcccctccccagtgcctgagtgcatttggaggaagagagacgggtgaggggaaggcactgaaattggtcctggagcgctattattgggggctggggaccagctgtcatcccttttcctgtgggcaggggaggcagtggtgggatcccatgagacccggactctgtggcctggtgaggcagggagcggctggggagacactgtgggtctccacaggggtgcgctgtgggtctggcctggggaaggagctggtgaatgtgcctgccatgtgggtccctccctgctctggccctgataaccaggagcggctggctctcatttggagtgcggttgtggggactgtggaggtggcagcttcccaggtaccatccccactgcctccgagggagcagaccctggtggagaggcaggatggctgcagggcgggagctggtggttggcatcactgcacgggcttgtagtagtggatgggaagatgcaggagaggctgatgactgagaaagttggttcctgtggactaagctgggggagccggacaaccaagtggttagaaccttgggctctggtatcagcctgatgtacagtctggctctgtgtctaccccgtgccccactttccccatctgtactgggggtactggtattctttacatcccagggttaagcggctgcagatgtgatgagctcggtaagcccggcgcctcgccggcactgaaagctccagtgtccgcccttagtgtcattgatggggttttgttcccgctgcggttctgattggttacagttgcggtcacttattattggaggcatgtcccccgctgtggctgatggtagaggtgtgtttgctggtggtgtcccagtgtgtgccttggctggaggtgaggagggataaaaacagccgcgacaagaaggaaatcaaggccgggcacggtggcgcacgcctgtaatcccagcactttgggaggccgaggcgggtggatcgcttgaggtcaggagtccgagaccagactgaccaacatggtgaaaccccatctctactaaaaatacaaaaattagccaggcatggtggcccgtgcctataatcccagctactggggaggctgaggtaggagaatcgcttgaacccgggaggtgccgctgcactccagccagggcaacagagcaagactccatctcaaaaaaaaaaagaaggaaataaaagtcttctctggaactagaacgttcctatgtagacgtagctggagggggaggctgtgtggtttgcgccgtggccatggcaagacacgacgggcagcatcttcccactccagcctgcatctctgccccagaactcatgatggttctcctaggatggggctgtcccttccgcttgctgagacatgaaggacgggaagagacccccggccctcaccgccgcatcgcctgccttcctctgctgctccttagcaggaaacatgccggagtgttccctagccatccattcaccaattgcatcccctctctttatttttcagccttgaaaagatcttttgaggtcgaggaggtcgagacacccaactccaccccaccccggagggtccagactcccctactccgagccactgtggccagctccacccagaaattccaggacctgggcgtgaagaactcagaaccctcggcccgccatgtggactccctaagccaacgctcccccaaggcgtccctgcggagggtggagctctcgggccccaaggcggccgagccggtgtcccggcgcactgagctgtccattgacatctcgtccaagcaggtggagaacgccggggccatcggcccgtcccggttcgggctcaagagggccgaggtgttgggccacaagacgccagaaccggcccctcggaggacggagatcaccatcgtcaaaccccaggagtcagcccaccggaggatggagccccctgcctccaaggtccccgaggtgcccactgcccctgccaccgacgcagcccccaagagggtggagatccagatgcccaagcctgctgaggcgcccaccgcccccagcccagcccagaccttggagaattcagagcctgcccctgtgtctcagctgcagagcaggctggagcccaagccccagccccctgtggctgaggctacaccccggagccaggagggtgagtcgcagagcgctaggtcttggatgctgtggtaatggggggcctggttgctggctttgccacagaatcttggaggaagaagctggatatggggtggagggtgctaccctggagacccagaaagaccggaatgcatgggggtgggggtctgcaagctcaggagaggtggctctctctgtctgatgggaacatgccaagatgccccaagcgggacttgaatgagagtttggaaagattttctgggtttcaaggagcctcctttatgggtcaccgtgggccttgctgggacctctgtctgctgtgtgtccctggagggcctgggaggcttagagaatgaggagccacgcaggaaccagggcaggctcatgcaggggtgtaggacagggtggagttgagacccctagaagggctgtcacattctggtggctcctgcttgaggaattgcaggctgcctggatatgcccagcagaggccgagggcttggggaagggaggagggacgtatgcctcctgaggcttgcattggagcccatggtctggtcctcctcccccaggagggatggttgtggcagagggaggggaacatgaggagcaccttagcctgcaggacaaaattctcagggcactgggaaggggtgcctggaccagggggctgtgtgatagctgcacacggttttatttgggggtgcccttctggcgagaggagagaggccatggggctccagcagcgtcctgggagggctcaagcccacagccgtgctgacatggagcttacaggcaggggattggtgccagtcctgtgggacacagggcctgtttggaaatgccaggctgtgggacatggttgggtcccttctcagaagcgtgccccctggccccagcagggatcgtggctccatggggctatagtaaggtgccagctgggttagaagcccctcaagagccaggtctgattctgggcacaggatcagaactcagtaatgctcagtaagccttctttaggttggacaaacagcacagtctgggtttttgatttagctgctgcttcttatttctaaccgtggtgaaatacacaacatacaatgtgcaattttagccactttgcagtgtacgtttcagcggcattcagtacattcacggtgttgcgcagctgccaccgctgtccatctccggtacccttttcatcctcccaaactgagctccgtccccgttagaccaagctccccatgcccctcccccagctgctggcagccaccattctattttctgtctttattatgaatttatttgaccactctaggaaccttgtgtgtgtggaaaaatacaataactgcccattttgtgtctggctcatttcactcagcatgacgtcctaaaggttcatccgtcgtgctgtagcatggggcagaatttccttcctttcagaggctgaataatattctgttgtgcgatgcacttgtgttgtgtagctgttcctccatcggtggacccttgggttgcttccacatctctctaagtcccgctttccatcttctttgacttttctttgacttttttgagacagggtcttgctctgtcctccaggctggcgtgcagtggtgtgatcactgcttactgcaacctctgccccctgggctcaagtgattccccaacctcagcctcccaagtacctaggaccacaggttgcgcgccaccatgcctggctaatttttaaattttttttgtagagacaggttctcactaggttgcccaggctggtctcaaactcctgggttcaaatgagcctcctgcctcggcctcccaaagtgttgggattataggcatgagccacccaacccctttttggtttttctttttgaatgagagttctccagtggtcagtgggcttgggggctgggaggatgtggggcctggagagggtgtgggtttggggggagaccagtgctcctcatgctttcatgggcatgtggagtgcacatttgtcttggcgggtctggggcctgggactctgcatttcctacagagggggcatcggaacacactgagtagccagaggctagtgggccttggaaggtcctttccggccctcagtgtgcgagtcccgtgttccctctcccatctctctaagcttgactctgaagagccaccctgccccagccacccagactcagtgacagtggttgctggtggcatggtgtcaggccaaaggcatgggcagtttgcagagtggcaggaggctgtttcctcccctgccttctgttggtgcaggacctttgtttgacgtgccggatacacccccatcctgggttgatgtgttcacactcagctgagtcaaacaggatgtggctggggaggcggttgtcaccgagccatctaaatctcggtgatggctggtgctggatgcacagggacgtggtcctggctctgggggacaggtagggggatgtccatggggatgtacaagaacattctcctccaggggcagacacagtttagcccctaaattgtgccagagactgtgccgggagccaggcccaggg

SEQ ID NO: 1544 - DNA, 2801 bp, Homo sapiens
tgacttctcagggttcctcctgggcaggtgctccggaaccttttctcagcacgctggcctggggcacggccgttcctcctgcccagccacgttggggtacagggtgaagaagggctggggccagcccaggacagaggaaggcgaggcaggcacgcaggaactgggctttttaaacccttaagcccaaggaaatcgtagcatcgcgggacagggaaaatgaaagactttggaagtcgtcaggaatttgactctgtgagttggtttccaagagtctaagttaagcatctccaagtggatattaaaaaggagcagcaagcctcggggcggcgggggctggaggaggtggagagaggaggctgccggaagccgcactcgggacctctgcagccaccgaccagaccgggcggccgggactctgggactctcgcaggcagacccggtggtctgccggactcctcggggcccacttcgggccctctctcctgcctcctatttttggatttctctcctttgctccctttttcctcccgttttgaagagacaatgctacttcagtttggagcacaaacatatgatcagcacatggaaatgtggtaattcggatgcattcgtgattgcaacagattgaagaaattagaccagacaaagagtgtttttagaggaggaggaggaggaggaggaggctgagagagggagggcgacgggggtgagaaaggggaggccgcctctgagcgggacgccgggactcccgccgctgctaaatatatccgtaggaatggagagggaccggatctcagccttgaaaagatcttttgaggtcgaggaggtcgagacacccaactccaccccaccccggagggtccagactcccctactccgagccactgtggccagctccacccagaaattccaggacctgggcgtgaagaactcagaaccctcggcccgccatgtggactccctaagccaacgctcccccaaggcgtccctgcggagggtggagctctcgggccccaaggcggccgagccggtgtcccggcgcactgagctgtccattgacatctcgtccaagcaggtggagaacgccggggccatcggcccgtcccggttcgggctcaagagggccgaggtgttgggccacaagacgccagaaccggcccctcggaggacggagatcaccatcgtcaaaccccaggagtcagcccaccggaggatggagccccctgcctccaaggtccccgaggtgcccactgcccctgccaccgacgcagcccccaagagggtggagatccagatgcccaagcctgctgaggcgcccaccgcccccagcccagcccagaccttggagaattcagagcctgcccctgtgtctcagctgcagagcaggctggagcccaagccccagccccctgtggctgaggctacaccccggagccaggaggccactgaggcggctcccagctgcgttggcgacatggccgacacccccagagatgccgggctcaagcaggcgcctgcatcacggaacgagaaggccccggtggacttcggctacgtggggattgactccatcctggagcagatgcgccggaaggccatgaagcagggcttcgagttcaacatcatggtggtcgggcagagcggcttgggtaaatccaccttaatcaacaccctcttcaaatccaaaatcagccggaagtcggtgcagcccacctcagaggagcgcatccccaagaccatcgagatcaagtccatcacgcacgatattgaggagaaaggcgtccggatgaagctgacagtgattgacacaccagggttcggggaccacatcaacaacgagaactgctggcagcccatcatgaagttcatcaatgaccagtacgagaaatacctgcaggaggaggtcaacatcaaccgcaagaagcgcatcccggacacccgcgtccactgctgcctctacttcatccccgccaccggccactccctcaggcccctggacatcgagtttatgaaacgcctgagcaaggtggtcaacatcgtccctgtcatcgccaaggcggacacactcaccctggaggagagggtccacttcaaacagcggatcaccgcagacctgctgtccaacggcatcgacgtgtacccccagaaggaatttgatgaggactcggaggaccggctggtgaacgagaagttccgggagatgatcccatttgctgtggtgggcagtgaccacgagtaccaggtcaacggcaagaggatccttgggaggaagaccaagtggggtaccatcgaagttgaaaacaccacacactgtgagtttgcctacctgcgggaccttctcatcaggacgcacatgcagaacatcaaggacatcaccagcagcatccacttcgaggcgtaccgtgtgaagcgcctcaacgagggcagcagcgccatggccaacggcgtggaggagaaggagccagaagccccggagatgtagacgccgccctgcccacccccgggatcctgcccccaagtcatttccgtcccccccccaggccctcccaccaccccattttattttatatgattttctccatttgtcatcgttccccagccttgagatgcttcactttccttctctgtaaccagactttgaaaaattgttcgtttcatcaggctctgttcctcaatggccttttgctacgtgcctcccgagaaatttgtctttttgtataaatgacaaagtgttgaaaatgtatttcctgaaataaatgtttcaaatgcagaaacccaaaaaaaaaaaaaaaaaaaaaaaa

SEQ ID NO: 1545 - DNA, 1707 bp, Homo sapiens
atggagagggaccggatctcagccttgaaaagatcttttgaggtcgaggaggtcgagacacccaactccaccccaccccggagggtccagactcccctactccgagccactgtggccagctccacccagaaattccaggacctgggcgtgaagaactcagaaccctcggcccgccatgtggactccctaagccaacgctcccccaaggcgtccctgcggagggtggagctctcgggccccaaggcggccgagccggtgtcccggcgcactgagctgtccattgacatctcgtccaagcaggtggagaacgccggggccatcggcccgtcccggttcgggctcaagagggccgaggtgttgggccacaagacgccagaaccggcccctcggaggacggagatcaccatcgtcaaaccccaggagtcagcccaccggaggatggagccccctgcctccaaggtccccgaggtgcccactgcccctgccaccgacgcagcccccaagagggtggagatccagatgcccaagcctgctgaggcgcccaccgcccccagcccagcccagaccttggagaattcagagcctgcccctgtgtctcagctgcagagcaggctggagcccaagccccagccccctgtggctgaggctacaccccggagccaggaggccactgaggcggctcccagctgcgttggcgacatggccgacacccccagagatgccgggctcaagcaggcgcctgcatcacggaacgagaaggccccggtggacttcggctacgtggggattgactccatcctggagcagatgcgccggaaggccatgaagcagggcttcgagttcaacatcatggtggtcgggcagagcggcttgggtaaatccaccttaatcaacaccctcttcaaatccaaaatcagccggaagtcggtgcagcccacctcagaggagcgcatccccaagaccatcgagatcaagtccatcacgcacgatattgaggagaaaggcgtccggatgaagctgacagtgattgacacaccagggttcggggaccacatcaacaacgagaactgctggcagcccatcatgaagttcatcaatgaccagtacgagaaatacctgcaggaggaggtcaacatcaaccgcaagaagcgcatcccggacacccgcgtccactgctgcctctacttcatccccgccaccggccactccctcaggcccctggacatcgagtttatgaaacgcctgagcaaggtggtcaacatcgtccctgtcatcgccaaggcggacacactcaccctggaggagagggtccacttcaaacagcggatcaccgcagacctgctgtccaacggcatcgacgtgtacccccagaaggaatttgatgaggactcggaggaccggctggtgaacgagaagttccgggagatgatcccatttgctgtggtgggcagtgaccacgagtaccaggtcaacggcaagaggatccttgggaggaagaccaagtggggtaccatcgaagttgaaaacaccacacactgtgagtttgcctacctgcgggaccttctcatcaggacgcacatgcagaacatcaaggacatcaccagcagcatccacttcgaggcgtaccgtgtgaagcgcctcaacgagggcagcagcgccatggccaacggcgtggaggagaaggagccagaagccccggagatgtag

SEQ ID NO: 1546 - DNA, 21749 bp, Mus musculus
  misc_feature (1)..(10): n = a, g, c, or t.
  misc_feature (9223)..(9475): n = a, g, c, or t.
nnnnnnnnnnccatgtatcccttaaggccatgcccatgagactcagttcctctaatgacgtttcacctcctgaagactctataccctctcagaacagtgtccccaggaggaggttgggggacaccagctggatcagcacccatccctctctgtctcctgtctgagtaccctgtgagcaacagcctcaacttccagacgctgtgcctttccctccacagtggacggtgtccccgagctgtgaggcagaacaaaccctttctccttgagtcgggtgttctgtcccagcatcaggaagagcaagtggtacaactagaacatcagcatgaccacggtcctgtttccagcaccaaaaatacaaatatggctgccatgctccccgtgggtgggtgggtggggcgagaagccatatctcaggtctctgggtccttgggtgaggttgaacccccccataggaggataaagtccccgagtaacttccctctttcgccatgaaacccagatccactcatggggccttcttagtacttattgcttgaggccccatgcctatgacagtggcctctacctaaggttgatgagcaggccggtgcccattagcctagccccaggtgcttacttgactggctgactggggatgacagctagccaactgatacctagtgctgctggctgtcacacctgaggttcttctccccggacaagtaggcatcttggcccccatctccagtgttaggtgacagctgactgcccagacttgctaggcaagtcctggctcacttgtctcagtcccagcaaactcagctgcctctctgggctggagaggaatctggcatgactccctcactctgaagacagcagctgcagacttcacagagcttcccttccccatcctctgccctttggctctggtgcccattgggcttctgtgctgggccctgaacaactacaatggagaggcagcttcaaaggtctgcccaatgtgttggccatctgtatggcagggctacctttaactccagaatttcagctttccgatctgatctgggggacagggtaacaaaagcattgggggcagagaggtagaggcatctgggagatgggtccatgggtaaaacagcttgctatgcaagcacgaggacctgggtttaaatccccaggacttaagctgagcatggtagagtatctaccatccagctgtcccacagtgagataggaggcagaagtagaattcccagaagctcgaggggcagtgagcttagcattcacagaggcaaaacaagagaccaccccattctaccccaagccgtctcatattaagtggaagacaaagacctctgatctccatatacgcaaggctgacttcctggctatctgaatagcccaacctacaacagttgatgttttgacctcaggtccagagctcacccagccttattctcagctgagctcttcctctgtcacccctactccgacccaggcatgatttagcagccatagatttggaaagactggagccagatagaagtatacatcactccagagcctggagagctctgcctttcactcagaaagtcatcacaggcccaccaaacctgccaatgaggcctaagagtctctctcctgtgctgtttggatttttgtcaattagatacaagctagggtcatctaggaagagtgacacttccttgaaaagatgcccccatcacattggaccatcgtctagggagcgttttcttcatgattgatgtgggagggcccagccctttgtaggcagtgctatccctagccagatctgggcgaggtggcacatacctttggtctcagcactcggggaggtagaggcaggcagatctccatgagttcgaggccagcctgatctgcaaaggcttcctggacagccagggctacatagagaaaccctgtctgggtgggagatgcagggagcaaattgagcagggcgtggggttcaagctagcaagcattatttcttcacggtctctgtttcaatccctgccttcaggttcctgccttcccttcatgacaggctgtaagatgaaagaaacctgttttcttccccaggttgcttttgatcgccgtgtttatcccagccacggatgacaaagtaagccagaatccccaaacggcctctgctctgcggcctgttgggattcactctttccttgattcgtttccagtctgatttctttgaccacccagacactgctgggctctagaccagcccttctcaacctgtgggtcgtgacacctccagggggtcctgtatcagctatcctgcccatcagatgtttccattatcattcaaaacagtagccaagtcacaactgttttaaagggccacagcattcggaaggtcgagaaccgctgctctagacggagccctgaccagcaggctgactttttttcccaagtccgtgtggttctctctcacatgatgctctctttggctctgatgctgttcctaactgtcctgcctaggatgcagctacctccatccatctcctttagccccttggatctttccactttccccactctcccagcatggaagatccactcggctgttctccatgctgacatgcctaggcccaccctctacctccttctggaggccgtagtgtaagactacagagctttctttcctcaagcatcttcccgggatccttcctgcccgcctgcacccccccccccaatccctgagaagaacagagaatgacccatcagcaagccaatgggttaccccgagaatgtgacaaagggtgaggctgtgggtcccaagggtctgcagatagagggacgagccagcagccttgggtgcaagaccaggccttggagggtatctctaccttaccttataccacagagagaagtctggctcccatgttgccctgtggatgaaggtgggcaggctgagcacaagctttcaggaaccattgaattcattgtgaggctgagatggatctgcgtccataaggccaggaggggtaacagtgtcagaccccagccccagagggcgctctgcggttgattcagtagccaggagcatccagagagctcttctggggcccttgctttgtctcccactctgcaatccaggggagatctgcagccccttttccttggcaacactcaagacagaaagaggaagctacatgcccagccacccacggggaaggagattggttccactcctgcatgaggttgtcgacgaagtcattctgccttctagcaggacaatggagaattgaagaaagagggccgaagaaatggctcagccgttaagaacacttgctgctcttgcagaggacacaggttcagtatcccaggacccagatggtggcccacaaccgcctataactccagttccaggagatctgaccaccttcttctggcctcctcggccaccaagtaggcatgtgtacaggtacagttacaggcaaacactcacacactcaactagccagggagtctgctggctagtaaatcccaagtggccaagtggcctgcttctaaatccttccttgtagctgtctgatattcactccatcccaagtcttaaaaaataaataaataaaattgacgttattaccttcattttaatgcaaagggaacagaaatcagatcagagaggttaagtaaccagcctgagatgccacagctgaggtcataaataaacatctctccccttcaatctctgactttgaacagcccttttaagagactgtagaacacagatgcttctccgttcaggaggaacgatgacagctccacagggtctgttcctggaaaccccagctggctgctgacatttcctgggtgcatgctgttccgaggcagatgtcacccaggacccctgaaccagatggggcttctcagatcacagctataacgtgactctcgggactcagtttcccatctgtgaaatgaagaggctccttcctcatcttgcttcagcagttcctgtacaatcaagtatcttagtttgtcccagaagctcagtaagtagccggatgtaccaaaggctcactgtccaagtgactcacgttggcttttaaatgatcgatttctgggattcttctgtcttactattagtttgctgtgacagactaaccaacaagaagcaactatgtaagggcttatttcggctcacggttgaagggcacagcccttcatggtggggagccacagtaaccggtttgtgaggtagctgctcacattgcatcttgcttcggggcagggagcagagagagagatggatgctggtgtttggctcactttctccttttttcttcagtcctatggatggtgctgctcacagctagggtgagtcttccaacttcaattaacctaatgtgaaaactcccgcacaacagcagcggcctgaggagcgtctcctacatggtcctggggcctagagagttaacaataaccatcagccaggatgatgcccaggttatatttactgtgcttcacaaactgtcatcttggaaacagccttgtgcctggccttactagattggatcttatttttcaggtaagaaaaccaaagcccagaatccggaatagctcagccctagtcaggtgactctagaccagcggttctcaaccttgctaatgctgcaaccctgtaaatacatgctgtggtgaccttcgccccataaaattattttgttgctacttcataactgtaattttgttactgttatgaattgtaacatcaatatcttctatgtgggatagctgatactcaacctctaggaaaggacccttgggccttaagggggggggggtctcaatccacaagttgagaaccaatgctctagaaagtggtagagggattttcagacccagtgatggtaggtagagcttaaggttgccccagctttgtgtccaagttccccccccccctcccccgtttactgtgtcagggaggatgacggaccagtttccagactaggaaaacccaggtactgaagaaatgaataaagctgaaagaagcagcggtagctggggtggtggacaaagaaaggcactggcctagcagctgaggggcagaggcctcagtcgcatgagcccatggaataactgtagaagtggctgttaatttcagcaaactgtcttccggtgtcctctgggacactaatgcaaaacagaatcacgtttgcctgcttcattttgtgaggtaattctgtaaattttatttacttgtttgtttatttatttatttattcgtttattttatttttttaaattaaactctatatactagggtttaaatgctgctcacatggggggttcctgaaagccctggagggggcacacgtgggtctgcccgtgttttaaacagaggtatctcctgcaatccgaagtcacttagcctggtgcactttacacctttttaaagattattccccactgccctccccatccccaccccgacacatttgtgtggaggtagcagagacggaaaaagctgtgctgtgtctttaaacagggaggagcgatcagcagaagcctgggctgtaaaaaggctaatgcgctgtggaagagtaggagtttaatctaatttagttggagggtgtctgtctgcggtgttgttttttggagtgtgggaacagaggaggggagctgcccccttgaatggtcccttctgcgccagaagcagtggggagccgcgcgacgccagcgatccaaggcccggccttgaaagaggattaaagcgatgcttgatttgcaattcacacgaaagcgccccgcgaacctctggtaatatttcaatccacatttcaagggaagtggccttaaaatagcggcctaaattgttctgccgcggcccggacactccttcatgcattttataacgcagagggccaagggccttttctctctgcgcctcaccacccccaaccaccccgtatcttacatgtgctgaagtgtaattaaaacttgttcttaagtttggggcaacctacactgctttgtggtatgaggtgtgtgtgttttatgcttggagcatatgtttgtgtgtgttaactaaacatcactttggatgactttaatatatctcctccgaaaggggggggggggattgtgaggcagtcgtggaaccaagcctagtgggttggaaaactgaattctcaatgtgtgccttttaaagagaccattaccagtaagcagaccactttccttactgtaaggaacagtttggaaaatgcaaacagagatcttaagagctttccaactggatccgcaaataggaaagttctagaaatggccttgaagctaccaagacaaacgttaaggagccagctccctggttcatcttcaggctgggagacaggatgttcatgtctttctataatctctgcccataccccacatgtttactcttgcaattagcttgtaacaggctaagcttctggcttaatttttctttattgtaggagacgaagtactttttttttttaatcttaaagagattatttgggttctctctaatcctatttcagaaacccctctcaagactttatggttccttcacccatactgaggaaggctgcagctttgattaccactgagacccatggcagagaatcttttcttttttttttttaacttctgactttaccaattaaacagggccttcctttcaactccccaccacctccaaaattatttaactcaagacaccatctgactcttaaagagtattccttccagaataccttgcactctccttggtagacatttgcaagaactctacgctaatatctacagacagtattttgaaatctcacgtagatagatatattaggagatttggggtccaaagtaccctttgctctaggatgctatttaaaatcatgtttaattatcaagtttcattaaaaacccttgctcaaattttgagaaacctaataagatttccattaatttaaacatagctctattcccaggccagtcccccccaccccaccccaaagctttctcttccctcttttatccctggttaaatatgtaaataaaatgtctaaagtcgttcttcaaagaagacaaaagaaaaaaaagagccgaggggagagagacagccataaaattcctcccagctctccataacgcttgccagaggggggccggtttccgagccagggctgagcagcaggggacccggctgctctggagtcactcgtctcaaatcccacacacaggagagagaaaaataaaatatcttttcagctggagccatcaaaggggtcctttcatttattagcgttgccttccactctcgctatctcggggcccttatttttagatactaatgtctatttgttgctttcctttctttttctatactaggttgggcagatggaagaaattctgttagctttttcttctcttaatgtattttaagggagtcccggggggttgggggagagaagaaaggaacgtgaagtgatcatagctaaaataaaaggtcggaacactgtagaagtaaccagagcataaaagaccaattacgtggggcagtctcaaatagctcacaccctgctccggagctgagctcacccaggctacttccacgccccccacgccccaaggggcggggggggggagtgtggaattaggagagagagagagagagagaaaacagaaggcaaaagtgtcaggaaggaccccttgcaaactagtctgtcttaaagctaagcgatagcccaagaatcttacctgacttaaaaggttttggaaacagcgtactagactataaatatctaagtaaaccatccttatccaagccgcaagcgttcaccacaccgcaggtttttcttgggtcactaacacggtggtgggtggtgattctgactgtgttaacctcagtcttccggaccgctgtttccacggatccaacttcctcccgtgaaaggcagaggggaccaggggatctaaaggtgaggcatgagcctgtgcacacccctccgccccccacccccaggactcagcaggtcctgggagtgtcccagcctcaggtctgtccgctatgtctgacaaacgaaaggggggtaaagaggaagaactccctgcagatgggacgctgaagccttgttttaattagaagtcgatcctctgcaggaagcgcaaggcagggcggggaggaggggtcctgggtagcctcgttcctggcttggctggagccactgaaggcttccaggcatctgtgcacccaactcggccctggggtgcgcaagactgactggccgaaagatgagcaggggacttagctgcacctatgcagttgggggagtccgcactggaggtcctggtagtttcccagacacttaaaacgcaaacctgaatgggggtggggtggggtctaaggagagagtgggccaccgccctgagggctgtttatccaaagccaagagtccgcgacaggtgccgcaccccagatctgtcggacatctaaggactgcggtgggctcccatggtgcactcactccctgtgcgggggaaggaggttgaagctctgtgtccttatcacagattagcccaaaaccaaccaaggggcaggagccagcatagcaaggcacggagaggccccaccactctgcgtgggaaccagccgtgcgcgtgtaggccggggctcagcctccgcctcccaggaggacgcaggccgagcacatctttcgccaaataatataaatacacaacttcctataataaataaactcagccgcttggagaaaccaccagccggcttggcgcgatggtccccaacacggtggccttggcggggcaagggtcaccacgatccaagccaagcccctcttctcggggtgcggggtgtcagcggcccggaaagtctcctccccgccccctcccttctttctttgagtagaccttgcagaagaggccctaaactccggcttcccaagtcccctccccctcccctgcactcggcccttttgaaatttcaaaggcagcccctccccggagtccgagctccgcgccccgggcagcaaacccccggcttcgggaagatgcgggcagctttacaagccgaggggccacttttttatgagcacggtcataaaacgcaaatcccgtgtctctttgaaagtgccctccgccagggcccggtcgtaaaagtagaagatgcgtccccagcccccaaccccgggtgaggaccacccttacccgagtccccaannnnnnnnnnnnnnnnnnnnnnnnnnnnnnnnnnnnnnnnnnnnnnnnnnnnnnnnnnnnnnnnnnnnnnnnnnnnnnnnnnnnnnnnnnnnnnnnnnnnnnnnnnnnnnnnnnnnnnnnnnnnnnnnnnnnnnnnnnnnnnnnnnnnnnnnnnnnnnnnnnnnnnnnnnnnnnnnnnnnnnnnnnnnnnnnnnnnnnnnnnnnnnnnnnnnnnnnnnnnnnnnnnnnnnnnnnnnnnnnnnnnnnnnnnnnnggcggaggctgcccggggcgcaaggctttctgatgcaaagcagcagcggggcggggcggcgggcggaggcggggcctgtcaccaatcggctttgctttttttttttttttttccctctttgctaccctttgcctctttgcaagtcttctcatcccgggacgccgtgctggaagcagctgcgggcgccgggagggaggagctccagggcctagggccacggtgtgcccgcgctgccccaccgcggtccgcgatcgcccgcgcccggaagaagaggccaaagtttgcgcgctgagcggcgctcgctccgccgtattgtttgcaaacttcgctcccctcccccgccgccccccgactccgctgaggccgcgcgcccaccgcggtggccccgggcgccgcgagcgctccggccagactggatgggcatgcgcgggggcccgagccggggcgcggagccgcgggcagcagcaacagcccgtgcccgggagcggcggccctgagcggcgctgggacattgagggcgccaccatgcaacacccgggcccgcgcctgtggctggtgctgcaggtgatgataggctcgtgcacggccatcagctccatggacttagagcgccctggagacggcaagtgccagccggtggagattcccatgtgcaaggacatcggctacaacaccacccgcatgcccaacctgatgggtcacgagaaccagcgcgaggcggccatccaactgcacgagttcgcgccgctcgtggagtacggctgccacagccaccttcgcttcttcctgtgttcgctgtacgcgcccatgtgcaccgagcaggtctccacacccatccctgcttgccgggtcatgtgcgagcaggcccggctcaagtgctcgccgatcatggagcagttcaaattcaggtggccggactccctggattgcagcaagctccccaacaagaacgaccccaactacctgtgcatggaggcacccaacaacggctcggatgagcccagccggggctctggcatgtttcctccgctcttcaggccccagaggccccacagcgcgcaggagcacccactaaaggacgggggtccggggcgcgcaggttgtgacaacccaggcaagttccaccatgtggagaagagcgaatcttgcgcaccgctttgcactccgggggtggatgtgtattggagccgcgacgacaagcgcttcgctgtggtctggctggccatctggtccgtgctgtgcttcttctccagcgccttcaccgtgctcaccttcctcatcgacccatcgcgcttcaggtaccccgaacgtcctatcatcttcctctccatgtgctactgcgtttattcggtgggctatatcatccgcctcttcgcgggcgcggagagcatcgcttgtgaccgggacagtgggcagctgtatgttatccaggaaggactggagagcacgggctgtaccttagtcttcttggtactttactacttcggcatggccagctctttatggtgggtggtcctcaccctcacttggttcctggctgctggaaagaagtggggccatgaggccattgaagccaacagcagctactttcacctggcagcttgggccatcccggctgtgaagactatcttgatcttggtgatgcgcagggtggcaggggatgagctcactggtgtgtgttatgtgggcagcatggatgtcaatgctctgaccggcttcgtgctggtcccgctggcttgctacctagtcatcggcacttccttcatcctgtccggctttgtggctttattccacatccggagggtgatgaaaacgggtggggagaacacggacaagctggagaagctcatggtacgcataggggtcttctccctcctctacactgtgccggccacctgtgtgattgcctgctatttttatgaacgcctcaacatggactactggaagatgctggccacccagcacaagtgtaagatgaacaatcagaccaagacacctgactgcctgatgaccacctccatccctgccgtggaggtcttcatggtcaaagtgtccatgctgctggtggtgggcatcaccagtggggtgtgggtctggacttccaagaccctgcagtcctggcaacacgtatgcagccgggggctaaagagaaaaagccggaggaaaccagccagtgtggtcaccagtgcagggatctacaaaaaagcccagcacccccaaaaacctcaccttgggaagtatgaactgcccgcccagccttcagcctgcgtgtgaaggcagagctggctgcaagaacaggacattcggagcccaaatgggcagcttttcttggttggctggttgttggtaaatcaaagtaaaaagaatatgtatatatatatacatgtatgtgtatgcatgtgcatatatatgcatatatttacacatacatgaagtctaccttgaggttcagaacagctgaatgtaaagggttctgttcagtttgttgcctccctgaagggtcgctcattaaggagggagcctcttgtgtaactaatttgtggtaaagtagttgattcaaccgccctccagaaaacttttgtttaggcctcaagcacacagctgtgtattcagaaggctttgctgcctgtgcataaacttgaggctggagagctcctttgtaagctaaagagctttcctggggggggggggcagccagtgagccacccaagggcctgctctccctccctcactcccccagctaggctgctgtatgggtgggagggaaggtgaggaggagaggggataaaagaggtgacaccccccccagcccaaggtctgcctgcagatcccttaaaagagagtcacttccccagccttcatagccatgtttctcccaacacagagcccacgctaccctctcaccccactgcagatctaacactggagaattcaaatggtgtgcaatacttttttttttttttttttacattttccccctctccctagcaaaacaaatgagagagagaaaaagtattttgttgtaaataaaaggcaagaaaagaaatcatctaacaaaagaatttagaggctcaagcctcagggttgggggttgggggggcgccttcagcctgatacattttgtggctttttaatggaaaccaagccagtgtgttctacacactgggactgatttgtggagaggaagggggagggggggaagccagtggagagcaccagagggcttattgactctctgaattgttaaacaaatgatttccatgagtggtcttgaagcacttgggaagacaaactttgtctccagccagggagggccatgcctgcctctgtatatctgtaatataggatatttttcatgctccactattttattaaaaataaaagacattctttagtttgctgctagtcactgtgcattggtgaggggagcgttctccatttcttagcagattcttgggtgtgcgaggctggctagacatggaccatgaacctggatacaagctggcaaaataaaacatcctggggctcagaggcctgtgtgctggctgtgggaaaaggtggcggtgactctgcccccaaggctccatggatacacagaatgccgagaccacactcacccaggatgcagcagtctttacctgacctactgtgtgcaccagtctgagtggaccactctactgcagctctggggccatgggatacatttcagagctggataggtgaaagtgggactaagtgtgtggtggggggagggtcatcagcaacaaattcagaagcttggccaccttgaagtttctggtaccctttcttctcatcactaagacaagctataggccctggagcagacccaggatccactaggcttgactaagctaaagttctagctagaaggacccaaggacacagttcagctctgagaaattgggggggaggggtcagtgtagacctacccaactctgaccttcatagctcagaagcactttaaactatttgagcccttctgaagcagagataccagcttgatcgtggctttctgaagcaagtattggggaagtttcacagggccatgggtccttgagcaggaaggacaggtgaattgggtagtctggggaacaagttctagaaatcaatgctgggcagccgggccatcggtgagcataaaacccagaacccagaatcatggaaataaacctctatattgactattgttgtccttaccaccagaagagacactaagagtgagtgtgtgtgtgtgtgtgtgtgagagagagagagagagagagagagagagagagagagagagagagagagaggatcactggagtggcaactggccagacctaggctcatctgcccccctgagctgtagtggttagttgtataggttttgaaagttcatacagagcaatgcctcagccaagaacatgataaggccttgttcagctgtgagcctgcttgacggtggccccatccccaacagtgacagggatcctgtttacaaatatcaagagactaacaagtggccagaagtgtgcttttaacatgtgctccttgggccatagtgagaacagcctgagcttctaaggtatttgtttcctgcaccttctcttgtttcatccgtctctctacctgcatcagtctgtctcttgcagttgaactctagttctaaaccagatggtagatttaaagaaaaacatcaaagcttaaaagttagaaagcttacacccagacacacagacacacaaacacaccacttatctttggacacccccccacccccccacccaatcccctccccctcagctctgtccagacctcgaaagggaactgctgtttccttaatttggagactgtaggcttcactccaggaccacagccatgctgatggagagacaggaggatttctgagttcgaggccagcctggtctacaaagtgacttccaggacagccagggctatacagagaaaccctgtctcaaaaaacaaaacaaaacgaaacaaaacaaacaaacaaaaaaccccaagaaaatcaaaacaaaacaaaaaaaaaaaaaccccaaccaaccaaacaaacaaaaaaaggcccggaaaaggtgaatgtcaaggtctcaaagcactcagttcttgatctcctaccaccagctgttgctcacatgttaagagagcccgacttagggaaaccatagcctcatagaggagacagcggctcacgtctcctgagttccaaatattggggagatatcctgagccaggggtcccccctgtggttgggagacccagcacaagtgcctgcaagaaaagtgaagctgctggggtcatgcgaagggcaaaggtaggaaagagaacacccctttgagaaagtgataggcagggtctagctggtgccccttatataccccacaccaagcacagtgtcttgtccagtcagtacacaacacagggaaagaatggggagaacagctgtggccacagcccaggcagatatgagagcctctctggaccagtggttcaggaagtgatcttttcagtagatggcgtcgggggtggggagatccaagaagcaccaggtgtctgtatgtccagccctctgacgaggaaattcaaggttcaaagggctccggagtccagcctaaggtctcagcttattttttgaactcagggtctctcactaaactagtcaccctggctagactggccagtaaactctggcaatcctgtttctgcctcctctctagcactgggatcatgaatacactgttacactccagtgttgacagggaactaggggttcaaattcaaggttcctttgataattcctagactaagccaggatatgagatgagcactaagcccagaacagtccagtgccacaatggagaaaccaggcctacttatacatccattgcccctcccctcggagagtcaaacatgcctcgctaatggtctccaaagagaatgagcttttgagctttccttacgggaacactttccgacgccaggcacaggattccagagaataccctctgatcttgcaagtgtaaaaggcggcgcagtggcttcgccccggtgagggagaccctagctctgtgtctttgaacaccctcacatcacagtcacctcccagggacaagggctctgtgctgactcctcccccaagcaaacggatggcccagcagcaacagctggaagatgagaaacgcagacaggctgcaggggagccccgggatgacacggggctgggggttttcatgttttattaagagtgcggaaggccaagctggggggaggagggactgaggcgtttgaaatccaaaaagaatgagttgctatcaggtaggtgagctgttgtaattggggacacccctaggaaaatgacacggttggagcgctggcaggtcctcggcagcctgtgggaaccttcggaaggcatcgtatcttgccttttattagaagacatttttaattaaaaaatggggattcccagcctctcctccaggggctttagtgtcaatgaaaggattcaaagccattctttgcctggcacctgcctccgtctagaaggtcgtggcttctgggggccttggagggagagttctcaacctgagcactagactatatcttaaaggctattcttacctgttttaaggacctgtaaaagcagggtgatgcatgccggaaattctagcgtttgtgaagttgaggtaggtcagttgccagctcaaagtcagcctgggctacatagggagagccttactcaaaacaaggaaaacaccctctcatggtatcccgagaacctctgcatttgccccatccctaccctcagagtcccaaacacacacactgttagctatgtgcaccatcctccactggcaacctgcctgcccagccacccttagatccccatactccacaccccccactgcccccgctatgattcttctgaggctattatcaatctgccaaggtcccgtctgtcaccagggtcccatgaagtctggcctggactaaactcagaggcaaaatttcggttacttgcttttctttgtttggcctggagcaatgagtctatcattagatttttctctcttggagaaatatgtctacatggataaaacggtttgttgaaagggtggagaagggtggactgtaaaacttgccgttctcccacagtggctgaaagctgagtgttttccatcagtgaagtccagagctcttccatgtttagccttagcccatctcccagctaagcagaggacactaaagaaggcattccccacagggaccaaggagatgtgttgtttattctgacttacccttcagagggctttttttccccccagtggaaaaaatgtcccaggagctggggaaatggctcggtggatgaagtgtttgctcagtaggtatgaggagaggacttgagttcagatcccaggtacagccccaagtgtggctgtgcctgtctgtaatcctggttctgggaggtggagacaggaagatcctggggttcgctgagcagccagtctagccaaaatggagatctctgggttcaatgagagactctatctcaaaaagaaagccagatgaagatggaattgaggaatatgctctgtcaacctctggcttccatgtgcactcataccagcatgagcatcacatacatacacaagtgtacacacacacacacacacacacacacacacacacacactaagaaatgaaaagatactgcctatatcttaggtgctaagccaacgcccaagtaagatacccatatagcttaatgaaatcacatctttccatctggggtatgaagtgtgtccttttggaacacaagagagaggctgtgcacctgggagaaaacaggagaaatcttagttttgtttcctgttgctgtgttaaaatgtcctgacataagcaatataaaagagatggctttatttggctcacaatgccaggttactgtccatcattgcagagaagtcaaggcaggcacaaaaagcagctagtcatgtgacacccagagtcaagagcagagagacatgaatacacgaatgcttggagacagaaggcattctcaagggagtagggacaatagacatttgggcaactttgggtaactttagaacctgctgggatccgatctatctatctatctatcgatcacttccatttgatggtagattgctggtgtgcatatgctactttatggcttgatggctcagatgacacagatgacacaagctcaggatagggagttcaggttgcatggtaaccctggtggcctattgtcaagtgttcagttcccaccacagcccagtagcaggtcgagagctgtctctcaaagggagaatagttgtctgcagatgatggcaaattcttcctcgagggattctctcgtggttcacctatagaggcttgccacaggctccaagcagcacctctgactgccactgccacctcaagaaccattgagtttgctggatcgtgtgaccaagtggcaaagcagcctagacctgttgaagagcctttgcctgtcccaggtcccactcgaagctagcagcttgccaagtcacttcgtagatatcggcccaagcgacacacccaggtgaggaatgtgctgtctccagaatccaaatagacccactaggcattgtgcttctttcttgatggtgggagggaccaggtacaacaacttatccctcactttagaaggaatatctctgcacgcctcatgtcactgaactcctatacatttccctgaggtagaaggcccttgcattttggttggacttaattcccatcctttgatgcacatacgtgttaccaagttcagagtggttgcaacctccagcttacttggtccaatcagcataatgctatccaatatagtggatcagtgtgatattggtagaagaggcaggtggtcagacctcttcaaactaagttatgacacagggcgggagtgttaccatacttttaaggcaaaactacgaacacatatagctggtctggccagctgaaagcaaactgcttttggtggtccttgggctgagggaaaaaaaaaggcatttgctagatcaatagctacataccatgtgccaggagttgtgttaatctgctcaactaaggacaccacatctggtacagcagctgcaatcagagtcactatttgattagttctgtgatagccaactgtcattctccacgagccatctgtcttcttcacaggccatacaggagagttcaagggagatgcggtagaaaggaccacctctgtatctttcaagtccttgatggtgacattgatttctgtgatccctataggagagagctgagacctgctgaggtgcttgcagtgggtggagcaagtatggaatgggtggtagagaaaagtagtcatagctaccagccaaggtcacggtgatctgctacagaagtgagggctgtaattggcctaagcgcttctgtcttattttgttacaaacatgtttagacatagatccattttgttaagaacacgcttacacatatattaagccaaactccatgttttctttgcgtttacttatttattgtgtgatggaatattgatagagacggtatccacggttaaagtggtgtaaatctacattatcatatttaagtgataagacactaaaagatgaagcattcaagacactttgcctcctatgctgaggggtacacctgcagttagaggtggagcagctatatcatgctatacagaattgtgatcctgttatcactttcatttggaaagttagcaaggtcaaaggagatgcgattggatggcaagaggggtcaacttatcttagttgtcaactttactagatcttggatcaggccaataggcaagccattggacattcctgggaggaattttcttgattagttgaaatgagaagactcacttggaatacgggtggcactttctgaaaacttcactgagtgcggacaacacggttggcatttcgatgttgtggacagactgtgctgacatctggcctcttgggctttcttaacacagactggtgagccagtggctctccaggaattctacatgccttcagtgcctgattgacagctcgcccctccggtgtgaaggtagccatcattgcatggcccagatgatatcgtgtaagttaacctaataaactcctctttaacacacacacacacacacacacacacacacacacacacactcattctattagtttcattcctctaggaaaagacagatgagaggaagcctgtctttcctgcacagaacgtgaaagtcatctgcgtggctgctgcaatcattttgtggccatgaggcaataggcccaatattaaagccaaaaactctgacaggtactaatcaagaagcagccagccttgttatgacttcattaaacgtttgtacctccaggcttcttgttaggcaaggtaattaagtgcctggttttttttttttttttttgaatgtcagcacgttgggtgtcctgctcttagaaaagtagatctggtagagtcaaccagtttagggctcctcgaagtttatcctggatacaaatcaaccagaccagaactcttgctggagttcaggtgctgattcttagtggacctgaggcatagttgcaatgaggtttagaattcttgaagcctgcaggtgcttcattccctgtacagcgaatggtcactgatcatccaagcaggagcctgatgagtgtaaagaaaatataagaacaaacttctttttaaaaattaattgattcattaattaggttactcaagacagggtttctccctgtagtgttagctgtcctggaactctatctgtaaaccaggctggctttgaactcacagcgctccacctgcctctgcctctccagggctgagagccacccagttcaagatcaaatttcttttttagatttatttatttattttatgtatgggagtaccctgaagctgtcttcagacacaccagaagaaggcatcagatcccattacagatggttgtgagccaccatgtggttgctgggaattgaactcaggtcctctggaagagcagtcagtgctcttaaccgccgagccatctctccagccacagcagcaaagaatcctggaagatgtgacttagttgctggagtgctagcaggcacgacgctctgggttccatccccaggaccacacagtggtgtggtgatgcacacctgtaatcccagatagtaaacggaggcaggaggatcacaggttctgtgtcaatcacaggtacatagagagtacaaggccagcctagacgaaataagaccctgtctcaaaaaagagggggaggaagaaagatagggatgctgagttacagctagtctggcccctctggagcaaagagaatatagttcaaattcttcctgaaattccaaccctctgtgttgttctgttactggacagtttcttaattgttactggctgtcaactcgaacccaaaccctgtatcactttctttcttttttttttttttttaagcaacctcgagtgccatttaatatcactgctgcattgttaccacagaaagctgggtagatcacgttaggggtgaaaacttcccagagagtgtcaacttgttgactctattgctccctaatgagggagcagagatgtccattcaaggatgagcagatggggaaagaaggatgagaagctggaggtggggaagggctgattagaaggagctgaggtgtgaacgcaagccttctttcttcatgggagtcatgtgggcgtggatctgccttgtgggtgctttggcatatgaaggacacagccaccacagttagaagccagtcggacagagtgggggagggtttcatacagtggtcgctgcccagatgctcccgagaatctgatcttggttgctcccataattcagcctcttctgacctctgacctctgcctcctgccgcttcctgaattctaaagtcatcaggactggggtcctacgctttgcctgcttcttcatcttcaacgagaagtgtctagtaggacctttgcctgatgcatgaaagtattatcagtcacacaaaatccagaactcaagaaagacttccttgatatttaatagatttaatattctcttcttcgtcccagttttagactgtcttgagctatgcaaggttctctgggagttctccctgtatcactttcaacctgcgtcctcatggctatttcctgtgagttctgagtctatgactcctccttggtctgattggctttc

SEQ ID NO: 1547 - DNA, 2871 bp, Mus musculus
atgcaacacccgggcccgcgcctgtggctggtgctgcaggtgatgataggctcgtgcacggccatcagctccatggacttagagcgccctggagacggcaagtgccagccggtggagattcccatgtgcaaggacatcggctacaacaccacccgcatgcccaacctgatgggtcacgagaaccagcgcgaggcggccatccaactgcacgagttcgcgccgctcgtggagtacggctgccacagccaccttcgcttcttcctgtgttcgctgtacgcgcccatgtgcaccgagcaggtctccacacccatccctgcttgccgggtcatgtgcgagcaggcccggctcaagtgctcgccgatcatggagcagttcaaattcaggtggccggactccctggattgcagcaagctccccaacaagaacgaccccaactacctgtgcatggaggcacccaacaacggctcggatgagcccagccggggctctggcatgtttcctccgctcttcaggccccagaggccccacagcgcgcaggagcacccactaaaggacgggggtccggggcgcgcaggttgtgacaacccaggcaagttccaccatgtggagaagagcgaatcttgcgcaccgctttgcactccgggggtggatgtgtattggagccgcgacgacaagcgcttcgctgtggtctggctggccatctggtccgtgctgtgcttcttctccagcgccttcaccgtgctcaccttcctcatcgacccatcgcgcttcaggtaccccgaacgtcctatcatcttcctctccatgtgctactgcgtttattcggtgggctatatcatccgcctcttcgcgggcgcggagagcatcgcttgtgaccgggacagtgggcagctgtatgttatccaggaaggactggagagcacgggctgtaccttagtcttcttggtactttactacttcggcatggccagctctttatggtgggtggtcctcaccctcacttggttcctggctgctggaaagaagtggggccatgaggccattgaagccaacagcagctactttcacctggcagcttgggccatcccggctgtgaagactatcttgatcttggtgatgcgcagggtggcaggggatgagctcactggtgtgtgttatgtgggcagcatggatgtcaatgctctgaccggcttcgtgctggtcccgctggcttgctacctagtcatcggcacttccttcatcctgtccggctttgtggctttattccacatccggagggtgatgaaaacgggtggggagaacacggacaagctggagaagctcatggtacgcataggggtcttctccctcctctacactgtgccggccacctgtgtgattgcctgctatttttatgaacgcctcaacatggactactggaagatgctggccacccagcacaagtgtaagatgaacaatcagaccaagacacctgactgcctgatgaccacctccatccctgccgtggaggtcttcatggtcaaagtgtccatgctgctggtggtgggcatcaccagtggggtgtgggtctggacttccaagaccctgcagtcctggcaacacgtatgcagccgggggctaaagagaaaaagccggaggaaaccagccagtgtggtcaccagtgcagggatctacaaaaaagcccagcacccccaaaaacctcaccttgggaagtatgaactgcccgcccagccttcagcctgcgtgtgaaggcagagctggctgcaagaacaggacattcggagcccaaatgggcagcttttcttggttggctggttgttggtaaatcaaagtaaaaagaatatgtatatatatatacatgtatgtgtatgcatgtgcatatatatgcatatatttacacatacatgaagtctaccttgaggttcagaacagctgaatgtaaagggttctgttcagtttgttgcctccctgaagggtcgctcattaaggagggagcctcttgtgtaactaatttgtggtaaagtagttgattcaaccgccctccagaaaacttttgtttaggcctcaagcacacagctgtgtattcagaaggctttgctgcctgtgcataaacttgaggctggagagctcctttgtaagctaaagagctttcctggggggggggggcagccagtgagccacccaagggcctgctctccctccctcactcccccagctaggctgctgtatgggtgggagggaaggtgaggaggagaggggataaaagaggtgacaccccccccagcccaaggtctgcctgcagatcccttaaaagagagtcacttccccagccttcatagccatgtttctcccaacacagagcccacgctaccctctcaccccactgcagatctaacactggagaattcaaatggtgtgcaatacttttttttttttttttttacattttccccctctccctagcaaaacaaatgagagagagaaaaagtattttgttgtaaataaaaggcaagaaaagaaatcatctaacaaaagaatttagaggctcaagcctcagggttgggggttgggggggcgccttcagcctgatacattttgtggctttttaatggaaaccaagccagtgtgttctacacactgggactgatttgtggagaggaagggggagggggggaagccagtggagagcaccagagggcttattgactctctgaattgttaaacaaatgatttccatgagtggtcttgaagcacttgggaagacaaactttgtctccagccagggagggccatgcctgcctctgtatatctgtaatataggatatttttcatgctccactattttattaaaaataaaagacattctttagt

SEQ ID NO: 1548 - DNA, 1749 bp, Mus musculus
atgcaacacccgggcccgcgcctgtggctggtgctgcaggtgatgataggctcgtgcacggccatcagctccatggacttagagcgccctggagacggcaagtgccagccggtggagattcccatgtgcaaggacatcggctacaacaccacccgcatgcccaacctgatgggtcacgagaaccagcgcgaggcggccatccaactgcacgagttcgcgccgctcgtggagtacggctgccacagccaccttcgcttcttcctgtgttcgctgtacgcgcccatgtgcaccgagcaggtctccacacccatccctgcttgccgggtcatgtgcgagcaggcccggctcaagtgctcgccgatcatggagcagttcaaattcaggtggccggactccctggattgcagcaagctccccaacaagaacgaccccaactacctgtgcatggaggcacccaacaacggctcggatgagcccagccggggctctggcatgtttcctccgctcttcaggccccagaggccccacagcgcgcaggagcacccactaaaggacgggggtccggggcgcgcaggttgtgacaacccaggcaagttccaccatgtggagaagagcgaatcttgcgcaccgctttgcactccgggggtggatgtgtattggagccgcgacgacaagcgcttcgctgtggtctggctggccatctggtccgtgctgtgcttcttctccagcgccttcaccgtgctcaccttcctcatcgacccatcgcgcttcaggtaccccgaacgtcctatcatcttcctctccatgtgctactgcgtttattcggtgggctatatcatccgcctcttcgcgggcgcggagagcatcgcttgtgaccgggacagtgggcagctgtatgttatccaggaaggactggagagcacgggctgtaccttagtcttcttggtactttactacttcggcatggccagctctttatggtgggtggtcctcaccctcacttggttcctggctgctggaaagaagtggggccatgaggccattgaagccaacagcagctactttcacctggcagcttgggccatcccggctgtgaagactatcttgatcttggtgatgcgcagggtggcaggggatgagctcactggtgtgtgttatgtgggcagcatggatgtcaatgctctgaccggcttcgtgctggtcccgctggcttgctacctagtcatcggcacttccttcatcctgtccggctttgtggctttattccacatccggagggtgatgaaaacgggtggggagaacacggacaagctggagaagctcatggtacgcataggggtcttctccctcctctacactgtgccggccacctgtgtgattgcctgctatttttatgaacgcctcaacatggactactggaagatgctggccacccagcacaagtgtaagatgaacaatcagaccaagacacctgactgcctgatgaccacctccatccctgccgtggaggtcttcatggtcaaagtgtccatgctgctggtggtgggcatcaccagtggggtgtgggtctggacttccaagaccctgcagtcctggcaacacgtatgcagccgggggctaaagagaaaaagccggaggaaaccagccagtgtggtcaccagtgcagggatctacaaaaaagcccagcacccccaaaaacctcaccttgggaagtatgaactgcccgcccagccttcagcctgcgtgtga

SEQ ID NO: 1549 - DNA, 22804 bp, Homo sapiens
agtctcggcgtggccttctctcatatcttacatctccctccgtctttctcttacaacatcaccagtcattggatgtcaagcacagccggataattcagggtcacgtcctctcaagatccttaacatgattacttctgcagagacgtaatgtagagctttttccaaataagatcacagccacaggttcccaggatcaggacgtgaacaggtcttttgggcgaacaccatttaactcgctagaagcactcagcgagcagctctcagaaacagtggctctgaggacagcagctgttaggattgtcagttctctgcctgtctctaccctccctaattctagggagaaacttcatttactccacaaaccctaggactccctaaacctagctggggtctctcctgcatagaatttcagaatgcttaaaaataaagctgtacaaacgtgtagatatgaaaagtcgtggagtgggtgccagctttttgccattggtcgtggtggcgttttattgtttctctcttagggaaaactgtaggatggagtagaagaatgagttttctggcagggtgcagtggctcacgcctgtaatcccagcactttgggaggctgagggaggggcggatcacaaggtcaggagatcgagaccatcctagccaacatggtgaaatcctgtctctactgaaatacaaaaaaaaaaaaaaaaaaattagctgggcttgatggcacacatctgtagtccaggctactcgggaggcagggaaatcacttgaacctgggaggcagaggttgcagtgagctgagaccgcaccactgcactccagcctggtgacagggcaagactctgtctcaaaaaaaaaaaaaaaaaaaaaaaaaaagaagaagaagaagaatgagttttccatcaaaatggacagccttggtccatggtcaaaatggacagccggcccaggcttgcctggtggccctctaagcagaatccaatccctgctgaccgtggcctcttctgcctccggggtccaagccaccagcctatctcctctgaaccactgtggctgtctcctaactgtttctctgcttcactctttccctgccactatgtgtccttgatgcactagccagaagggtcctgggaagactgaagtcagagcatggctctcgtctctccagaaccctccgtggctccccatttcactcagagtcaaaatcaaaaggcccatagacgccatcatggcccgatttctttccctcccacttcctctccacacacctcttctgtcacctaccttctgacgctggcccctatgtcctgacttccagccattggccccattgttcttcctcaaaaaccccaggtatagtggcacttcagggccgtggcactggcagacaccccattatcccagcaggcacttctagaagtgccctcagctctctgcacccactcctggtgtctttgctcagtggtctccttctcatccaggccttccctgcccatcttgctaaaactgcagcccccctttcctagctctctggatggcatgagccgctcacctgccccgcacgccacgcaccgtggaacaggctgtagcacgcacatgtgcagaccccggcctatcgcctcctcctactggaaggtgaactccatgagggtgaagacatctgtccttctatcccctgctctgttttaaccatctggcaaagcaagcacactcagcgcagcacttattagaagggagggagcagaacaactattctgggactgacttcctgctggaggaggaacagaaaataaatacataagcagatgagtaagatcatcgacgggcagaaaaagtaccacaaacaaaataagagtaagactgctccgagacaaggggctggggagggggaacctgagtaggaggcagcctagtggacgcgtcacccaggagcagacatcgttcagccatgaggaggcgggggatgcagcctcctgatgtgtcagctctgaaagctaatgactgtgcctgcgtgtgtgcgcatgacatgcgtgagctgtaagggcagctccataattagattatatatgtgtgtgcgtgtatatatatgtctgtgtgtatatatatgtgtgtatgtatatgtctgtataataatatgcatacacacgtgtacatatatataacctatatatctctctatatagattatatatgtgtatagtatatacacacatatatattatatatgtgaatgtgtgtgtatatatgtatatatgtgtattatatatacacacacacatatatatgtatacatatataatctatatctcagagagagagactgacctgccagcagatgggcagacatttgtcagacatggagagagtgtctttattcctaaagttggtttctcagctgcaagggcaatggccaagcccttcccaatcttaccttacgaaacaagggtgacaggcattcagggatagcaaaacgatctttcctatcctattttgggccttagagaaaagcgtaattgtgcatttaaactgttgtttgggatgagggcagcagagcacacagctgttggaaccagtttctcttcatgctatcacatgaggctggagcctgaactatctctgggaggctgcagaaagtgggaagggagtttcagatccatgctggaagaacagggaaaggctcccgcagggctccgggtggtgtctgccgctgattcagcaaaggacttgtcctggacacggggcatgtgggagctgagcacgggatttcaggtcctgcttcacctccttctcatagggaagaagctgtccactgctcactcctggttaaattcaaggaagaagggatacacaagtgtggcagccctatagaaaagagaaagactcgtaagtgatgctattagtaagccatcttggcttccggccagtgaagacaaatgaatttaacaaagaaaagtcaactaaccagaaagtttacagaccagtgaatcccacagggctagcattatgtgccaactcggttctcagagcttactgagttatctcacttcattcctaccccgaacctgatcaagtaagtgtcattgttcccattttacagcagaggaaacagaaagaatctcagagaggttaagtaacttgcctggggtcacacagctgaggacatgggtaaaccaacacacattaatacctcccacattgcttcttccgccatttcctccctgtttgtggctccaaagaatcccttcagacaccatcacggggaatatcaacatgacaggaaagtggcagcctcgccccaggccaggagcccctgaacaaagccataaaccaagacttgatctttgcctggctccagacaggacagcagaacggggtcccattctgaaagtcaggctccatcacaagtacccactgtgcttgcatctccgtggagaggcaggaggccaggcgtaggcagctgagcccctgggggagtggaatggtgtcggctctacccccagtagccccgtggcctgggtctagtgactcggactccccagccccagttgctcctctctgaaatggaaatcttctctggaccagcttcctggggtacctatgaggaggcagtgagctgcttcctatcaaggcttaaggcagcacctgtcaaatgcttagtcagcctcggctcttgttagccttttgattatttgcttgccttgattatcagcttgtattactgtgtgcctgacactgacatgtccccaaactcctccccacaaatgtcacattccagtgcctctccttattgtgctctctccctccatttatattgcatttcaacaataataaccgctactcatcactgagcacttatttggtgcttggtattgccatcaacgcttccaagtgtgttatgacatcatcctcatcgtgccttgggaagcgggaactctgctggtcccattttgcagatgagaaaaccgaggcagagcaattagaagtggcatatctgaggtcatggggctagaaagtggaagagggggattcagacccaggcatccgggtcgtttcctccccagatcatcactgtggtgcggggctgctcaggcgtttggtgagtggctgcagattcagagctcacctaaggtgaaaagcaggaacggggttccttctcatttctttgtaaggcagagccaagctcgtgggtgtccccactctgtccctgaagggatagtttctctgtgtcatctttgcctcctctgtcacccatgcaggggccgcaggcctgtgatgagctgacccactcagctcccagaacaggcaaaagggtcccagggtgcaggagggaagccgaaagaaaacagatgggaaggggagtaattaaatcagcacatcccaaacagctaagggaggggacaaggagcaaagcaatgaagaccaggtatgaagtctgaactcacagaatgggcacgcgcttccgataagctgtccgctcaagctgtttggaatacaaacaccaaccaaaacaacacacgcacacactcttttgtgtcgtgtttctggaattctgtgatgtttcttttctcatatattcctccaaaaacagtccagtacagaattgcaggttgaagcactgtgaataggctctaggtttgccccaggttaagggttaatttgttgagtttcagaacaggtaggcgacgccctcctggattttaaacagataacgtccttgccatgtaagagcacttagaaggctggctttatctctttaaaaaaaaaatatatatatatatatacacacacacacacacacatatatacacacacacatatatatacacacacatatatacacacacacatacacacacacatatatacacacacatatacacacacatatatacacacacatatatacacacatatatacacacatatatacacacacatatatatacacacacatatacacacacatacacacacatatatacacacacatatatacacacacatatatacacacacatatatatacacacacacacacatatatacacacactatatatatatatatgattgtgtttgttgttgttgcagttgcagagatgaaaaagaaatctgtgtctttaaatgaggaggggctgcgtaaggaggcttgggcagcaaaaaggctaatacgctgtggaagagaaggagtttaatctaatttagttggagggtgtctgtctgcggtgttgttttttggagtgtgggaatagaggcgggaagctgcccccttgaatggtccctcctgagccaggagcagtggggagccagtcgacgccagcgatccaaagcccggccttgaaagaggattaaatcaatgctctgatttgcaattcacactagtgcaccccgtggaacctttggtaatatttcaaaccacatttcaagggaagtggccttaaaatagctgcctaaattgtgctggagccacactggacaccccactcatccactttaggatgggggtgcttcggggttcatttctcaccttcccccaaacctccacatctcacagccagtgtttttaggcagaattaaaacttttgcgcctgttgaattcgctgcgacttgcatggcctttctggtggtacaaactgtgttttctttgctaagtatcacttcagatcactaaaggtattttccctggagaaaaagatgggggcacgccacggggagcatgcctacttgatcagaaaacataattttttgtgcatgttttatatctgataagtttctgcagaaacttgatactagatgaggtcagagaaaacaaggtctattcacatcagacttccctgcatgtgaagcaattattggtaaatagatcagttttcattctcatacttgaaggtagaattggaaatgtcccggactaaatacaaacattgacgacacgagaagacaagagaagaaacacaagaatcacttacgtggatcctcacacttgaatgtaccaagagaggtgattcaagcagcagctaccgaaaggcgttgcgacagcctgaaccactttttatctcaacattcaccagcacgattttacttctgtttatgagctttcttcctatgccaccagtttactcttgcaattagcttgtaacatgctaagcttatggtttaatttctttctgttgctgaaagactcagtacttttttatcttaaagagattatttgggttttctctaatcccatttcagaaaacctcgcacagtgcttataatttccattgactattacataataagaaaagatacaactttgatttttagcaatatccgtgtcaaagtacttttatacttttgactttgtgagtttaaatggaatgaaactgggcctctctttcaattcccctccacctccaaaaaatatttagttcttgttcaaaacactgcctgactcctgaaatattctctctcaaaaacctcatactttccctggtgaacgtttgcaagaacctgaaggcggataatgtttactgatagctttccgatagacagacatttttaggtggttgggggtaaaaacatattccttgtctctgcacgttatgtgaaatcatgtttaattataaagtttcattaaaaatctttgctcaaaattttagaagcctaataagatttccattaatttaaacatatcactattcccacgacggctccaaagctttcttttccgtctttcatccatggttaaatatgtaaataaaatgtctaaagtcattcttcaaagaagacaaaagaaaaaagagctgagggaaagacagccataaaattcctcccaattctccataacatttgccagaggggggtcggttgccagccagggctgagcagcgggggaccccggctgctccttagactcacacatctcaaatcccacacacaggaaaaaaaataaaataaaatatcttttcagctggggccatcaaaagagccttttcatttattagttacagacttatcttccagttgctgatttctcagaaccctcatttctctataataaagtctatttgttggtttccatctcagctggacagggcgaagcacttctgcagacatttttataaaaaacgagagaaaaaggcaatctgaagtggttatagctaaaataatgggcctgaacgtggctgaattaaaacagcacagaaaagatcaattaggaggcactttctcaaatagctcacacccagctcccggcgtttggctctcactcttgcactaaatatttctaatagttgctgagggagagacacaaaaaggaaaagaaggaaaatagggcccaggaaggacctttgccaggaaaattctagaaaagccaagtgatttccgctgaattaattttaatttaaaggtcctgaaaaattactcactagacaaaaaacaacaacaacaaaaaaaaaaacactataataaaaatggcagtctttcaaaaataaaatcatgcaacttttcacttgggaaataacacagttgaaggtggtgttctaactgcccggagtttctaccttctttttcactttctccctcaccccgacttcctccagcacctcctagtgagacccaggacacccagggacagcgacccaggggtgggtgcctgaacctgcctattaattctgggattctgggcgctcaaatgtctgttgaacggatgaatgaatgagtggaaaggtgagatttccccaagtttcttaccgatgtaaaaattgtagggcttgttttaattaaaagccaatactctccgaggaagtggccccctcctgcacggcgtgcagaaagctggtcagtgaggggggttcctggcgggccccatctccttcccgggcgcttcctagggagaccttgccccgtgcgcagcgtccccaccgcgggggcccgtgcagccgccccccacgccgggtggagcgccgccaacgcgggaagccccagcactgcctccaaagatgtccgcacactccaccctgctccctggaactatcctcaaacgggcagggggcaagcgaggccggtggacgcgggactcgctcctctgacctctccccggccccccgggaggtagcgggagattgcacacgcgatcctgcgagtttccgaactttggaagatcgtgacccggagagaccctgggaggagagggccggccacctcctaggggtgctgtttttttaagggtcaacccaggacgctacgggaagcacctggcgcatccttgggaacagtggggcttggcggtgggcgcccaccgcgaacgccctgggcgggggaagggaatggcggggggacgtcgtgtcctaagtgaccccgtcacagacccgccccaatccgaggggggatgagctcagaggacctgcccaggacgctccttctccactttccaggaaaaccgagcggcgtgcgcgcctccgtgtcctcgcgggagctgggggtccccgggcaggcgctgacgcgctcctcccacgacccactccatcccaccctactccgggtcctcctgcggggctgcagccaaggagggcgctggccgggcacatcactcgccaaatcacataaataccccacgagcgaatgacttcctataataaataaactcagccgccaagaaggcatctccagccctgctggcgcgaggccccggctctgcggcttcggagggggcgggggtcaccgcggtacaaaccaagcccgcacttcccgcggggtgggaggcggtgttcaaagtcccgggacgcttcccgcccctcccccttcccgccttcttagaggagacctcggatgagcggccctaaaatccggattctcgagcccctccccctccccttagctcgtctctttgaaatttcaaagaaaatccctcctcggagcccggagcccggggctggtagcacctccccagcctcaggaagatgcgggcaggtttacaagcaagggcctactttatggcccaggctataaaacgcaaatcccacctccctttgaaagcgccctccgcccgggactcaccataaaaggaagagaagatgcaccccgcgcccctcgccgcggaccacccccaaaccccttctcccgccagtccccgaacttcccgtaacctcggcgtcctcggggtgccggggaccatcccggggaccgccgggaaagggggcgccggcggagaggatagcgagaggcaaagttggaggccaggcagagagagggcgaggagaggcgggcgggactgccggggagggtcgcagcgcgcagagccccgcgcgccaggcgggctgtcccggggctggcgggcagacgcgggcgggactaggcgctgcgccccccgcaggctgggctgcaggccgggggggatcggcccccgcggggcccgggagcccgcggcggggcggcggggaggaggctgccccgggccgctgcgctttctcatgcaaagcagcggcggtgcggggcgcgcggcccgggggcggggcctgtcagcgctcggcttttctgcccccctttgcctttttgcgagtcttctcatcccgggacgcaaacctcgaaacagctgccggctggtcccggccgaggccggcgcagggagggaggagccgcccgggctgtgggggcgccgcgagctgggccggcctcggtgtgcccgcgccgccagcccgctccagacgcgccacctgggcgctccaagaagaggccgaagtttgccgcggccgtgagttggagctcgcgccgggccgctgcgccgggagctccgggggcttccctcgcttcccggtattgtttgcaaactttgctgctctccgccgcggcccccaactcggcggacgccgggcgcggagagccgagccgggggcgctgtgcgcagcgctcgggccaggccgggcgggcatgggcgggggcccgagcaggggtggagagccggggccagcagcagcccgtgcccgggagcggcggcgctgaggggcgcggagctccccgcgaggacacgtccaacgccagcatgcagcgcccgggcccccgcctgtggctggtcctgcaggtgatgggctcgtgcgccgccatcagctccatggacatggagcgcccgggcgacggcaaatgccagcccatcgagatcccgatgtgcaaggacatcggctacaacatgactcgtatgcccaacctgatgggccacgagaaccagcgcgaggcagccatccagttgcacgagttcgcgccgctggtggagtacggctgccacggccacctccgcttcttcctgtgctcgctgtacgcgccgatgtgcaccgagcaggtctctacccccatccccgcctgccgggtcatgtgcgagcaggcccggctcaagtgctccccgattatggagcagttcaacttcaagtggcccgactccctggactgccggaaactccccaacaagaacgaccccaactacctgtgcatggaggcgcccaacaacggctcggacgagcccacccggggctcgggcctgttcccgccgctgttccggccgcagcggccccacagcgcgcaggagcacccgctgaaggacgggggccccgggcgcggcggctgcgacaacccgggcaagttccaccacgtggagaagagcgcgtcgtgcgcgccgctctgcacgcccggcgtggacgtgtactggagccgcgaggacaagcgcttcgcagtggtctggctggccatctgggcggtgctgtgcttcttctccagcgccttcaccgtgctcaccttcctcatcgacccggcccgcttccgctaccccgagcgccccatcatcttcctctccatgtgctactgcgtctactccgtgggctacctcatccgcctcttcgccggcgccgagagcatcgcctgcgaccgggacagcggccagctctatgtcatccaggagggactggagagcaccggctgcacgctggtcttcctggtcctctactacttcggcatggccagctcgctgtggtgggtggtcctcacgctcacctggttcctggccgccggcaagaagtggggccacgaggccatcgaagccaacagcagctacttccacctggcagcctgggccatcccggcggtgaagaccatcctgatcctggtcatgcgcagggtggcgggggacgagctcaccggggtctgctacgtgggcagcatggacgtcaacgcgctcaccggcttcgtgctcattcccctggcctgctacctggtcatcggcacgtccttcatcctctcgggcttcgtggccctgttccacatccggagggtgatgaagacgggcggcgagaacacggacaagctggagaagctcatggtgcgtatcgggctcttctctgtgctgtacaccgtgccggccacctgtgtgatcgcctgctacttttacgaacgcctcaacatggattactggaagatcctggcggcgcagcacaagtgcaaaatgaacaaccagactaaaacgctggactgcctgatggccgcctccatccccgccgtggagatcttcatggtgaagatctttatgctgctggtggtggggatcaccagcgggatgtggatttggacctccaagactctgcagtcctggcagcaggtgtgcagccgtaggttaaagaagaagagccggagaaaaccggccagcgtgatcaccagcggtgggatttacaaaaaagcccagcatccccagaaaactcaccacgggaaatatgagatccctgcccagtcgcccacctgcgtgtgaacagggctggagggaagggcacaggggcgcccggagctaagatgtggtgcttttcttggttgtgtttttctttcttcttcttctttttttttttttataaaagcaaaagagaaatacataaaaaagtgtttaccctgaaattcaggatgctgtgatacactgaaaggaaaaatgtacttaaagggttttgttttgttttggttttccagcgaagggaagctcctccagtgaagtagcctcttgtgtaactaatttgtggtaaagtagttgattcagccctcagaagaaaacttttgtttagagccctccgtaaatatacatctgtgtatttgagttggctttgctacccatttacaaataagaggacagataactgctttgcaaattcaagagcctcccctgggttaacaaatgagccatccccagggcccacccccaggaaggccacagtgctgggcggcatccctgcagaggaaagacaggacccggggcccgcctcacaccccagtggatttggagttgcttaaaatagactccggccttcaccaatagtctctctgcaagacagaaacctccatcaaacctcacatttgtgaactcaaacgatgtgcaatacatttttttctctttccttgaaaataaaaagagaaacaagtattttgctatatataaagacaacaaaagaaatctcctaacaaaagaactaagaggcccagccctcagaaacccttcagtgctacattttgtggctttttaatggaaaccaagccaatgttatagacgtttggactgatttgtggaaaggaggggggaagagggagaaggatcattcaaaagttacccaaagggcttattgactctttctattgttaaacaaatgatttccacaaacagatcaggaagcactaggttggcagagacactttgtctagtgtattctcttcacagtgccaggaaagagtggtttctgcgtgtgtatatttgtaatatatgatatttttcatgctccactattttattaaaaataaaatatgttctttagtttgctgctagtccctggttcatggtgaggtttcccttctctgtgtgtggagagactacaggacactttctccctttgctttttaagcaaattctggggttgtgcttctagccagagagtactggttatctgtataaaattgcagatcagaggattccaagattggaagaatcattcacttgtgagtttctgaggaactgcagtcaggcaatgtgtgaagttggaagtcgtttctgtgactgttggtagctggacatgagggcttagttgtagacacacatcaccaaggagagcctcaccactaagcgtggacccactcatgagcctggattagccagttttaatatattcagagagtagagccaaccgattaggagaattaaatcatctgtattcaattgacctgctaggctcaaatggtacctagacagagctgtatacatcagcccaaagtgtgctggctttgcagtgactctgaactatgaagacatttacaaaacagattatagacctggacgggataaaatacctgctaagggtggcgaatccttaagaggaagttaagcagctttggaacttcatggtacttggttcttctccagggtttcctgttagaactgggtagctgtaaagaactgccccaggtctgctggtcaaaggcacagctacactcaagttccagccagaaggaagcaagggcacagtgcagtcctactgtggtgaggactctattaatataaagcaagccaagctgcccctggggccatgcttttgtccagctccaagttaaacaaggagctctggaaaacttggagcatggatgacacgcttaccaacgaggaggagagcctggagctagtgcagtctgttttctgaagagggtgttcagaacttcagcctggtaaacataagatcacccatcaacactagggctggaaacaggcttacattggctttgaggggctactgcacttggccgtgaatatttgcagggcacaggagcaggcagatcggtggtttgggatcaagtttgacaaacggaggaaacaccagctaggtaggcaaagtaaaagaatgcaagatcccaaagagctttcagtgcattaaaaaagaaggcagaaaagcttcagaaatgcccccaaataaaatttctttgttgattgttttcgcctagtcccccaaaagactacatagaaatattgatgtctctgtgcatgtatgggtatagcgtttcctttttgtcactcttagggaaaatgaaaataacatatttggaatagaactttcaaaaagtccagaagggtaacattgtccggatgctgctgtgagccacaaggctagatataacacaaagacatttggttctaaaattcctggactacagcagcttcagacctgcccatgctcaggtgtgtaggctcgaaaatgtggtcccaaggaaagtcatattcaacaacatacctaagagcctttgttgttagttatccctgaatgtgtctcactgtggatccatcccagaaatgactgatcttgtttacgaatgtgaagggattgtgacatgtggctgggttgggcgcagctgggtgagtttaacagtgagcagtgcaaggagcagctgtagagcttccaagcaaaatgctccaaggtcttcctctccctctctctctctcttcctctctctctctctctctctctctctactaagctgaaatctgaccctccctcacatacagacagtgagttttaggagaagcatcaaggccttaagtcagaaagctggggaaaaaaagaaaggaaagaagggagggagagagggagggagggaggaaagaagcaaggagaaagaaagacaggcaaacatcactagtgaaggaaggaaggaaagaaggaaagaaagaaagacaggcaaacacatcactagtgaaggaaggaaagaaggaaggaagggaggaaagaaagaaggaaggaaggaaggaaagaaagaaggagaaagaaagaaagacagccaaacacatcactagtgaaggaaggaaggaaggagaaaggcaaacacatcactagtgaaggaaggaacgaaggaaggaaggaaagaaagaaaaagaaagaaaaaaagaaagaaagaaaggcaaacacatatcactagtccttagattctctttagctcagtacagggtttccaaaggaattgttgacagcattaatttggagatttctcagcatctgtaccccacggccttagttttagaaaaatggcaacctgttttgcatggcagtggtggagtcatagaagaagcccaaagaagtagattgtccaagatctacatccattcatccctcccttccttcctccagcctccagccaatcaccacccaccacatgctaaggccgagaaacagaactggtacctggtctgtgtgtggttttgcagtggacaggagagacctgcatggcacatcttatatgcgcctctgtgaggcatcagggcaggaggcccaaaagtagatgtatttccacagggcccctaaatgcatacaaggcagaagattcagcctatgtgaggtcatagcaaggggaagctgcagggtcatatagaaggcaagagaagttatcaacagagcatcaaaacattccatcgggacccagactgggtctggctcatgatcccctatgtaagcccacaccttgcagagggctttggacgtagtaagaataactacaataatagcaatggctgtgataatagtaatcgtagcagcacagccttgagaccacttgctgtgtgctgaacaggctgctgggactatctcagtgaatcctcaacgcattcagggaggtactgtcatcagccccactttacatgtgaagaccctgacacagagaggttaagtaaattcccagggtcacatgacaactaaaagacccagaacaggaactgggtggtctgataacagatctggaacccccaattcagtaagcaattgttgaataaatgaatgaatgaacaatagctgaccactttacatgcattaattcaatcctctgacaaactttggtggtactgctctcatgctcataatattacagacgaggaatttggagcacagagaagttgtgtcacttacccaaggtcacacaggcagcaagcagagagtctggcatgcaaacctgggctgtgggactccagacctgcacctctgaccacgaggctttcccacgtctctggtttctcaggacttgactaaatcatttcatcttcacagcagcactgctgcacctttattccaagcaaaaggggaacaaggttgcatggcaaagagcaaaagccacttggccagtgtgggggagcccaagggaggaggccgtggcaacctgcatttttgcagcagtcgcgagggtgctagcagtggggctagggggaagcaggtggatggagaggtccttagaaggtagaaccaggattaggttttatgtagagagggagcaagaaggaatggtcagggaggaccacaccatttctgactttggtggcaaagtgacattcatcaagacaggagaaaaccaacagaggacaggcagtgtgatgggaagcaaagatgagtgcagtgtggattatttgccatcgaggtgtctgtagagaatttgggatgaggtcatggtcacaggcgggtgtttgaaatggtgagagttggagctgtggttaacctcaggaagcaagtgggtctctccagggacagaggagggaggagggcagacctcagggccaggtgaacaaagaggaggttgcaaggggagctgtgactgggagcagccccttaaccacttgggcgctgggtgcccatttttactataagaggattggcagaggagattatgcaaatggccttatccaacgtcaaaatacgtgatccggatagcgctaagggggaatgcagcaagggtcttacaggagtgacttaggaggatccactcctgcccgtgataactcagcctctgtatctttaacttaacccttgggctacccgagcaaaattaaaatcagctccaagagctcatagttttaaattctccactagcatctttggggatgctgtttcaagacagagaaacagaagagaaaaatcaagaagtattcctgaggccatagatattatcctacattctagattattttctcagaaggaggagaaagaaatacagaaaacgataacagattggagtgcaaactggcatcttacacttaaaggatgtgcagatataaacatcgtttaggactgaactatatcttgccttctctatgagctggtttttagtttgactcaaccacttacacattgcttcaccttgagcaagataccagaactttcctgcctctgtttcttcatctgtaaaatgggcatgataatggtacctatctcactggactgtcactcacaaatagctcatgcttattgaacaagtattacatgctcgattgctttaagttctctgtgtttattaattcatctactcctcacaacagccctaggagagatggtacgagattaaataaaaccatttgtgtgaagtacttggaaggctgcttggcgcagagcaaatgctcaataaagtgatctatttttatgttttttgtccctccccccaaagaaagttaaatcctgtaagctaatgagtagggctctttaaagaaaatgagtttttttcttacagaaacactttttccaatactgtgttcaggttccacagaaaacccactgatctttcaagtttaaaaggcaggcacagagcctctacagcagtgaaaaatattctctgtctttccctttgaacacaataacatcacagctgacttcccaggaaatcagacctcatgcacggacacctctatacgcaaatggataaagatggctgtaatatggaaatgcagagaaacggtcagacttcagggaagctcgcgaaacacgtgcaggcagcatagtgtggggtgttttttaatgttttattaagagtgtgaaggccaagctggagggaggagggaaggagacgtttgaaatctgaaagaataagtttcagctgccgaggtgagctgtcgtaattggggacactcctaggaaaatgacactgttggatcccacacaatgtccgcagcccatccggacttccccaaagtcagtgcctgtcgctttgttattctaagactttctgaatgtttctgtttttatatacattgtttggtaccaggctgccctccaggggcctttggtttataggaagggattcataacagcaacccttgccacacgcccatctccttcccagatgctgggggcttcaggggttctgtagatgggatgggatgttcccaggtggtctcttgcaacagatgtcctcaaaggatgcaatttgtggcattttagggaatacttgcacttaaaaaaacatctaaaacctatcctaacaatgttttaagtattttaggcagaactacaaagtgatcgaccttgacatgatgaatcaacacccattttccaagggggcgatggtgatcgggagctgcaggtgctgactttgatcagaactgacaagctcatggggtggtgcagctctctccccaccccagccctccccattccacccctgcccccagggcagcagcacctgtttacctcccatgctctccctgcactattttcgcctctcataaaacacttggatgttgttggctctgaataagatcattcatctgcgaactgcctctcttcctgcagctcatctgaaacagtcttattgaacttgggtcaatatcacctcggtttctttggattccaggatcacagcagaaggctcaaatttgaactaaactcagaagcattttaggtcagcaaaactttttttttccccaagagactttaagtattaggaatctaagtgccaccttacttttccacacatggcacagggtaaagagaacatgagatagccatgaagaagttgtgattctgatttgctatcatgatgacccaggtctaagaagacagaacaaaagcaatgagaacaagagaacacggccaattataacatttgacattcttccatggcagtcatgattgtaaccattttcaattaaaagaaaaaacacaatactacagcaatgttctgagctgaatcttatctcttgagtaaacagagggcctctgagcaaaaaaccatgcaatagaaaggaggcatcaaaagaagttggaaatgtagtatttttatttttaactcacctctaccttctaaaagctttattctttccaagacaaaaagcttcacgcatgtcccaggggatgagccaagaaaaaaaaaaatcaggtaaaataatccctctgggtcaggggcgtgcatgtcactcggtctggtcagtgagatgtgaggggagctttcctagtgagacaaaaaaaaaatgagggtgtgcgtgtgggagtgaaggaaggttctaataaaagattttgcttcatgataaaaaaaaaaaatgatgaggaaacctgtccttttcttctgcacacaatgtggtgtgtgagaatcacatatggagctattgcaaccattttgtgaccacgaggcaataagcccaacaccaaagccaaaattctgagatggcaggtaagcaagacagagccagcctcgtgagcactcattaagcgactgcacccccaggattcttgttatgccaagtagccaacactgcctggatcccctgagagttgcaggttgggtgttctgtgcctcttaggaaaatacacctgatgtggcaaatgagtcccaggtgtctcaaaccctactgtgcacacaaatcactggggctcttgctaaaaggcagctcctgattccttaggtctgggtgggaccccaaattctgcatttgtaataagttcccagttgatgtcgatgcttctggtgctcctgacccctttgagtgaagaatctatttggccacccaccagaagttcagaacgaccccacttactcctggctgtaattatatgaacacatcttgggcatcacttcctgggtgtcctgtagtggactagctgtcaattaaaacaatttcttatgttgagttaaaatttgcttccttgtaactattttctattattatctctacttttgccacatagagcttcacagagcaagtctacttgtttttccatgggaaagccacttatatatgggagcttatcacaaatgcagaatttggggtaccacccaaacctactgactcaggagctgccttttagcaagagccccagtgatttgtgtgcagagtagggttcaagatgcccaggactaatttgctatatcaggtatattttcctaagaggcacagaacacccaacctgccaactctcaggggatccagagagtaatatgtgctccctggatctttctttttattcttaaaactgttgcccagataacttggtttcatcttgctggctgtcccctgaatgtgtttaccatggtctcaattcttgtcaaggaagaatgtgcccaagtaaagacaaatctccaggaagcatctaacaaggagtgggatcattagacacccagcaaatgttatacaagataatgggacactaaaagcatttttactaaaaccagagacaaaacaaggctatctatgattactggtcactacccggaacatgattaaccctgaagtcagagaagaggaaagaaaaaggaaggtaaaaccattggaaactgtcattatttgcagctgttgtcattgaaaagtgacttagctggaaatagaattgatgagattttcataaggagaccaggacaaaacatagctacaaaaatcaatagcatcctcatgcaccagcaggaaccagttgaaaatatgaagaaaatttaagatcacttatgcaatgcctacaacaagcacaaactatctagaaattaacatagggggtgtgcaagccttttggaagacaatgtgaagatgttactgaagagcataaataattggctcaaataattggaagctcatgtcatgtgcctgtaaatatgtcaattatccccaagttaattcctaaacataatgcaattgcaactttaaaatatgtatttctgtggaactccacaagatgatattaaatccataaaatttgagcagtagtcaaggaaaaaaccctggaacagggataagaaaggacataatctatcagtgaagtacactgtgagtctgcagaaacagacagcatgggccaagtgttaaaacagacaaaataatggaacaaaataggaaatccagaaagagtctcaagtgcatttcaaataaataagaaagaatggattacgcagtcaatactgttgaggcttagtttagatgtggggaaagtaatattccatccccacctcatgcctttcaccaaaatacatgttggattgataaaacatttaaacataaaaataatacagtaattaggggaaaatgttatctaaagttttcattcaatagaaagaaattacaggtaaacattttttataaacttatcaggaaaatgtcttcttagcatgacatcaaagctaaagccattttttaaaaatcataatttcactacataaaaatgtaaaattctgtaatgtaagaaatcagttaatttaaaaaaaattgcaaaatctccataaacaaaattaaaagacaaaaacttaagtttcttgtctgggtctatgagtaggcaattcaaattagaagaaatgctagtgacccataaacctgtggaaagttatttaagctcacttctaataatccaagggtgcatgcataaaaaaatgattatttgtgcctaacaggtttccccgttttttttttctttgagacagagtctctctctgttgcccaggctggagtgcagtggcatgatctcggctcactgcaacctctgcctccccagtttaagcaattcccccgcctcagcctcccaagtagctgggattacaggcgtccaccatcatgcccgtctaatttgtttgtattttcagtagagacagggtttcaccatgttggccaggctgcttttgaactcctgagctcaagtgatccgcccgcttcggcctcccaaagtgcgaggattacaggtgtgagccaccgcgcctggccagcttggtactttttttttttttttaaagcggataatacctggattttgctcaggcatggagaaatggactccctgtatcacagagtggaaccataaagtagctcaccctttctggagaacaagtgtgatgtgtacctagtgccgtttgcagtatacatgtcctttgacccagcaattccacttccaaataaatgttgtattgaaaattgggaacagtctaaatatataccggtaagctgactattcaagccaattatggaaaatccttaaaatagagtaacatgtagtcattaaagtaattacgtagaaccgtgtcattaacatgggaaaatggccacacggcactgctaagcaggctgatcttcagacaggacggaccagggcagcccttccagtttgttttgtctggtgtgtttttgaatttgtccacacccctatgccaaatcagttgttgaacatttcaaatattgccctgttgttactacacaaagcaagttatataattcctgaataagacaagcctgggcaacacagggagaccctgtctcaaaaaataaaaagaaagaaaaggaagagaggagggaaaggaaggggaggggtggggaggggagggaagggaaggggatggggaagcaaaggaaggccgggtgcagtggctttcgcctgtaatcccagcactctgggaggctgagtgggcagataacttggggtcaggagtttgagaccagcctgaccaacatggtgaaaccccgtatccactaaaaatacaaaaattagctgggcatggtggtgggcacctgtaatcccagttattcaggaggctgaggcaagagaattgcttgaacccag

SEQ ID NO: 1550 - DNA, 2811 bp, Homo sapiens
acacgtccaacgccagcatgcagcgcccgggcccccgcctgtggctggtcctgcaggtgatgggctcgtgcgccgccatcagctccatggacatggagcgcccgggcgacggcaaatgccagcccatcgagatcccgatgtgcaaggacatcggctacaacatgactcgtatgcccaacctgatgggccacgagaaccagcgcgaggcagccatccagttgcacgagttcgcgccgctggtggagtacggctgccacggccacctccgcttcttcctgtgctcgctgtacgcgccgatgtgcaccgagcaggtctctacccccatccccgcctgccgggtcatgtgcgagcaggcccggctcaagtgctccccgattatggagcagttcaacttcaagtggcccgactccctggactgccggaaactccccaacaagaacgaccccaactacctgtgcatggaggcgcccaacaacggctcggacgagcccacccggggctcgggcctgttcccgccgctgttccggccgcagcggccccacagcgcgcaggagcacccgctgaaggacgggggccccgggcgcggcggctgcgacaacccgggcaagttccaccacgtggagaagagcgcgtcgtgcgcgccgctctgcacgcccggcgtggacgtgtactggagccgcgaggacaagcgcttcgcagtggtctggctggccatctgggcggtgctgtgcttcttctccagcgccttcaccgtgctcaccttcctcatcgacccggcccgcttccgctaccccgagcgccccatcatcttcctctccatgtgctactgcgtctactccgtgggctacctcatccgcctcttcgccggcgccgagagcatcgcctgcgaccgggacagcggccagctctatgtcatccaggagggactggagagcaccggctgcacgctggtcttcctggtcctctactacttcggcatggccagctcgctgtggtgggtggtcctcacgctcacctggttcctggccgccggcaagaagtggggccacgaggccatcgaagccaacagcagctacttccacctggcagcctgggccatcccggcggtgaagaccatcctgatcctggtcatgcgcagggtggcgggggacgagctcaccggggtctgctacgtgggcagcatggacgtcaacgcgctcaccggcttcgtgctcattcccctggcctgctacctggtcatcggcacgtccttcatcctctcgggcttcgtggccctgttccacatccggagggtgatgaagacgggcggcgagaacacggacaagctggagaagctcatggtgcgtatcgggctcttctctgtgctgtacaccgtgccggccacctgtgtgatcgcctgctacttttacgaacgcctcaacatggattactggaagatcctggcggcgcagcacaagtgcaaaatgaacaaccagactaaaacgctggactgcctgatggccgcctccatccccgccgtggagatcttcatggtgaagatctttatgctgctggtggtggggatcaccagcgggatgtggatttggacctccaagactctgcagtcctggcagcaggtgtgcagccgtaggttaaagaagaagagccggagaaaaccggccagcgtgatcaccagcggtgggatttacaaaaaagcccagcatccccagaaaactcaccacgggaaatatgagatccctgcccagtcgcccacctgcgtgtgaacagggctggagggaagggcacaggggcgcccggagctaagatgtggtgcttttcttggttgtgtttttctttcttcttcttcttttttttttttttataaaagcaaaagagaaatacataaaaaagtgtttaccctgaaattcaggatgctgtgatacactgaaaggaaaaatgtacttaaagggttttgttttgttttggttttccagcgaagggaagctcctccagtgaagtagcctcttgtgtaactaatttgtggtaaagtagttgattcagccctcagaagaaaacttttgtttagagccctccgtaaatatacatctgtgtatttgagttggctttgctacccatttacaaataagaggacagataactgctttgcaaattcaagagcctcccctgggttaacaaatgagccatccccagggcccacccccaggaaggccacagtgctgggcggcatccctgcagaggaaagacaggacccggggcccgcctcacaccccagtggatttggagttgcttaaaatagactctggccttcaccaatagtctctctgcaagacagaaacctccatcaaacctcacatttgtgaactcaaacgatgtgcaatacatttttttctctttccttgaaaataaaaagagaaacaagtattttgctatatataaagacaacaaaagaaatctcctaacaaaagaactaagaggcccagccctcagaaacccttcagtgctacattttgtggctttttaatggaaaccaagccaatgttatagacgtttggactgatttgtggaaaggaggggggaagagggagaaggatcattcaaaagttacccaaagggcttattgactctttctattgttaaacaaatgatttccacaaacagatcaggaagcactaggttggcagagacactttgtctagtgtattctcttcacagtgccaggaaagagtggtttctgcgtgtgtatatttgtaatatatgatatttttcatgctccactattttattaaaaataaaatatgttctttaaaaaaa

SEQ ID NO: 1551 - DNA, 1746 bp, Homo sapiens
atgcagcgcccgggcccccgcctgtggctggtcctgcaggtgatgggctcgtgcgccgccatcagctccatggacatggagcgcccgggcgacggcaaatgccagcccatcgagatcccgatgtgcaaggacatcggctacaacatgactcgtatgcccaacctgatgggccacgagaaccagcgcgaggcagccatccagttgcacgagttcgcgccgctggtggagtacggctgccacggccacctccgcttcttcctgtgctcgctgtacgcgccgatgtgcaccgagcaggtctctacccccatccccgcctgccgggtcatgtgcgagcaggcccggctcaagtgctccccgattatggagcagttcaacttcaagtggcccgactccctggactgccggaaactccccaacaagaacgaccccaactacctgtgcatggaggcgcccaacaacggctcggacgagcccacccggggctcgggcctgttcccgccgctgttccggccgcagcggccccacagcgcgcaggagcacccgctgaaggacgggggccccgggcgcggcggctgcgacaacccgggcaagttccaccacgtggagaagagcgcgtcgtgcgcgccgctctgcacgcccggcgtggacgtgtactggagccgcgaggacaagcgcttcgcagtggtctggctggccatctgggcggtgctgtgcttcttctccagcgccttcaccgtgctcaccttcctcatcgacccggcccgcttccgctaccccgagcgccccatcatcttcctctccatgtgctactgcgtctactccgtgggctacctcatccgcctcttcgccggcgccgagagcatcgcctgcgaccgggacagcggccagctctatgtcatccaggagggactggagagcaccggctgcacgctggtcttcctggtcctctactacttcggcatggccagctcgctgtggtgggtggtcctcacgctcacctggttcctggccgccggcaagaagtggggccacgaggccatcgaagccaacagcagctacttccacctggcagcctgggccatcccggcggtgaagaccatcctgatcctggtcatgcgcagggtggcgggggacgagctcaccggggtctgctacgtgggcagcatggacgtcaacgcgctcaccggcttcgtgctcattcccctggcctgctacctggtcatcggcacgtccttcatcctctcgggcttcgtggccctgttccacatccggagggtgatgaagacgggcggcgagaacacggacaagctggagaagctcatggtgcgtatcgggctcttctctgtgctgtacaccgtgccggccacctgtgtgatcgcctgctacttttacgaacgcctcaacatggattactggaagatcctggcggcgcagcacaagtgcaaaatgaacaaccagactaaaacgctggactgcctgatggccgcctccatccccgccgtggagatcttcatggtgaagatctttatgctgctggtggtggggatcaccagcgggatgtggatttggacctccaagactctgcagtcctggcagcaggtgtgcagccgtaggttaaagaagaagagccggagaaaaccggccagcgtgatcaccagcggtgggatttacaaaaaagcccagcatccccagaaaactcaccacgggaaatatgagatccctgcccagtcgcccacctgcgtgtga

SEQ ID NO: 1552 - DNA, 20450 bp, Mus musculus
  misc_feature (11023)..(11084): n = a, g, c, or t.
gggctctgctgtgaggatggaaggaaagatgaatatttggtgactcctttgagactctgcccccagtacgcttttctgcttctgatggtcttcatttccacacactaggacatgcacggtcactaccatagcccagttctcatactgaaagtgaggatgtgcactgtcggggcagtggcaagaagagtgccttcaaagtgagagtattctgacagtcccaggccactgagatggccacacaccatggatccttcctcacaagttcctatgtgtcctctgagctggcccaaccctaggaagaatttgcaacagcttgaacccatcacgttttgcacacaaaacctctgaccccttcatctggagttcattgattcaaatgggcgtgaattggggcgaatgggatcagcccacttcaaaggtgttgcagagtgacaggccactcccactgtgatatgcggcagttcggcagcagactccaacaccgagtctttcccttacatcacctgtgataacgatctagatccacacattttctctccttgctcactggatccttgtgataatgtgaattaggcagaacacatccatcctgtagccatggaaacctgagacatcacagtgatttagtagtaaggctaggacttgaacctaccactctcaattcataacaaggccctttaaattgtaatgtgtcatcaaaatactcctatctggggccctgggagttggaaagcagattcagggcagaaataagacaggatcccacacagcctggggcccccaattcttctgcaattgagcccctcatactcctgggtagcatgcaggcatcccccaacagcctccgtataaatcacaggaaggaggaataacgtttccccaggattgccctgagaaatgttttcttttcccaggggatgtattggacacaagataaagggctagggtagaaaacaaactttgcaaagccgtgctgggcatttgtgcttgctctccctgccctcgctctcccctccccccacccacgtgtgggaagacacaaggttcccttccatgatctcccttctccagggatgatcgtcctggcagcccaggtctcaccggcattctaaatgcacaaagccctaaatgttgctatgggtgacatcaggaaagacaagtcttgaggcaggtttcagagcccaacccagaaaccagagtgtgtgttttatcattccctatcactgtcttctgtgaccacacacctgacagaagtaaccggaggggaaaagttagtattcttactttttctgtgtatgagtgttttgtcagccgtatccatgagcatcaccggcatgcctggtgcccttggaggccagaagtagtagatgccctggaactagagttacaggtggttgtgggctgccgtgtgggtttctgggaaccaaacctggatcctctgcaagagcaacaagtgttcttagctgttggaccatctctccagtcctgggacaatttacttgatttaactcagtcttagaggttcctggatgctcagctctttgtatacgggagaaacatcatgttggtggggacatgtgacagaggaaggtcttcaccactcagtagacaaagaatagaaagagacagaaatgatcagagcaaagacacttccaagggcctgtccccttctccaggatttacttcccccaggtagtgtctcccatagtttccagaatcttccaaaatagtaccagcaggtggtgacctagacttagcacttgtgtcacagggccaaaccacataaggtagaaatctttaatcactgacccacttgccatcagggtcaaaggcagtaaacttggtcattccaagcttgttctagcctggcaagatgcaggtagtaccttgaagtctgatcaaagacaccattcattctgtccccacagcccctcaatgatgcctgcgagtgtcaagagagccacagttgggctctggaagagtccaccatttgtacctttggcagtcaacacacaaccatctcatgtcccctattgcaagaatgcccagagagtgcatctctgcttcccatgagaagccatctctgatctgcccagtacagtgaatgcccctctctcccttttgagcatactctgtcttcatcatttaatctctttgtttgtgggttcctgccctccatactaatcatttcaacccacatttgccactgccccctcaccacctccttgcaaccaatgtgaattcctcacgggtgcctagtgtgtgccttccctctgggtgtttggcacagtgaccagcacacattccatcaccctatgcttggggtatctacttgttgatccctaatgtcctaactcagtgaactgtcatacatcctcagtgcaccaagcatttggcaaatatacttttattgttagtaattgtcccaacaatacaaggaaggagtatcctttttattttatttcttatttgtttgaaacagagtcttactatgcatccccagcaagcctgggtctcactaggtagagcaggttgtcctggaacgctcagagctctacctgcctacctttgcctctcaagcaatggagttaaaagccatacacatctgtatgcatggggtatactttttaaaagacattctgctcactgtgtttgtgtgcacaggcataccacagcccatgcaaagaagtcagaggacttcttgcaggaaccagttctctcctttcactatagagtccaagagatcaaactcttagtcttgacagcaagccccttttcctgcaatgccatctttcaggtttacaagatgtaaccttatccctgctccagggcaaatgaataagttatgtgataaattaagcgtttgccagtgccacactgagcccaagtctggaagtcagtcgagtctaattattaaagtggggcacaacccagagcagtgaacctaccttctgccaacactcagtttgtagcaagaccgaaggctttcacgctcccaaccacttctcacctcacacctcctgcctagactgggccgtctttctgatgcatgcacctccatgggtcttcagactatgctgtcagaagagtactggtcactgagtatggaaagagtcatttcaggacaacaggatactgtcacctctgtcttcttgtccaccatctcttccgcctcctgggctgggaccattggtaaagagtgccatcctccagtaaatggaatgttcctgttattgcttgtagagtctcaaaatggtcatgccagagaactctccaaaccctctgagtgctgtatgcactgagcaatgcagaccagctgactgctgcttcctcccaatacccacagggctacaacaagagaagaaggcgtggcaacaatgctttgggggtagagtctactgagtgcccaggaggaactgcttgaggccccactgacctgcattttgcatccttctgtgccacaccctgtgaagcaaagtcttcccctaacccctggactgctgttttcctgaggcttgtgcaggaagcagtagaatttgattggagggaaattacggtggaaagagccaatctgagcccaaggtgagtaagtggctggtttcagatgtgtgagtacctcagtcttcagctctgtaataaaggcataaaggctcagcctttctatgctcacagttcatctggaacacgaatggcaggttagcactaatttccatgaacatcagtgtggagatctttccagaagtattcacagcacttctggtgacttctcccctgtttgtgttggcttgcccatcacggtgacaaaacaagggaggctaacaacttaaaagaagaaacactaacaacctggatgtggtggtacccacttgcaatcccagcttagggagcccaggcctgggccaagagcattgtgagtgtgaggacctgggctacaatatggagatcctgtctcagcatgaaacatgaaaagtgaggagatgcaggatatgtattttggctcttgcatttataaattctgtccatggatgatggctagttggttctgttgcttctgtgggaggttggaacatcttggtagggaccaagtagcagaccaccctcatggagagtgggggccgggcaccctttaagggttatacccccaaagagccaacttttcacccattggcctctccctgtaaagattccattactacctatcagtaacacagactagggactaaaccttcaacacagggacctctgggaacacccaagatccaaactacaataccatcttatagtaggatatgctcaggaaatgaattataaagtcactctccataaaacaggattctgaggaatctgtgaagacaacacacggttggatttccaccctgaaggaaatctaaaggtttgtttaccataaagatatgaaaatgaaataggtggtcagggagatgactcaggtaaaaagtgcttgcatggcctgagttcaaatccctacatacacacatacaaaacctgggtggtgtgggacacatctgtaatgaaatgctggggaagcagaggcaagaggatccctgaagctcactggctggccagcctagcccacttggttcactgagagatcctgtttgcttgcttgcttgcttgcttgcttgcttgcttgcttgcttgcttgcttgcttgcttgcttgtctgtctgtctgtctgtctgtctgtctgtttttaaggacagggagatgactcaatgattaggagaactggctgttttcccagaggacacaggttccatccccagcatccacatggcatctcaccatcatctgtaactccagtctcaaggaatccagcatcctcttctggcctctgtggacactgtgtgcatatggtgcacagacagacacacagacaaaacattggtgcacataaagtcaagacaaataagaggaaaagaggccgaggaagaacctggtgttgacctctggcctccacaggctcatgcatgcacacacgaaaaggaactgtgcttggatgaatggtcaggcataggaaataaggttcattccggagatcgtcttgcttcatctggatccccacgctcacacccatcaggatacaatacggttcccatgaggtatgaaaggctggaactgccatcctcattttggcaggcttgcaaactgagactcgagaacaataacaagctttgccaaaaccatatcccaaagtaggatggggttaagataaacactagtcagggcttcatcccggacttcaggccacatgtgtaagttactgtgagctcagaactttgacgtcccagctcctaataaaacccagaagcccctgctcacagggcataattagaacaggaagaagccactgaaaatagatcctgggagtttttagagaacagtgagcgacaagagaaactatatacaaattgtctaaatatgcactgaagaaaatatcatgtgggctatagttctttgctatgtgcaaacatcttaggataaataatcaagaattgactcatctacagatcatttttcctgctcaatcttatgactgcttatatggttaggtttcgcctttggaagcagtccaatcatcccttcatcgggtatcccaagggctctttctccatcattggctgaggtatcttctgaattctaaagccctctttcttaactcccctctgtgtgcttcctcggtactctgccagctccttcctaggggtgactatccacacgattacagcaatccccaggcaatgtaaggacccacagcttctgaaggtatctcactaagaggatgacatcatgttttacaaagataagtccattcataagtgtctggctcactgatatccttagcttgattcatccctcagggcttggggcaatgactttttacgtgacagaggactatccctcgcttgtcttttgatgcctagccagcctgagggaggctcagggtcactatcattatcgttagtagcaacatctgtattttgagacagggtctcatggggcccggactgaccttgaactcactacataatgaggatgatattgaacctgtttctctttcctcctcctccacaggctagggttacatgctctgcttattcagtgctgggggtggaaccccagggcttagtgtatgccaggtaagttctccaccaactgagctctatgcctagccagcttaaacacttttcaaaaaggcaccagcgctcctgtctacaggtctcacccacatttgatcctccttgaggcctgaacaacttcttgttgcaggggcaacctgtcctgaatccccagtattctctgaaaactctgtgctccttgatgtcatcactgtttccagtagttgccctttggggctggagagagagctccgtggatgagagagttggctacacaagtgtgaggacctgagttcaaatcccccagtgcccacatgaaaaaccatgggtggccatgtgtgctcttgtaaccccagtactgtggaaagtggagattagaggacatcaggagctcactggccactagcttcagactcagtgagagatcctgacacaagggaatcagatgctgagttgtagaacaagacacatgaactatacctctgctctccatgtgtgcacaggcacacacacatgtgcacatatactacacacacacacacacacacacacacacacacacacacacacacacacacacactgtccatttgtgcctcctgaaactagttctgcacagtagggtgagggaggacaaatcccaggccaaatgatggctcttctccttcatctctcattctttccttcttcaccccacccactcactaattcctgtagttgtccatacaggagatacttgggcagtagttagcgttggggtgggttgtgtgggcacaatgtaacagccacccctaaggaactgagagcagagtgggagaaatgatgaacacatgtgttgatggtggctgatttcgcacagttagattattctttagtccatctcctttcccctcccaagcatcctccagagggaactggaccactgatctctgacttacagagtcagaaaagctgaagcccacgttggttagctggcatttggatagtccagatcctccttacccagtgaagtattgtttctggaacatttctttactacccttcgcaaaaataccaactgtattcaggtgctagtaggaatgggtattgacacatgctatgatcggcttgggtacctggggacacgatgctgactgaaggcacacataggcccagagctgtggctgaaagtcctgtgagaagctcaaagtgaatgattccagtactggaagccatcgggatgtcccctttgtgcccgcccttcccgatgtgtcctccaaggaaaggagaagaaactagaataattggttgctgaagtcaaacatggtggtacacacctgtaatcccaacacgccagagttagagatggagggatgataactagcctggactatacagtgagtatgattctagcctgggctacatgagtcattgtctcaataccctctttctaatataggttcttgatactgtgagctatgaaagtgcttttctgtgtgtggtgtacatgtgtgcttgcatgtgtatgagcacatgcatacaaggccttaagtcgatgaccaggtgtctttcctggtcactctccactttactaactgaagaagggactctcacccaacctggagctctctctctgcacttagcacaactagcagcttgcctagggaatgccttgtctctccctcaccagtacagggcttacggggcaccacacctgcccagtttttatgtggtgactaaggatttgaactctggtcctcacacatgcctggtaaagactttacccactgagccatctctcctgcccctggaatgttttcaaggctctttaaagagctgagagtgcattgctcgcagacctcagacatctgttttggtcttgtgatgatttaagccccagcagcaagcagacccaaagcaagcctgtggtgggtgagagagccttcacactatgagccttgcccccgccgcaactgctgctgagccaggttccaagggggctctcccagaagtcctcagtgcacagggaacagtggacatctggaagcggttagtttcagtccagcctggaggccggaggatggactaaatgacccctgcaagtcaccctctgccatctgcctctccggtcaccttccctcatttccagcaggctggctttctctagggaaaaatgaatccagggctctagcttcccttgggagtcacaatgatttcattctccagcctgtggaatctaagttccatgagacaataactctgggagaaatggggaagaagccggaacgacacatactgtatatatttagactcgtctagcaacacgtgctcctcagagcaccacatgcatgggagacagggaccaggagtccttggcctgtcctccaccctgcccctgaccaccccaatgtccctacttggtgcccaagtgacctctttacctggatgctctgcaggaagctggtgacatcacaggacagagctatcctgattcttcctacgctgagatttttccttcaggctatggatgaaacccaaagtctcctacaagctaggcaagtcctttacccacaaacttcaccccccacctctgcatagacccaaccccagacatgtgggctgacaagaatgtttctgatgcctctgagtctgaggatcattatggcgatagcttctttgaacccctttttggacacctgttttactagttgcttttcatatgggatggcatgtcatcacaccaacccctaagaataggagcttcagacagatagaatccaaggttacccaggtcaggaaccaccactggagcctgtctgggatgacttcctggggtcctgttcaggacagccagtgcactaggctcatgggcttcagtctgcacccgttggaattgctgaccctaaacactgcggccatgcctcagcccttctttgaaaaagctgtttataataaaaggtttcaaacactcggaaaaagtagcaggaagcagaaatggacccatcttccaggttcaaccattgctgacatttgagatatgtgtccatccctactccccagccccttgcccaccacaggcctttaaataaattcctgacattgtgtgttattctgcccctaaatactcccatatgtagatctaaagggggccagggaggaaagaagagggaagaaaaaaataactatgaatccaaattcctaaggcaaatgacttctagttagctagttcaactctaatgtctcctggtgtcaaaaaataaaaacacgcgtctgcatttggttggtgcccataaaaagattcaaaaatccacacaccgcctttggtggtgcccctcctccataaatcttggcctctctctttcctactggtagttaacaagctgccttgagcagaagggatggctcagaggttaggagtgaacactgctggcagaggacctgggtttggttcttagccaagtggaatagctaaaaaccacctgtaattccagatctgggggctccaagtgagtgttacactcacacaacatactcttgcatgcttgtgtatacacacacacacacacacacacttaaaacctttaaaagaagttgtcccattaaacagtaatgtctcaaattctaggtctgtggaacaggctctgcaccggcagagtttacgacaatttgacacaagctaaagtcattttagaagggggaacctctactgagaaatgcccccactagttaggcctgtgatgcattttctcgactgattattgatgtgagagggcccagctcgctatgattggtgccatcctgggtagtgtaagaaagcaggctgaagtggagcgagcgagttgagcagttgtctggtcacgtctcaaaaacccgtagcccttgcagtatggctgaacaactgactgaagagcagattgcagagttcaaagtagctttctcactatttgacaaggatggggatgggacaataacaacaaaggagctggagacagtgatgaggtccctggggcagaaccccacagaagcagagctgcaggacatgatcaatgaagtagatgcggatggtaatggcacaattgatttccctgaatttctgacaatgatggcaagaaaaatgaaagacacagacagtgaagaagaaattagagaagcattccgtgtgtttgataaggatgacaatggctatattagtgcagcagagtttcgccatgtgatgacaaaccttggagagaagttaacagatgaagaggtcgatgagatgatcagggaagcagacattgacggggacggtcaggtgaactatgaagagtttgtacaaataataacagtgaagtcaagacactgtacagaatgtgttaaatttcttgtacaaaattgtttatttgccttttctttgtttgtaacttatctgtaaaaggttccctcccctactgtaaaaaaaagatgcatgtatagtaattaggacttcattcctccatgttttcttcccttatcttactgtcattgtccttaaaccttattttagaaaattgatcaagtaacatgttgcatgtggcttactctggatatatctaacttagatggagttggtccaatgagggaacatctgggttatgccttttttaaagtagcttttaggaactgtcagcatgttgttgttgaagtgtggagctgtaactcagtgtggactgtggacagtcaacaatatgtacttaaaagttgcactattgtaaaacgggtttttatccaggtacttggacactaattttttttgtactgctggtattgtaccaggaacattttcttttattgttacttgctctttaaactttgtttagccacttaaagaaaacctgcttgtggcacaacttgcctcaaatccattctaagttgtatatttgttttccannnnnnnnnnnnnnnnnnnnnnnnnnnnnnnnnnnnnnnnnnnnnnnnnnnnnnnnnnnnnnagggagggaaggaaggaaggaaggaaggaaggaaggaaggaaggaaggaaagaaagaaagaaagaaagaaagaaagaaagaaagaaagaaagaaagaaagaaagaaagaaagcaggctgagtaagccatgagagacaagtgtcactcttccatggcctctatatcagctcctgcctccaggatcctaccttgggctcctgccctgatttccattcatgaagagctgggatatataagtgcaagctgaagcaaacaaacaaccctttcctccctgaattgcttttggccattatattatcacagcaatagaaaaataactaattcaaattccttgagggtgagggtaggggagtgtgtggcttaggtggttgttgttgttgttgttgttgttgttgttgttgttttgtcatctagactcaagaagccagggcctgagaatttcaattaaaaaggcttccatcagattcatctggaagcctgtagagtgttttcataatgaatgattgatgtgaggggaccaagcccactgtgggtggagccattccctaagcaggtggtcccaggtggtataagaaagcaagccaggaagcagcattcctctgtggcctctgctttaggtcctgtctctaggttcctgtcttgagtccctgtgctggcttccccttagtgatgcactgtaagccaagtaattccctcccttctctggagttgcttttgatcatggtggtcatctcagcaaaagaaacctgatacagacaggtagttcgctcacatcctttcctcctgtgcttcctattgagatgcagtggaggcagaggaaggtggctctctgagttccaggccagcctgtgctacaatgtcaattccaggaaagttgagttcaggcaatgaagaaaccattgggaaaaaaaaaatttgaatgaggaggccattttccagccccagcaagcagaacttggcagcttctgccatgtggttctggctttagagtcaaggatacaaaaggggcggggcggcatacggaatctctcctcctgaggcaaggcccaggcatgtgtcaggggttcccctgcatggaggcctacagaggtcattgtttaaagtgaaggtgagggtgaagcctatgtcgccttgaagatcccaagatgttggagacgccagagcagtggaattcctaccaagggaagctgctaagagggagtggaactagcccaagagagggaagtgtgctgcagtcaacaaagccgaaaggagttggacatcagacatgagatgcagagttgggagtttacccagatgatttttagtcttgctttggccagcatttcctcaccatgtgcccttcctcccctttagtaaggaacggtgatgtatattctgcaacattgtatgttggaagcatgtgatctgctctttgattttgactttatagatgtttacagtaacgatatttgccatgagtctctgaacacgcttcgaggtttgcactttcaatcatgttgagattgtgaacgactacagggacttttaaatctggactgactacattgttccattgtgatatggctctaagtccatggggggccagggagtgggacgtggtggtttgaataaggatgtcccttaaaggcttatgtttaaatgtttagtcaccagggagtggcactatttggtctctaggaagcatggtcttgttatagaaagtatgtctctggaagtgggctttgaggtctcaaatgctcaaaccaggcctaatgtgtgtgtctctctcttcctggttcccactgctccaggtgtagaattctcagccacccctctgtcaccaggtctgcctgtgcattatcatgcttcccaccataactctattactgtatacaactagttatatactataaagcattgcacatcggtatgaagagttaaagtaaatatcagtgtggaccacctcctagttcataaaataaaaccttaacgactcaatttgtgagttttgtttagttttgattttgaaaaatccaagtctcacactcttgcgcaggtcggccttgaacttccattcatcctcctgcctcagcctcccaagtgctacgatttcaggcaagagatatcacaacccttctagtgatgctttaaagaaatggaataatgagatggtcttaaagtgcagtggggcagtgagcagaagagcaggggatggcacacccctgtgagccggtccatgggaagagagggcgtctcgggggaaatccaaaaatacattgagctgaaggaagatggaaataccatgcatttcaagttaagtgacagcctccaagttagaagagaaagctgagtgctacaggcttaccctggaaagaggaaaaggtgtgggtcccaagcgcacactccctgtggggaacagtggagagccagacagaatcagtagcagtggactatggaggaaaagagtctcagaagatcagtggagcactggcccgaggcatactgccctggtgggattgcccgagggaaaaggaattaaggcccaggtgaccaactcaggatacacagggatgttgctacaggactctaaggacaccagaatgacacaaaccaagaaacacaaatgaccacggtccactcagtgtgaagcagataaccagaacacactgtgatgaatagaattgaagtcagggactggggagtgggctcaacagtgaagaacacttgctgctctaatacaggacctggattcgattcccagcacccatgcagcaattcacaactgtctgtaactctagctgcaggggaacggcgccctcttctggctgccattggttcctacatgcatgtggtgtacacaaactcaggcaggcatgcacacaacacataaaaataaaatcttgctggcacacctttaattccagcattcaggcagaggcaggactttgattttgaggccagcctggtctacagagtaagctccagggctgccagggtgacacagagaaaccctgcctcaaaacaaacaaaacaaaaacaaacaaacaaacatctttttcaaaaagagaattaagtgaatatttttcattatcacatctatttatttacttaatgacttatgttctccccttccaccacgtgggcttaaaggcgaaactcagtttccaatcttggcagcgcgtgcctttaccaactgagcagaatcatggacactaaattcataattttaacaccttcaaaagacaaatctttaatcccaggaactgattttcctaaagaacaccaacaaatgtttagagaagaattaatcctagttgtactcaaatcagcaaaagataaaacacaggagcacacaaataccaatgatgttcacaaccacaaggaatctcagtaaaataccagcaagtacaactcagcaataggaagaactgcatgcactgacaactgaggaagcaaggctgttatggtgtaaaaaaaaaaaaaaaaaaaaaaaccctattcagaagggaagaagaagaaaaaaaaagaattccaagagcattttaatttgtttaaaagatttatttactttatgtgtgagtgctctgtctgcatgcatacctgtgtgccagaagtgagcttcagatcctattacagatggctgtgcgcaaacatgtggttgctgggaattgaacttaggacttttggaagagcagccactgctcttaaccactaagccatctctctaggcaccttaggtttgggttttttgttttgttttgtttgggggggttattttgggtttttgtttgttgttgggttttttttgtttgttttttgttttgttgttgttgttgttgttgttaaaacttcaacatctacctgttgctatcttaacaattcaaagtaagatttcccagtaaagaacgaatacacaatccatgcagttactgctgtctgtagaggtaaacgcagtttaactactttcccgtggagtttggaaccaggcaagaatgtctgctttctgcagcacttaattaatgaaatgccaaagaaacaaggcaggaaaatgaaataaaagagcacagaatgcacacactgacacacacacactcacactcacacacacacacacacacacacacacatgcaggcacacacatgaaataaattttttacaaagactcaatgtagaaactatgccagaacttcagagatggctcagtgggaaagatcacatgctgctcttgtcgaggaccagaattcaagtcccagtacccacattgtgtgtcacaccatccacatctccagatccaagggacccaacatcctcttctggccactgtaggtaccaagcacacatgtggagcactcatatatgaaagaaatcaatctagaaataatcttaagtaaataaataaagctaaaaagaaagtatgtcagtgttccctacattgctagacttaagcaacacagttattatcaaactcttgggaagattggtggtcgtgtacacaggctgctccaaagaggattatgttagctaaaataattttgaaaaaggaatatgtacgtggggggaaatctgcctacgtgattttaagatgtatagctgcggagtttggatgcagttcacttggtagagtacctgcttagcactcacaaaacagaggcaggaggatctccgtaagttcaaggctgcatctatgtagcaaggtctaggccagccaggtctatacatgtgagtcctgtcttaaaaaaacaaaacattttcagaaaaatgagtgcaggaaaagacatgagcagcagcattcattcggggtgtgtgaacagagccatacgctcttggtgcactgctggtgccaatgtgagattgtgctgtcactctggaagactggggacttctctggcaacttaaggatgcaatatccttatgggccagcagctcatcaaaggaatgaaaacagacattggcatatgaaccaacatatgaacatgtctaggagcattgtttaaaaaataataatgacagcttcaaacaactcagcaatcggagaacagttgtgaatgtagaaaggcagaagggacctcctggaggacacaggatgtcctatgtcttcaccatatcaatagtgaaggtcttctcagccacgcccctgcctcctgctccaagcattataagacatgagtgtctaggaatctctatagttcatctgatgtgaggcccaaggagtctgtatgataaaatcaattaagtatacacaatctctctctctcccttccccctctcacgtgggtagacatgcacacatgtgcacatgtgtatgaggagcatgtggaagccaaatgccccccttgagtgtcctcctcaccactctctgcctcactctttgagacagagagtttctggttgagacgactgtctaggaggctgaacaatgtactccagggttcctcttgtttgccagtctgctctggtctgtaacacacaacttactgagtctagctctggagtgagcactgggcatctgaattcttcctgcttgtgcagcactgagccatctgtcaagtaattattattctttagacgggtttcactgtgtaacccagactcacctcaaacttaccatcctcctgcctcaggctcctaaatattggaatcccacgcatacattacatctggcctcatcatgtcttataatgtgtgaggttctgcatttttcgcaaataatttaaccaagatttttattgaatatatctattttatttttaaattttttattatttatttttatgtgtgggtgttttgcctacatgcatgtctatgcattgtgtgcatgcagtgcctgtggaggccagaagagggcatcagattctcctgaaactggagttaccaagagttgtgagccaccatgtgggtgctgggactcaaagccaggttctcttgggagaactgatggtgctcttaactactgagccatctctccagcaccagtgtatcagttttcagtgaatatgtttgtgcatagtgctactcatattagggttagtgggggagtggcgttttgtggagactatgctgtgaaacttcgttcacataaccgggttcacccggggtttattacagaaacatgactgcgaactctctgaactctttccaacttccatgccaaaaataacatgcggccctgtcatcgggaattatttttaatagtttatcagcagacaattcctctgagtctcctcttatatagttgaaggcaaaggagtggagaacatcttatctgcaaagagctgccgcttgaccttatgctcatttcccttgtctgggaaaatctaccccaggtcctttatcaggcctcatggctatggctcctcttctcataagcacctcctacctggtggtttagagcaggtcagagacactgatctgttgttgcatttactgagccttaagtgctgactgcacatgtgttccactttgttaggagtggcaagctcggcacactcactttgcaaatacccacagcaggtgtgagccatcactgcttcatctcccagaggcagctccctgggtcccttccaaaacccttcagtctgctctatgaggtaataagtggacagacatcctgagctttaattcaaagatgatagaggatagatggatggatagactgaatgatgatagatacattgattaatagatactagatggttgattgaacaataatggataatatatggtagaacggtttattgattgttgatgtagatgacatatagagcagttggttgatgatagatcagatatacatgattcatgttagataagagatgattgatggattgttagatgatgcacagataaatgaaatatgcatgatagattgatagattataaattgattgagataggtagaatgattgatatattgatagaagatagaaaggtgataggtagatagatgattgatagatagatacgtagatagatatagatacatgcatacatagacaggtacatagatatagatagatacatagatgcataggtacatagatacatacataaatagatacatacatacatacatacatacatataaatatattcatacatacatagacagataggtacatagatatagatagatgcataagtacataaaagagatacaaacatgatagatgattgacggatgaataagtagatattgaatagatagatagatagatagatagatagatagatagacagacaggtagaaaggacaggtggtgagtagacagttgatggctggacagcagatagacagtgggcagagacagacagagaacagggtgtaaagcctgcttagtcattattttgatggaccaccctacctacagtaagacccctacatattcacagcccattttcctaggatcacagtgtattctctggcaatcactgggagaaagagagtcactaaccaagtggtatcaggttgtaaactcaaaattgctcccaaatggatcaaagtcttcttcctcgttcagccttgtggtgacagaagtcttggagtctcagcaggggaggcccgggctgcctctccttttctggcacctggaaactatgcacaccactgggtcagggaggggagggtgcatggctttgttctctggagcccaggaaagggcagcaggccctgagggcagcctgctgcttagaggcacgcatggcagtcggttagctaaggatccaggcatcagtgccagtgaagctcgtgcattgagaacctagcagccttcaagattgccctgtcccttccagattctgcgcaaccagagatggggttcctctgcccttcccaatggcttcctgccttcagatcaccaagttggtgtcacagccaatgggtctccctggcataatccattgtgtactggaggtgtcctaggagaaggctttgggggaggggaggaccccccagaaagggaaagagccacattgaagcctcagacacacacaaccatgtgaatcataggcctgtataactttttaggtctctgggaaggaaaggggcaaggcagattgaggggatgaggggaccgtggaacggcacagactgggagaacttcaacagttttgtttgtttcagagatggagagaaagatacaaccgagatttgatggaatgaggccaatgaatggatatcttctggaaaagtccacacttgtctccagatacacgagaatttcctgtatccttgcctctccacagcttagccctgaatagctaatttcagaacagagaaagaaagatctgtccttttcttggcaccttcagttcctgaaacagtggaagtcacatggattaatttatactaaagtattaatggcttaccacagttatactgaccaaaggtacattccaggtctaagggcctgtgaagtgtacacagaataatcaaaaacaaaggaatggcaaagaaagagggccaggagaaaggaatagatagggcttatcttcatctgttccctagacgtccaatcaggagcctcacacagcaacactcactcagggagtacactgataggctggaccagtctgccagtagatggcggcctacatagtaactgttctctcttttggatcacagtggtggagctggctagcatatacaaacacagaggggactacaggcactgcgtagacaagagaactcgggacgggggtcgggtggggtggggagggccctacctgctctgaaccagctcccatgtggactcatccttctgggtctaacgttcctacttagccagcccttttggggagggacagccaatggcagatgggacagaaaactgagatgagtcattatcactttagcaggaactaatctggcatattgattcaggatagaacagagcctgaaagagtagactgagatttgtgagcgctaagataaagatgagcaaagctttggcagctcttaggtatctgagggccaccgtcctctacaaagcaacgagaggcacggcggattaggatagactggttgcatccaaacactaccttgctgcctcaaaggcttattggacaccacagaaagacctctgctggaggcagaagtcacaggactcctcgtcacagacgatcacgggtcatggttgaaaaagtgaggggacagtgactaaaggactgaggaactgaggcaacttggcccgggtctagtggttgtcctatggtaacctagaggaaagtcatgttcaaaggacatcagccttaggaagggctcccagggttgctttgaggagtgcgggaccctaaggtggaaccagacatttcagagaaattgatgacgaggcagctgctctacttggcctcctgttgctgaaatatcactgactaaaaacgagttg

SEQ ID NO: 1553 - DNA, 1163 bp, Mus musculus
  misc_feature (27)..(27): n = a, g, c, or t.
aattaatttaattacattttacctttntaccgagtccgagtggagcgagcgagtcgagcggttgtctggtcgcgtctcggaaacccgtagcccttgcagcatggctgaccaactgactgaagagcagattgcagagttcaaagaagctttctcactatttgataaggacggggatgggacaataacaacaaaggagctggggacagtgatgaggtccctggggcagaatcccacagaagcagaactgcaggacatgatacaatgaagtagatgcggatggtaatggcacaatttgattccctgaatttctgacaatgatggcaagaaaaatgaaagacacagacagtgaagaagagattagagaagcattccgtgtgtttgataaggatggcaatggctatattagtgcagcagagcttcgccatgtgatgacaaaccttggcgataagttaacagatgaagaggtcgatgagatgatcagggaagcagacattgacggggacggtcaggtaaactacgaagagtttgtacaaatgatgacagcgaagtgaagacattgtacagaatgtgttaaatttcttgtacaaaattgtttatttgccttttctttgtttgtaacttatctgtaaaagttccccccccctactgtcaaaaaatatgcatgtatagtaattaggacttcattcctccatgttttcttcccttatctaactgtcattgtccttaaaccttattttagaaaattgatgaagtaacatgttgcatgtggcttactctggctatatctaagcccgtctgcacatctaaacttagatggagttggtccaatgagggaacatctgggttatgccttttttaaagtagcttttaggaactgtcagcatgttgttgttgaagtgtggagctgtaactctgcgtggactgtggacagtcaacaatatgtacttaaaagttgcactattgcaaaacgggtgttttatccaggtactcggacactatttttttgtactgctggtattgtaccaggaacattttcttttattgttacttgctttttaaactttgtttagccacttaaagaaaacctgctcatggcacaacttgcctcaaatccattccaagttgtatatctgttttccaataaaaaaaattacaatttaccc

SEQ ID NO: 1554 - DNA, 450 bp, Mus musculus
atggctgaccaactgactgaagagcagattgcagagttcaaagaagctttctcactatttgacaaggacggggatgggacaataacaacaaaggagctggggacagtgatgaggtccctggggcagaaccccacagaagcagaactgcaggacatgatcaatgaagtagatgcggatggtaatggcacaattgatttccctgaatttctgacaatgatggcaagaaaaatgaaagacacagacagtgaagaagagattagagaagcattccgtgtgtttgataaggatggcaatggctatattagtgcagcagagcttcgccatgtgatgacaaaccttggcgagaagttaacagatgaagaggttgatgagatgatcagggaagcagacattgacggggacggtcaggtaaactacgaagagtttgtacaaatgatgacagcgaagtga

SEQ ID NO: 1555 - DNA, 30000 bp, Homo sapiens
tggctggattcctgacccagctccgttttttcccataatcttggaggaaggatagtttaactttctgaaccagggctctttatctgaaccacagaacaagaaattgatttcagtactattctctcaaggctggtacataactagtaccattctagatgcatagaagttgattcaatacataattcaatgccttaggatatttaggatttatttcttttatctgttgagaaacacataggccttaaaatcaagaatgctactgggggccagacacagtggtttatgcctctaatcccagaagtttgggaggctgaggagagaggacctcttgaagccaggagtttaagaccatcctgggaaacaaagcaagattctgtctctacaaaaaattttaaaaattagctgggcgcactttgggaggccgaggtgggcagatcacgaggtcaggagatcgagaccatcctggctaacatggtgaaaccctgtctctactaaaacatacaaaaaattagccgggtgtggtggtgggcacctgtagtcccagctactcgggaggctgaggcaggagaatagtgtgaacccaggaggcagagcttgcagtgagctaagattgtgccactgcactccagcctgggtgacagagcgagactctgtctcaaaaaaaaaaaaaaaaaaaaaaattagctgggcgcagcggtttgtgcctgcagttccagctacttaggaagctgaggcgggaggataacttgagcccaagagtgcggctatagcaagctatgattacgccactgtactccagcctgggtgacgatgagaccctgtcttaaaaaaaaaaaaagctactgtgattgtccctttgcccttcaccttggtcattagcacagatggctggaggagggaagctatgggaaggaagtgtcaaaggatagggcttgtgttatctctgacctgcaaattgaggaagaggtgtggagaggaagtacattctcactttcccaacatgggcaaaggcagagagctgtaaggttttaccagtcaggacaggaaaattcaaagacaaccaccttcttggccttggcatgttggtcatcaccaaccttctcagtggcaattgccaaagtcaggcagcactgtatgtcatgttgtggaagacaaatgctctataaataaattgacttgaaacagtctcaaatacacataaaccacaatggctttaaatgtaactcttgacttttttctcattttctttctcttctaagagaggtcagcaaggaaagttctgcaagagaggctttacggaaatccaacctaagaaacctgggaggacttttatgtatctgttttaacaaacatatttcacacctaaatatttgtttaaaagctcctggaggctttaaactccagagatggatacatacatctctgagcacgcacctgtatttcagacttaacgatgcacttgttatatgctagacatccatctttttaaaaattcattttctagaggaggtgattattcattttgtcattcaatttcccatcattaaaaatttcatgcagtaaaatcactgcatactaatggggtactgtgtaaagagagtatttttagtgactaagttgaaagaaaagatcattgatggctcttccatctgaggatttgaggagtaatcagagacaaatttctgaggaataccttggaaagacctggaagctaccagaatgcagagtaatgaaacggaggccttagggctccgttttcagctcagattctgaagcagaggtgtccgcttttaagtaacattctgtctcgatggtattccattcacaggataaagttaattaaatctcctttccccccaccatcattacgtcaccacattagcgaggacaatagaagcacagggtcctgagtttgcactgactggtcattcatctgaaaagaaggtcacagggttgccaatgctaattggaagagcatttaatgcctggtttgcatgactgaaagaaagaggacccacctctggcctggcaaagaaaagatttttgatggtgtgagaaaatgtctaacttggctaaaggaggttaaattccactgaagccttccaagtggatgcaggtagctgttagcatcagaaatggtcttgctgggcagggcaatgttctctagggagctgtcttcagtaggcaagatttcaccttggcttgcaaaaaatgctgttcactgggttttaagggtctacatgcttgtgctttttactggaaaattctcagaccttgatatggcctgtgatgatttctttttttttttttttctgagctggattctaccaacaatcttcttaaggaactgccttttgagatttaaaccttattcctctttaatttcccagcgtcctctctgcctaacgaggctggctgtctactttgggctttagtaatgcctatccccttgcaactcctccatcataccacgcaattacacacctccgggcctttgctgttacttacttcacccagaacttgctcccttctttcctccctgctttttcctagcccattttataacattagacaatttaggagttaccttctctaggaaccctttttggaacctcttatagaggactaaggtcctcacctctgcatctcgtaagcccttctatagttacaattataatcaaaccgagtttacacagtaggtgttcactatccacctgttaaatatttcaggtatgtacgcctttgtttattttggatgggaccaagcagttagtttttatgtggtttttaaaatattcatttaaatctgtggagttagaaatccaaaagggcaaatttcctatgaaggggaaggcatattatagtgaccaattgttggagtcctaccctgtgccaggtactttaacactttgttaattctaatctttgcataattctaatttcctcaatattctttcgagataggtcttattgcctgtattttacaagtgaggctaaaaattaaatgactcacccaaggtcttgcacctgagagagggacccaactaactcatgcccagctctgtccaatccagaaccctttaaccccacgataacaaggggccatttcgagatactaatcccactgaagctcggatactgtgacttttgagttacttttcttttctggtaaattacccttggcaaagaacgcgaagaggaagtataaacgaaataccctttgagattagcctgtcagctgaacagctacatttgcccgtgtccagatttacatgggttttgtgagggcgtgaaatgaagaacgtgcggcttccatgaggccaaaacactaggttaaaaagctgagttcagggtacgcgtttatcggaatctttcagcttcattctttatcggcttaaggtgttttcgtctacccctcaataaggggcgggaaagtgggtgagtgtggcagggaaggatacgtggaagaggaaggttctccagccaagcgcaaagcaggcgactctgccgcctggcgcagttgccaggacagcgcggcccgagcagcaacggcagaagccgcaccgcgtcccggcggcggctgcgagtcccagtgacgcattgcaggtacaaaccagccaatcagaggcaggctcaacgaccaacgggggacgcatcgccgccacgatgctcctccgcgccgcaaagtagcgcccctcaggggccgctccaccggccttttaacggctcgctggaaatgaaacccacttacgtcatccgttcgcccactttccttgatctcttgcctcatcgaccaaataactgtgaagaaaggggtcccgagaagagtttgaggggagggggttggccgggactcgtttgcgatgttccgttatctggatgcggcggagggatctggcggagggaggtgtttatgaggcgctgggggcggaggaggcgaattagtccgagtggagagagcgagctgagtggttgtgtggtcgcgtctcggaaaccggtagcgcttgcagcatggtgagtgcatcgctgagctgccggcgctgggcctgtggggggaagagactggagcgaactgactaaacaaaggaaactcgcctcccttacaccttcaaggagtggtttctgccagagggatggcgcgaaagaggccagggatgccggcgacggttgtgtcgcaggtgctcccccacccccattctcttcaggggggcttcctctagtgagttgagggccggacgcacagttcccgaggtggtgaagctcctcgggggcttggctggaggaggatgggtccgggatgagggacagcccagtgcacgggaaggagagaaagtgaaggaagggagagagggagcgtagagagccttctgtcgggcgtctggaaaggtcaagcagggggcgaattcaatccacccgaccgacggttagtgcgggcgccaggaagcgcctttgtccgcttgcggccgccatgcgcccagggggcgggaggagcgcgcggggccctggggcgagcgtcggcgtcgcagttagcccgcgtcctccgcgtgccgggatccagggggcgcgcgggcgggcgggcggcgcgctgtgtgggccgagcccgcgcggcgcagggagcggccggtgggggcggggcgggcgagcgcctcgcgggacccggagccgccgccccgctcggccccgctcgagctccagctgctctgctggcacctgcaggactgcggagatctccttggcgctgcggggccattggcggggatgggcgggggaggggggcctcgacggtttcccatccccctctggcaaccctaatcttccttctccatctgggccctggggcgtcttccaccacccaggccggatgctttaaaaaaaattgctttttaaagtgtctgtcgttgaaagaaattagtcttacccttgaagtcaggggcgcgtcctcgcaatacacatcttgttagggaaagtgttcggctccagctagggttctacaaggcgtttcttgttcaccgccggagggaagcaggctccggagtgactgccttctgaaagtcggtcttgtaacaattggatggatgcctttgaagagcccctgtccctattctatgcttgaaaacagcgtgcagtcctaatgttcaagaaccacgaccacataaaaacattgctccccttctgctgctttgaaaacgacccctaaattccgtgtagaagttgccaggtcgtcttgacgtacacttcgtttgtatgatgtttgtctgtcaaatactgtgatggaagagtgtatgcgggggaggagcagggaatttttaaaagcattttccggtcacctcagactgggagatcatgttctttcctgaaaaaaaaaaaaaaaaaaaaaaacacctaatgagggcggtgatctgtgatacttactttgtggttcctcctgccaagtggttacagcgatgggtgtgtccaggaggcaaggtgacatcttaaacaggagttagggatccttgccaactgaaacctccagcctgtatgggtgtggggagaggatttcaccttaaataaaactagcgttcattgacgtttgatggatttgcttcatcttgatgcttcaaatgttattctgaatttgaatgtgctggttacatttgctttcttaaagatgtagttacaggcatatgtaataaacattacaagttgtggagtaagcttttttttttaaataaacgaagggtaaagttttctttaatcagttttgataattgaatcagtaattcgaatagattttttcttggtagagttggtatctacgcatttgtggtcccttgcccagtgttaagcttttgtagttactgtttgcatcactggtgctttgggggttttctgttaaattgacagctcttactataagagacaaagtcgaaaaaaaaaatcttaataaaaattgacagatatcattatttgtgacagatacagtaaatttgaaaattgccttcacataactttataattagaggactgagattttacattaggaatccaattaaaaaaaattagccggacataatggcctgtgcgtgtagtcctggctagtcaatgggctgaggcaggaggatcatcttgggcccgggagttggagactgtagtgagctatgatcacaccactgcactccctgggcaacagagtgagaccctgtctctcaaaaaataaaaaaaattaggaccccaagttaaagtataaaaaattttatacggaagtaaagtaagattgctcatgtaactcttgagtttacatgtaatcaacatatgctcattgaaaacgggattgcttcaagaggactttgagtccagggtgattaggtaagtaaaagatgtaaaaaggtagaaaatttttgtcacttgagtctaaataattgttcttataagtgccaacgcctgtttctgttaggctcagaagatcaaaggatttggctcttttaaaatatagaaagctctagcttcagctagaatttaggcctttagtaatagccctaatttttatgaagccattttgttccagtgatcttttggtgagagatgctatgtaagtactattcttcagaattaggtgtctttttaccctaatgaaataatttagattgcttttgatacaggtaaaacaaatatcctggcttccataattgtagaaaaaacttcatataggaatccttgttgtatcaaagtagcacctgatgggaatgaacagacaggaatggatgaaggatagcagtttgcgttccatttcaagcctatgggctcacacatttattcagataagaacaccacctttcactagataaactccaacagtattcatgcatacttttgaatggcatgtaggaaatgtttgataggtacataatgtattcacttcaggtcactaatgtaatacggggtcgtgctccttagtgttgacagatcacctatggttctccaaaatgaacattctagtacaggaggtctagggaggaacctgagagtatactaatgcctaggaactttctctggagtggcaagagcagtgggaagaattatgtcaatagctacagaaataagggagtaagaacaagtcatctctctagtgaattcttcttcactttactgagataaacatacatgttaatgagcttgagttttcccaaaagtataattcttctggttcttctaagaaaatggcactccctggaaacaaggaagaaccaaatttattcgcctttgtagcagttgggaaagttagtgctaggaagtcttcttgatttatagtaggctttaatctggatattgctggtaaaagtttattctaaaacctgaactctggataagtaatacaaaaagcttctcaaccttccaagcaaaattgagagctttcaggttatgtgagtaatttggtctcttgggtgcttaattcattccttgaagctcatttttgtgatctcttccaagattgcatttgcttggaggtagggagttagacaagatggtatgaggtccctaaattttgactttccaagcaaaattggacagtggttcctaaattgctaacatcctcgtttcttcctaaggcttctcatgtttcatatatagtagccttcccaaaatcccatttcccaccccccccccccaacccatgtagagagaacgaacctgtctcccttcctgtacagagtacgggatccttcaactttcacacaggctgcagtgtctgccacacatttagctcaacttttttttagccttaaagtgatgtccgctgcatctgtcgctgggttgcaccttgtggatttagtttgcataaattttctcagcttaaacaaagttaacattgaatagagtaagcttaccataaagggcttaataaatgccatgcatgtctacattcggtgtggaaattgagctagtcaggttgatatttaacattgtaggttctttgttaatttatatgaaataatggttatcatttaactctttaggttagctttgtacatagcatctcactttgcacaacaaccctgcaaggtaagtattgttattcttgtgctacaaatgaagttgactgagaggaggagtaccacgtccaaggtcacacagctattaaatggcagggctgggatactggcctgtgactcagaacttgatgctttccccccacgccacgcatgccaggttgcccttcctttcagaaatggtggaagtcctgcaaaatgcaataaactgaagtaatgtagcttctattaatacaaagtaaataactcagatttactggattttaaaccttattccttgggtaaacaatctgactgacttcacaccaaatatttgttggcggaggatttggactttagggataaaagtggatacattttttattttacaaactctgtatttgaacttaattattggctcttcaattttacgttaccagcttttttttttttttttttaatgaatttgatttacatcatggtcaaacaaaaattgttgagcagggaaaataaactactttctggattccttcttgaattttctcatgtgccctagagaaaatgtgttccacattaaggtgttactttttccaggggtgtgttcatttaaaaagaatgaagccaggcaatgtttatttttcttttacctataaataaatgaatggattaatcattgtatacttgactcccatgttggtagggattttagataggaggctatttcttgtctgtgcttctcaataccccataagcagttgcttcatggatgtatatactaataagcagtgaaagaaagtgcatgttcaaagaatacaacaaggagtctggatattttgcaatcatctttatatattacggtgctctgaattaaaagctaaaagttactgggtatgtctgacaccttagtgctttatctttgttctactaattttctgtgccccaatcccacttaaccctagcctcattccttatctgtaagataggggataataccactgtaaggttattattaagattgaataaggataaaatttataatgggttttagcaaatggcagaaaatattttctgaagaaaaccaagtgctattaaaaaaacatcacaagccttgggcttactttgggattttaaaaaccaagagaaaatggatggctgaactttcaaacatttggtaaatattatagtattgtagttcagagctctggattctttgcattttgcctgctgggtgagaaggaataaaagtttgtgcctttttttttttttaatcactttaatttcaaaacaatgtgtttaaccatttgtgggagtaattttcattttgtgagcctgaagcattttgattcagtgggaatttctggtgatttatatctggaatagaagtgagcttaagtttagctattctaacgttgaaaaaggaagcaatgtttctattggattctaaagtatattttcaaaaatattctgaagtatttgtatatcttaaacttggagttaagacagcttagctttgaagataagagaaactagatgtgtgcattttctatccagatgtgtttgttgctggaactaaatgaaacagtacatggtaacccttgaaaggttttaaacttgtttctgtaactgctaatctacatactctcaagtcactaaccttcctctttgatctctttgtaggctgaccaactgactgaagagcagattgcaggtgagaaatactcagctagattgtacccattagattcttattataaattgaatagccaacgtcagaataagagacttgtatgaaataattgactttggtatatgtcatggatactaacatatgggtataatataatacagtaattcaacctgctttggcaagtgggattgtaaacttgccgatggaagatgtgcagggctaattgtagttaaagacatgtattttagtctgcgtggatatactttggagccttgtggtgtagtggtggtctttgttttgttttctgaagactaccttagtataaaacaggaattctgggctagctaacacgctagaaaaggaggccaagaagtaactaaggcaacttgaaatggagaatcaaaaaaggaacaattgaatttaccctagttaaaattagctaacattttaacctaagaattgcatatataatcagtcagggaataaccatttctcaagtgaaaaaatttaagaagttggcattctattctataaatgtcactgtagcaatgtggatttttctcttaaaaaacagtgacagctgttgaaatgaagccgcttaaatcttgtcccttttagtttgctatggaagtatgcaaaattattacataaaacctgatgtcatgttctctttatgccatgccatagaacattaatacttttgatttatccttgtacattgagatggctggttaatgtcaatgttggggaaacttttttttccccccttgccggagttgtttttttttttttattgtagtgttgaaatgctttgcaaactattcctttgttttcattagacacttttattagcatgagcaccaagcagtttatttgccacagttttcacagtaagcaggaagggtttgataagagctcaaaagcacttgagcactttttcttaggctggagaaaactgagaagcccagttggaactatatagcccatttaaagcaagctccccacttccataagcatatagaagtttgggggataccagaattacactagtcacctcaaatactatttgataggactgtaggtagaaagctattagtattaaagacaaatttaagcaggttttatttttatttattgtgtaatttgacttaaacttagtttttactttctgaggttggtaaattacatgtattgactgttatgaacaaaaagcaaacagttttgggaataattttttttttgttgagttacactgttttaaaggtatcacctatttgatctcatgtctcctcaaaaaaaatagactgggcctgatggctggtaatcttatcactttgggaggctgaggcagcaggatcacttgagcccaggagtttgagaccagcctgggcaacatagtgagaccccatctctacaaagtaaatgtatcgtcaaaatgtttttctgaagtagttttttttataaatatactgtctccttcccaaattgtctcaggctgtctaatactttcactcttaaactctgaccttctgtaatacatttcttaatattcccagtcaggtacaggtaccaactgtatgcagtacagcatgttcactttagggtagaaaacgttactcaatgtgccattgcatagttgatggtctgctctcttaaacaactctttgaaaagaaagtttgttggccgggcgcagtggctcacgcctgtaattccagcactttgggaggccgaggcggatcacttgaggtcaggagttcatgaccagcctggccaacgtggtgaaaccccatctctcctaaaaatacaaaaattagccaggcatggtggcgtgcacctgtaatcccagccactcaggaggctgatgcaggagaatcacttgaacctgggaggcagaggttgcagtgaggcaagatcatgccactgcactccagcctgggcaacagagcgagactttgtctcaaaaaaaaaaagtttgtgtctattgaatataagaggatccctcttcagtgattgatagcatttttattttttaatttattttgagacagtttcactcttgttgcccaggctggagtgcagtggctcaacttctgtctcccgggttcaagctgttctgcttcagtctcccgagtagctgggattagaggcatgcaccacctggctatttttgtatttttagtagagatggggtttctccatgttggtcaggctggtctcaaactcgcaacctcaggtgatccacccgcctcagcctcctaaagtgctgggattacaggtgtgaatcaccatgcctggcctggtagaattcttataaagaatacttgtagttcatcaaaactgtgacattcaggacctgttctctttattgtctttaagttaaatcctatcttttcttggctttcatcataaaattaggtttccaatgggagtagagggaaaaaaatctgttcttaggttctcttcttatcctgccttttcctagaccacagatttctttaaagccattccttggacctccaggtttcagttaagatttagggcagaggaaccaaaacttctatgctactaaaataaaaatcatgtgcggtcagggacctttttgttctactttgtaggcccggtacctgccacatagtaatcattgaatattccttgaataaattttattctcaatgagtgtgtaacacaaaaaagttctagagcactactatcctaagatttctgcctactctccaagtcccttcctcccaaatttggtatatttcagtgtttacctttgagatgaaggcaattttttaatctggtaaattgtaattgttggtggctgggcatggtggcgcatgtctaatcccaacactttgggaggctgaggcagtgggattgcttgagcccaggagttcaagaccagtctgggcaacacagcaagaccctgtctcaaagaaaagaaaaaaaaatttttttttttttttttttagttgtaagtgctggtgaccgctaacatccttgtggagaggaagtagccaaatttttttttttttttttttttttttttttttttttgagacggagcttcactctcttgcccaggctggagtgcagtagcatgatcttggctcactgcaacctttgctgtccaacttcaagcaattctcctggctcagtctcccaagtagctgggattacaggcgtgcaccaccacacccggctagtttttgtatttttaggagagatggggtttcaccatgttggccaggctggtcttgaactgctgacgtcaggtgatccgcttaccttgacctcccaaagtgttgggattacaggcatgagccactgctcccggcctaaaattttttatattacttggtcgtataaagcattccagtctagtatgacatcactaacaatttcattttgttgataactctgccatgatgtcattagttgttgctgtttgacttttggaagactgataggaaaaatgtacagtattttttccttaagaagtctgtacctaaactttcattaaattttcaaggtccaaatttgtttgagaaaaatattaatattactcaatgtatagcaacaactgcatgaagcgccaaaagagttccagtacatgatctttaagggattattaagttcagaattttgtgaagaaatagaagttaataaacagtcatttgatttgttttgtaattgtcttgtgataacctattttaataaaatttttaaaacatgttattttaataaaattatatgtttaggtaataaactaattagggaagggccttggggttgctaatgaacaaataaaacttgagtaatagatttttctgaaagtttcagtttggtcagctaaaatggattttggtaggttccttatatctatcaattatgtagaagatagctgttctgtggcattcaggacctgttctctttattgtgtgtttaggttttgactcttggatttaatttcaggtcattcctgggagttacagtttagaattatatgcttctatacataaagattacgctagttctgaagtacaggaaaactgtaaaggcaggtgaattaaaattttactttggggtttattattttgagtttttacaggtattttttactctttagtataaaaatacaagtaaaaatttggaataaaccttgacctttaaaagaaatgttatttgttcctttcttgaatgaataacaaatggtattagcatagatacggttttattttctgcattttacttattctagcaaacattttaagtgttattagatttttaaatttctcgaaagttatacatagtcttacactatgcatcttccagtatttagctttttgttaaatcatgtaatagaaaggtgattactgctaattaaacattgggaatttatgcacctaatggtggtgttaaaagatacccatagcagagaatgtaatataaacaaatacctcaaagtcctttaattttcttgtaacctaaattaggtgaaaggtgcaatgtgtctgaactccaatatatgtatttctagatatttctacattctgtttaaaaacagtaaaattgaaatgtctttatcaattgtgctatttgtaggtggagactccctgatctatttttgtcattaggttgatctaggttagcactgtatactatcttcataaaatcaattagtgtggtatgaaccttctgattggtattagatgagttcctctataaaccagtaatatttaaataagaaagaatgcagttaggaggcaattgtaatagccctggcaaaggacgatggagccttgaaccaaaatactggttgtagagatggaggaaaaatcaggcagtatttaaatgatagaattcgagacctgttgacagatttcagactgaaagagttaaaagtggctcttgggcttttgctagtacctttagggttgcctgggagtatagaattcattttcatatgttttgcttgtcatcagccaggggagctatatcctgtagacagccagaaataaagacatttattgagcgagatgggtagactaaagatatcttcgttgtaagtgggtatagatgaagtggccaaggagtggaaaaaaaggataaaattggtcacatctagacataagagacaggagtaagagcctttggcagtatatggtaggaggaaaatcaaagtactgttacgaaggccaagaaaaattttgagagtttttccatgcagttttggatgctgcaaaaaaatgagatagtctttatcttgacatttattaagtatgtatttgttggacatagttctaagtgtttgacacatactaatttttttatggggggtgaccaggtgaataccccttgtgggcatggtatactgtgtcaccccacttactgggcacatttatgtcatttcacagaaatgaggaagctgaggcagaaaaggtttagtagcttgtccatattgcattgccagaagaagaaacagagctaggaaattctaacccagtagtcaagttacaaagtctcattttagtttctatgccatatggcttcacattgaagcatgcttgatggattgggtgactgactagtagtcattggtaaactcagcattttcaggtgatgagttggagctggatgtcattttaaaatagtggattgtttggagagaggaaattggtatgagtagtagtgccttccaaaatttggggagggataagggcaagcatttaaaatataactaaggtttcaatttagttttaggctaagcgatgtgaagatatttatgtggtaatgggcaaattagtggaagaatagttgagtccagggaagaggtaatatggaatgaaactggaaggtgtacgcgaattggagttagggataagcaggcagggaataaattggccttggaccgtaaagaaggtacaccatttcttacacatgtgtcacataaattttcaaatgtatggctatgttgggaaagcttaatggcccaatgaacttggaaactttttgtattcatttgctgatagggtctaatattttctgggaaatgacttacttggaaaatactagctttattatttactgattggtataactttgcagtatcaaagttagtctgttttagtttctttctttctttttttttttttgagacaagtctcactctgttgcccaagctggagtgcagtggtgtgatctcggctcactgcaacctccgcctctcgggttcaagcagttctgctgctgcagcctccccagtagctgggactacaggcgcacgccgccacacccagcttgtgtgtgtgtttgtgttttaatagagatgggggactacaggcccacgctgccacacccagcgtgtgtgtgtgtgtgtgttttagtagagacgggggactacaggcacacgccgccacacccagcttgtgtgtgtgtgtgttttagtagagacggggtcttttctttttcttttttttttttttttttgagacggagtctcgctctgtcgcccaggctggagtgcagtggcgcaatatcagctcactgcaagctctgcctcccaggttcacgccattctcctgcctcagcctcccgagtagctgggactataggcgcccgccaccacgcccggctaatttttttgtatttttagtagagatggggtttcaccgtgttagccaggatggtctcgatctcctgacctcatgatccacccgcctcagcctcccaaagtgctgggattacaggcttgagccaccgcgcccggcctgagacggggtttcaccctgttgttcaggctggtctggaactcaccctgagctcaggcagtctgcccaccttggcctcccaaagtgctaggattacaggtgtgagccactgcacctggcttgttttagtttatctgtaaatggtgaatgaagccaggtagtctggagtgttgcaccagcaggaggtttccatgtaatctagtgatgtattagaaggaacatatagccgggcacagtggctcatgccctgtaatcccagcactttgggaggcagagacaggcggatcacctgaggttgggagttcgaggccagcctgaccaacgtggagaaaccccatctctactaaaaatagaaaattagctgggcgtggtggtgcatgcctgtaattccagctactcgggaggctgaggcaggagaattgcttgatcctgggaggaggaggttgcggtgggctgagattgcaccattgcactccagcctggacaacaagagcgaaagtccatctcaaaaaaaaaaacaacagcaggaaggaacatactatcacaacaagatgttgaggaataatcagtttcactatataaggttggggttttaatattccaaagaaagctcaaaatgatctttgttctcagtgacatgcatttagctaaaactggacatttatatcttgatcagcccattgttatagactctttatatagtcccttctcctgccttactagaaagggaaagtagcctgttttaatttagtaggtgattgatttagacatagtggctaactctaaacacagtatacagaaacagtttaattactctgtagaaatacgtatttgggtaccagtagtcttatttttgttttgtgagtgtaggttaggtctgtaattttgaattatgttccacagagcagcttcagtgacagaggagccagtcatttggggatttggttcttttcctctgtaaacctaggataattttacttaggtcagcatgaaagtacagtggtatgattggtcaaagatatatttgaaatattatcataaggtatcataaagattggttaatctttaggagtcaaagtcacatttcaattgctacctccattggtatttttccgttaaaagtttttgggtttttctgagacgtggggtcttacagtttggccaggctgaagtgcagtggctgttcactggcacgatcccaccactgagtaggctttaagagttaatacgtttcatttaggttacattttattattaatctgtgtatttggattgtggtctttctttcaaacagaattcaaagaagctttttcactatttgacaaagatggtgatggaactataacaacaaaggaattgggaactgtaatgagatctcttgggcagaatcccacagaagcagagttacaggacatgattaatgaagtagatgctgatggtaagtcttcaattttgtggggctgggaggggttgaagaagtgatacttagatgtttccactaaacctttgctgtttgcttatatgtttccactaaagctttgatgtttccactaaaccatttcaggtaatggcacaattgacttccctgaatttctgacaatgatggcaagaaaaatgaaagacacagacagtgaagaagaaattagagaagcattccgtgtgtttgataaggtacgtcaaggactggatatgttaaattttgaggatgaaatgaagataccaggactcattatgaagacttgtgtttttttggttttttttttttttttttttttttttttttttttgatgatttaccaacatattttaattaccaagcaaaagctttttaagaattcagtatagactttctaatatatgtattgcgttcatcttgtcaaaggaggtgtcacttgactttgggactaggaaataatgatttcaatgtaggacattttgcttggctcttaatgacatttgtaggtcaactgtgtagatttgtatgcatttctaaagtatgtttttcccccaatgtgaaatttagtagtaaacttaataaatttccattccaactctcaagtctgtaatttgactcagaaactatactaaattttttgctaggatggcaatggctatattagtgctgcagaacttcgccatgtgatgacaaaccttggagagaagttaacagatgaagaagttgatgaaatgatcagggaagcagatattgatggtgatggtcaagtaaactatgaaggtaaatgtttcagtctcacgcctcattcttcactttgatttttaagataagaggctctttgttagggaactgatcgaaattagtgacccttccccccaaattaggttgctaaaacagttacttacatttaaccttcttaaaattcagagtgttgtctgcagactaggtaacattgctctgacttgagaacttaatttagaaatatttactatcaggttctatccctacacctggaatcagcattttaataggattcttgggtgattcatgtataaagtttgagaagcactgttcagtgtttgtgtgattgtggaacaatgtggaaagcaaacttattccaagtttcctaaaatgaaattaatgtgactttctttccccgcactgtattgtcttttttctttaattggctttagtctgaaactgaagtttacatgtgcttcaaaagtatcgtatctactaacttttaagatggccatatcaggaagcaaggcatatgaaactgaaggattttgagtaaaactctgtatttttttcatgatgtaactacttaacttagaaaagagcataaaatgtaatgttataaaaattaaacctagcccatagcattgaatttacaatattgtcttgtaatccagcagacttaaaattcaagtctaaactaagagccaagaatgctcttttttatattggcctatctaaagcgttaatttggctcttactaataaacctgaatagttatggttaatgaagttccagcctgggcaataaactagcttccctctgtacttaatggtaattctgaggaaagagaggaatggaaagagtactcagtaattgagtaaatgtgatttttttttttttttttttttggtcttttgctattgactcattttttgtgtacttcttctttttcagagtttgtacaaatgatgacagcaaagtgaagaccttgtacagaatgtgttaaatttcttgtacaaaattgtttatttgccttttctttgtttgtaacttatctgtaaaaggtttctccctactgtcaaaaaaatatgcatgtatagtaattaggacttcattcctccatgttttcttcccttatcttactgtcattgtcctaaaaccttattttagaaaattgatcaagtaacatgttgcatgtggcttactctggatatatctaagcccttctgcacatctaaacttagatggagttggtcaaatgagggaacatctgggttatgccttttttaaagtagttttctttaggaactgtcagcatgttgttgttgaagtgtggagttgtaactctgcgtggactatggacagtcaacaatatgtacttaaaagttgcactattgcaaaacgggtgtattatccaggtactcgtacactatttttttgtactgctggtcctgtaccagaaacattttcttttattgttacttgctttttaaactttgtttagccacttaaaatctgcttatggcacaatttgcctcaaaatccattccaagttgtatatttgttttccaataaaaaaattacaatttacccaatggttgctctgcatctgagtcatttaactgttgaagtctaataattttgaaaataaaatatggcattggtttctgcttggtatagtctagataattttttctcgtgtggggaagcatatggagatgggtggcagaaatagtgaaggtgggaaaggaaggagaaaaggattggaaaagtgagaaaagagggagagaagcacagaaaataagaggaacaaaataaggggtgtaactaaggagagattgaagaggaaggccgaaaagatggggatctatgggggctggcttagtgtagtcaccttttgggggccaccatcatgcgtgcccacaacattcctccaccaccatgtgtgtcgtactgtgctactgtgttagatccaggatacctgtgagttgcctctgcccacagaacaagatggtggcagtcatgggaaaagaggggcaagttttttgttttgtttctttatccagattgtatttgacaacttcaaaaggccccaatgaaagactcaaaaacttaagtgtacctagtatgggaattggcataaagtaggtatttactgtttcctacctttatagttttcaactttggcatttgtccatgttgacttaagctgtgcagtgatgttttaaatgtttgcatgttcaaaaaaaaaccaaatctagttggggtgagcatccttatagttttacttctattaactaatattttattcattgtgctttttaattctataagatgagaattttcagcttgcccatctgcaacattttgcaaaaaaagatgtctttaggagtaaattggcaatgactacaccttgttttagtttttgctggcttctatcattgctttctctataatttgagctactccaaaggtggttatcagggtttttatttttttaaagtaccttttaaatgcttaatgaaagattccatagcaaaccagagccaagattaaaacattgagtgtaattgttacctggttattatagctacaaggtctttaatttcccaggggtaattcattatttggcaggttactgccccattgactatcttaatactactattagtatgttttagagcaagggaagttacaggcattgatagttctaatggtatcacatactcgggtaatcagttaaataggaagattttagatgtgcactctactccccttaattggatgtagtaaattttgtcgaaaggaaatccaaacaaggtttgttttttgtaaagacagggactcatgttgcccaggttggtcttgaactcctgggctcaagtgatcccctcacctcatcctcccaaagtgttgggattatgagtggggcttttttaaaagttaagtgaaataatgaaagtaaggcccttaacattgtccttggcatttgcattaagtgttccattaattgtgctattaaaccagttatgaccctgaaaaatgagggacttgggcagtcaatttgtgtttttccagcgtcaacaatgaggtttatataaattgatatcaaggtataattaacaaggacaacaaaggtaggagaaacattttttgggctcttctatgtcataattggtcatttctattgttgaaatctttacaaaagtcacgaagtcttggcattttgattttacaggaaacgagtagaatgattgtataatttaactgtggtcataatgagctgggttcaaatctgttccaatgcttcctacaacataatcctattggaacccaggactgtgatatcaccttcaagttgtgtttttgtttttgtttttgttttttttagatggactctagcactgttgtctgggctggagtgcagtggcgcaatctcggctcactgcagcttctgcctcccaggttcaagcaattctgcgtcagcctcccgagtagctgggattacaggcgcccgccaccacgcccagttaattttttgtatttttagaagagacagggttttactatgttggccaggctggtctcaaactcctgaccttgtgatccgcccacctcggcctcccaaagtactgagattacaggtgtgagccacctcgcccagccccaccttcaagtcttaaccatactattagtgttatattaataggattttggtaattgtaccaaccataatactgtctggcatgtttgctctcagatgattctcccaataaacaactattgcagttaaatatcacccttggtgtaacgtattttcctaaaatttttagaagacggcaacaattttaaagatctgatatgtaacagaggcactgttgagctcaattatagatatgtattctcaagagaaatgcctctccccctttttgaaacttacaataatctggaaataaatctcagtgatactatataagataatgttttcttaaaggaacactatgtttatcctacgtgcttaatctgctttgtggatagtccttgaaatcattgacccatgctgtttctatttttgagatacttaaactattttctcatctagatgttcccatctctaatgtcacaccttgtatgggtttctggacttctctgtacctttcatattcttttagtctcgagggtaccagtccctagtctgctgagccagttttacaggctcagccaaaataagaaaatgaaatgaggcacagggaatggacttgattaatctcttaacatttgtgagaactttggtattgcctcttcactttctaatttcagttgttcattttaaacctagtgcctgttttttttttcaaggctatgttaaatgaatttagaatcccagtattttaagaaactagatgaagtcctctagtctcttgctcctcaaaaagtcacctacagaatcacccaggagcttgttggaaatgcagaatcttaggtcctgccccagaattggaatcaatctgtttttttaacaagatcatcagatattttgtatgcatatcaatttttgaaaagcactgctgtaatctagtcttggatttacttagaggggaaaactagtcagtggtttattcaacaaatattttagtccttgtgttcaaaggggtcaattaaaaaccgtgttttgggtgtttaaaattagaggagaaacgatttgtcataaaatgaatcttccaacaatgataggcacagggtcctttgggacttagtggattaggcttagaggtctactcagaggagctgacccttgagattttccaggtggtcaaagaaaagaatagcatttcatgcagaagagctagcatatgtggagacaaatagaaatgtgaagatggcatgtttggggtttttgcaagcatgatacagcagagcatgccatcctaataagagaagtggccgggtgtggtggctcaacctgtaatcccaacactttgggggaccgaggtgggtggatcatgaggtcaggagttcgagaccagcctgacaaatatggtgaaaccccgtctctactaaaaatacaaaaattagctggcatggtggcgggcggccgaggttgtagtgagatcgcgccactgcactccagcctgggcaacagagtgagacttcgtttcaaaaaaaaagagagaagcgagagactggattgtaaatgttgcttttgtcctaaaggtaatgacagctcacatttactgactgcactgtgccagacatggttgtgaacagttcgagttaatcttttttataacctatgtggataggtaccaattttattatccccttctctatagacaaggaaataagcacagaataagtcattatatgcaaccagcgtccaagtcctggtagtcaagggaggagagtgattcaagaatgagggaataatcaatgcagcaatgaaaattgaaggccaagtttcataagagctgaaaatccccactggatttggcacttggatccctggtgagttcaggtgcaattttaattaaaagctgtgtgcaggccagattaagatgttttaaggaaagtatgggaagtgagaaaagagtccatattactcttgaaagtttgtaaagggaagcagaaacttcatggtatagggcagtggagctctagagtcaggtctggattttaattctggttctgccatttgtgtgtgatgctgagtgaactgtgctaaacgtccaaggaaacctttgtttcctcatccagaaaatgaaactaatacctactttgtagggttggtatgaagattaaatgagactaatgtgtgtgaagtccctggaatacagtaggtactgtataaaatgaaattaaggttgtggagggtttgtttttaaaggtgagaatgttcctaggttaagaagaagctacagcctagagaggctgacaataaaaagggtctatactgagaagaatggggtggtctgtggtttcacagctagtgaaaccggctgtgtctggtgctcactccactctgcaagtcagaagcaagagaagtcagccccagagtttctatttggaggagcttagaaacaatcttagaaagtgggtgctaaggcagatttctcttaagtatgcctaccaagcacactgcctccctgtctggggtgtgcgattggtggtggattggaagggaactaatggagattgtgggtacgctcaagcccttaacaagcctcccttttcgcagatccttacccgagggctctctagcaactccagagccctctagattttcttctcacaagctttcataaccgtctcttttcgagggttttcctctgcgcagttcttcgcgcgggacctcaaagtgcgtgcccgcttcccttccctgcagcactaaagacaaacctggcgggtcccccggagcggtcccaggcgcgcgcgctcgggagcccacgggccacacccgcctcctagcaaccggagctcaggttcagcctagagagagaggaggccaccatggaccagccagccgtcgccaccgcttccacctcaataagggaagacctggtgggtggagaatcattcatcacagcttcggtaagatggcctgccccttgccggcctggctcctgctcccctcaccaggcccactacccttttcccaccgctctctaatcccaggccttcgtgcccctctcgttccctcttcctacccttctctccctgccctcacgcacgtctccacctgcggaccttccttcctggtctttattggacatttcctttgttttatttcttttccccttgcttcttcccttttccttctccttcgccctttgttttctgtatttttcccttcttcccactactaattaaactggacaactgctttaatatggtgattggatttctttccctttccgctccatctgccggaagactgggtttttccttctgtagttttactagacacgttttgctccgcctcctactttaatatttataaaaatatttgaagctacttttgctacgtttttcttttagagtctcgctctgtcacccaggcaggagtgcagcggtgtgatctcggctcactgcaacctccgcctcccgggttcaagggattctcctgcctcagcctcccgcgtagctgggattacaggcatgcaccgccatggctggcctttgttacattttaaaataaatgtgggtgagggttgtttaacctaatcttttatctttccccttagagtgaatttaaagtggtagatagatggaatttagatcacctgtcttgggcaaaacaaaacagcagctgccaattgtcttccattagattgatcgcgtttacttctctctccttcccatctcattttccttattctggggtaggggtgggaggcctgtcttgacctgcctgagaaagttgtatttctgtgactataaaagtgcaacagagaagattcaacataaatctcgcgaagaagtatcaaagaagaagctcagctttagcagtgtcatgagaaaatgttttttaaagaaattaacatatttcataataaaataaagcccagtggtactcataagtacagtagatttaagttactagacaggaagaatgaattatatcagttttactgattattacttttaatgcagtcttgcttgatgacctatattttatagtaataaaggcattataaatgaaaggagaactcaacattttaatgattttatctaggacaaacagcaatatactaaacggttgtgttctgtggacaatgggctgaaataaatatgaaataataacggatgaatgggtatagagtactaaatatgaagacaaaagcttccttggaaactgaggaataccaaaataatcagcttcttaacttggcaaatgggatgttaaaaattaaagctaccatttattaagcactgattgtatatgcaagtctttataagtacaatgccttagtcttttttttccccctgaggtggcttcttgctttgtcgcccaggctggagttgcagtgatgtgatctcggcccactgcaacctctgcctacggagttcaagtgattctcgtgcctcagcctcatgagtagggattacagccttctgaggagggattacaggcatgtgccaccatgcccagctaatgtttttgtatttttagtacagatagggtttcaacatgttggccaggctggtcttaaactcctggcctcaagagatccacccaacttggcctcccaaagtgctgagattacaggcgtgagccaccacatctggcatacaatgctttattctcatgccaactctggtagtgccttatttttatactactgtgaggaagcacgagggttgggtaactcacccagtgcacctagctggtaagtggcagagctgagttccagcctaagtcggtctggcttcaagcctaactcttttcttcctaaggacaccacattttgtcacatttaagatacttacaacatctctgtgagatgggggtgtttattactctaattttatcaaagggaatttagttatttgaaaggacttaagaccataaaataacaatttaaggaaatatgggcaaatttattattatgtagcttttattttaatgaagacatatcagttgggtatgggtgtgaatttcttcaagcaaatgttttataaattatatttaatttcgagggatcacctctcaaatgaataagcatactttgtgtttgttaacagaaaccagcccaaaagacttcctcttttgaaagagaaggatggtggagaatagcattaacagtatgtacattgttcagtctttcctattcacattattcctattccattaatattttaatcaattatagcttttaagactaacactaaattgtaagaaaacagtgattgttcagatctgcatggacctcatgtcatacttaaaattttagtgtcagcatatgaataagaaactaacttttaattttgaatgcaatagaagcttgggaaagttaaacaattctagaaatctaggtgctttacagaatatctagataaggctaacctatgctcttatgatctgggtgagattgcaaaacaaaaaaagcatacattctggaaaggtgttttggtttcagtttttatcttatatggtaaagaccttctgcaaatggttcttaatatggtcaatatatgaaagcaaaatggtaatatatggaagaaaaatgaccagaagatccccctcaccagagagtttctatattacagacatattttctgtcaatgcccttcaataatagagggacttcatgggtcaaagccttcttggaattgcagtaattttaaaggcagaactgagctgagtgctcagtggaaagatggccacaaaagcagcagtgactaaacgttcaattctggccattcagccacactggttgtaatttgaaagtaccaaacctcttattggactaactaggccatatgctctgccagtttatcctggtgtcatgtcattatccttcagcttcccacttgagggctagagagaaacatagtattggctaagcagatgtaggatagcttctagttagccaagagactatcctgagtggtctcactagaggtctgaaattcatagtcaagcttgaatcccaaagttgaatcaccgaagttgccttttaaaaacttaaatttcggccgggcctggtggctcacgcctgtaatcccagcactttgggatgccaaggcgggcggatcacaaggtcaggagatctagaccatcctggctaacacagtgaaaccctgtctctactaaaaatacaaaaaaaaaaaaacaaaacaaaacaaaaaactagccgggcgtagtggctgatgcctgtagtcccagctacttgggaggctgaggcaggagaatggcatgaacctgggaggcggagcttgcagtgagcctagattgtgccactgcactccagcctgggtgacagagtgggactctgtctcaaaaaaaaaaaaaagttaaatttcaactctaacccgtttgctataattcagcaattatttcagaaaggaaataatcatgattttgaaatactcttctgtcaagagtgtttactgtatttgatataatttcattaaacttgaaaacaaagagagatgttacttgggagcttcccatccaagaatggtgttttaggagaagttacatgtttacacaatcttaaaactgatgtcaattttccacaggatactcctatacctggcacttaccacttgaaaacttttattgaagaatccctattaaatccagtgatagcaacctacaattttaaaaacgaaggaaggaaaaagccacctcttgtgcaaagaaacaatccagtcctaaatgatcttccgcagtatatgcctcctgacttcctggacctgttaaagaagcaagtggctacttactcattcaaagacaaaccacggccaagccccagcacactagttgacaaagatcaggtaaagcgctactggcagattgctttgtgtgggaaagctactaagagcccctgaggaaagtatttttatacgtagagtatatcttcccccaggagaaatggaaaacctttaagatgtcttatttcccgtagaaatcaaacaaggactgcctgatttgcaaatgtttccagtaagatttttccctataacatcttcttaacctaaggggagtacatggggagaaatgttttcctcttgggcaactcttggtgggattcccctagcctggagagcacctgggatcttatctgtcattgggctatgctcttatctcttcaagcagtatatgtggtgaaccctcttcttttaaagagaaaaccctgcctctcggggagtatccttattagagcataaatataactacataccacagggaagcttttaaaaacttttcttatagaaatgacccatctctacaaaaaataaagaaaaatagccgggtgtagtagtgcatgcctgtggtcccaactactctggaagctgaggtgggaggatcacttgaggccaggtgttgtagatcagcccgggcaatataacaagccctcaactctttaaaaaaaaaaaaaaatagctacttgggaagccagggcaggaggatcccttgagcctgggagtttgaggctgcagtgagctatgattatatgactgtaccccagcctgggtgacagagtgacatgctgtctctaaaaatattttttttaattaaaaaaaaaaagaaaagaagtgagcatgtggtcccaggagggtcagcttctactctcagctccaccagttcatttgtagcattgataata

SEQ ID NO: 1556 - DNA, 1128 bp, Homo sapiens
agtccgagtggagagagcgagctgagtggttgtgtggtcgcgtctcggaaaccggtagcgcttgcagcatggctgaccaactgactgaagagcagattgcagaattcaaagaagctttttcactatttgacaaagatggtgatggaactataacaacaaaggaattgggaactgtaatgagatctcttgggcagaatcccacagaagcagagttacaggacatgattaatgaagtagatgctgatggtaatggcacaattgacttccctgaatttctgacaatgatggcaagaaaaatgaaagacacagacagtgaagaagaaattagagaagcattccgtgtgtttgataaggatggcaatggctatattagtgctgcagaacttcgccatgtgatgacaaaccttggagagaagttaacagatgaagaagttgatgaaatgatcagggaagcagatattgatggtgatggtcaagtaaactatgaagagtttgtacaaatgatgacagcaaagtgaagaccttgtacagaatgtgttaaatttcttgtacaaaattgtttatttgccttttctttgtttgtaacttatctgtaaaaggtttctccctactgtcaaaaaaatatgcatgtatagtaattaggacttcattcctccatgttttcttcccttatcttactgtcattgtcctaaaaccttattttagaaaattgatcaagtaacatgttgcatgtggcttactctggatatatctaagcccttctgcacatctaaacttagatggagttggtcaaatgagggaacatctgggttatgccttttttaaagtagttttctttaggaactgtcagcatgttgttgttgaagtgtggagttgtaactctgcgtggactatggacagtcaacaatatgtacttaaaagttgcactattgcaaaacgggtgtattatccaggtactcgtacactatttttttgtactgctggtcctgtaccagaaacattttcttttattgttacttgctttttaaactttgtttagccacttaaaatctgcttatggcacaatttgcctcaaaatccattccaagttgtatatttgttttccaataaaaaaattacaatttaccc

SEQ ID NO: 1557 - DNA, 450 bp, Homo sapiens
atggctgaccaactgactgaagagcagattgcagaattcaaagaagctttttcactatttgacaaagatggtgatggaactataacaacaaaggaattgggaactgtaatgagatctcttgggcagaatcccacagaagcagagttacaggacatgattaatgaagtagatgctgatggtaatggcacaattgacttccctgaatttctgacaatgatggcaagaaaaatgaaagacacagacagtgaagaagaaattagagaagcattccgtgtgtttgataaggatggcaatggctatattagtgctgcagaacttcgccatgtgatgacaaaccttggagagaagttaacagatgaagaagttgatgaaatgatcagggaagcagatattgatggtgatggtcaagtaaactatgaagagtttgtacaaatgatgacagcaaagtga

SEQ ID NO: 1558 - DNA, 38643 bp, Mus musculus
  misc_feature (7298)..(7589): n = a, g, c, or t.
  misc_feature (12267)..(12307): "n = a, g, c, or t.
  misc_feature (21481)..(23275): n = a, g, c, or t.
  misc_feature (24717)..(25512): n = a, g, c, or t.
  misc_feature (30600)..(30619): n = a, g, c, or t.
  misc_feature (32433)..(36269): n = a, g, c, or t.
tcctaatgatgggaggagcagctataggctgggaacacagctccaggaggctggagtggatgcagcaggaagaggggaggtggtccagcagtcattgccatggtgtggccctaacaagggacagcttttccctgaagacccagggtggaacccctgaagataccaaaacagcctcagtcccccagggggtgctgttggggctggaaggtcagcctcctggccctcttttgcttgccttccctttgtctccatcctctctgtctctgtctgtctgtctctctgtctctgtctctctgcctctctgtctctgtctctgtctgtctgtctctctctgtctctgtctctctctctctcccctacacacttgtggaccctgtttgaacactaacgatttctatatcagtgtgacttgtgacttgctctaaacatgctgtcttgcatctcagtccatagcaggaaagggcagctctataaacacagcaacggtggcaggaaacgtccttgatctcacagccaggcaagaggtgtcctcacggagcacaaaccttcccagtgctcctcagtgctcctcacccagaagccatggctcctctctcttgactctggagtgagtacagttaaatacagagcaaaggctgcacctgggaaactggaggactgtcggggatctactgtttacggctgttttcctgccatgacgacagaacagcagccgcaaagccccaagtgtttactatgtagccttttctgaaaatggctgccagccctatgctgtcattgggcagagagcgctgtggtgatactctgttccacactgacagtctggatggagcagggtgacaggctggagttcactgtaggtgggaggagaggagggagatgggagatggagggtgtgctatgttcccttagcaaatacgagagtagccccggcttcccttcccagggcactggtcagcatatggtactctgtcccatgcagcattgaggcaggttggtgatgtactttaagtgtggtttgtcacccaaggatccctgtgttggaacataagaggaggtggcagaacatttttgaggcgatccagtgtggggcctctgaaattagccactagcagcctctcaacatgtaatgagtttatacaggacctgggtatatagatgcataagcaggcacacaaatcaaatattttctgacaatcaaattttattttaaaacaagtctttgatatatatatatataattttaatttattaaaaactaaactattattaaatattaaattaacatatcagtgctactcaggaaattcttgttatttttaataagtaattaaatcttggttaaatagatagtcctgcaggacatcgaaagtcttcaatggtttttcgagttgatattttgaattataaccatcaacagctttttttaaaaatggggacatttttttgtatgtgatttccacagtgtgctcagaaccatttcaaaaactagttggagactctgtgctaactcctggctaaaattcatcaaatgatactttagaacaacaaaacttgaggcagcaacttttaacagtcaaacattctaacacaggacctgggtatatagatgcataaacaggtataccaatcaaatatttactgacaataaattttattttcaaacagttctttgatgtgtgtgtgtgtgtgtgtgtgtgtgtgtaattttaaattcaccaaggactaaactaatgcagagataccccagtctgatgcttatgtattgagaaatgatggaaagaaatgttacagttctgttatgtttccatgagagaagaaaaccgcttatgcatctcatagtgtatcatcgcctggagtccaagtccacgtgtttcaggcaatgctcgctcgtcagcatggtgaaatgtgatgtcacaaccttggcaaagtgcacatgcgttcagaactgctgcttcagtgatgtcacacgataaaattgccagaaacaccagggccattacgcttttgatttcgaggtaatttttggttgagtgtgggtcagaaactttttaatgaggatattgtttgtgtgtggtttccacagttatgtgaccgcatgcagagggtggggtattcacatagtgttgtggcccacagtttaagagttaggttctagccaggcggtggtggcgcacgcctttaatcccagcacttgggaggcagaggcaggcggatttctgagttcgaggccagcctagtctacacagtgagttccaggatagccagggctatacagagaaagaagaagatgctaggttctagtgggtgatccttatttctctgagggccccaccctaggaaggaattaagatggttctaatgggacccaccccaagatggctttcaggtgttcttttaagtggatcctgatccctaagtccagctcttgcttcctgtctctccgtgtgagcatcttgtcacatgtaccctgtgacatcctccgctggtgtgatgcagccagggagtgcctcaatagagccagcataatgctatttggattttcagcttcccaaaccataagttaaaaaaaagctacgtttctttaccaactcaccagtctctggtatttcattccagtagggggataacagactaactcaactgggaaatattactgttgcagaacccatataagctactcaaatcagtgcattccttgctaccctccccaatgttctgggttctcaaatgaaagacacatacacacacagggcgccttaaaatataatatgtcttaaacaatggttgggccacttttctaacctccaagtggctgatggacttttttgacaatctcaactcatcccttactaaaacctattccatcttggctgccccagaccctgacctgcagccctcctaggccacttttgcatggtggctatgctctctcttctgcactgcttaggcctagtgtctccttcttccttcccagcatggcagctatccttcctcctccctcggttccttgtccaggaattctaaaagtccccctctgtcttcctgcccagccattggctgcctgctactttagttaccaatcaaaaccaaatgggggcagggatcctcagcatcttaacgtgtggacaagtggcttctcctacaattttgaggacccaattcacataatacgagcattatatcaaaccacaacattacttttagctgagtggccatgagtcgccttgctacccccaggctttttaagtaaaggagatgagaagagtggagtataccagggcaggcagtctctgccacactagtcaagaactcaggcaaagtgtgtaacacgttcaaattgtgccgatgttagcgatatatatatatatttttttctccattctctcctcaaatatttatgaagccctcagttatatgagggtctagctaagtgccctttatagacaagaaaaccagagaacaggagccaggttttgagaggaaatagtttttaccaccaaccaaggacctttggggcaattgttcccagactctgcagggcaggagcccagtctcagagccagcgagatgtggtgcctgggagcagccatctcctgaggacaacctggagccaggcccaaatgggggtatccctggactcctgaagggtcagctcagtgccagaaggtgacagcttacagagccagagcctatctagggttttgggttttgtttttttgactccttgtcttttcctgactccctttgaaacagcaaggctgccctccacacccctgtgcatggcactgcactggaaatcagagaaactagatactaaaggtgggtttcccagtctctccttcattatagcaaagactgtgtgtggcatgtgtgtgtaagacaatagctccagtgcatgggtgtgtatggctgtatgggagggcatgtttgtatgcataactaagcatatgtgaatgtgtgcatgcatctgtccaggcgtgctgtacacagggttcattagtgtaccttaacagcgttctgagaggcttgacagcaatgtactgagtttgtcttcgtctactgttacctgcttcagagtggagcatatgaacgcttgtgtcgcggatgattgattgattgattgattgattgaatggcatatggcacagttaacaacagcatgagttctggagtcagccagagtggagctctacacctctctccgccactcactgagttattttagcctcctaacctcgtagcgcctcagtctccacatctccagagcaggcaagagaccctgatccaccctatctatgaacctcagtgtgggggtgaaggaagagtaatcaaagccgccccatttcaagctggcccagggctctctcctacgggctgccgcacagctcctcccccacagttcatgggccgtgtggtagcacaaactcttctcagtgcgcacccatgcaatttcatacttatggtccgtggacatccaagaagagctcagaccttaacttacaatccagggggctgatgcttaagtcctcctctaggtggcgccgcagaaaggaagcccgactactgagtcatagtgccccctggtgttcattgacataaaaatgcaacaaatggggagctgttctagacgagactaaatatggaggtgaggggatttcaatatgataaattgtatcatagacaggagcaaggcaaatgggaggcagatgtgctggggagagagagaaaggaggggtcaagtcatactaaggaaattatcatgaataatgttaacatctataattccctctccacctattatgtacctgatattggactaagctttcatttccttcatcaacacaagtgctacaaggtgtgtttggagccgtctgtgcagtagatgctcattaccctgttgactagatgactgctttttacatttttttattgttttgtgtgtgtgtgtgtgtgtgtgtgtgtgtgtgtgtgtgtaggtttgcacgtgccaacaggatgcacgtggcgttcagaggacaacatttaggaatcaattctctccttccatcatgtgagacctagagatcaaactcaagtgggcaggcttggctacaaacacctttagtcaccgagccatcttgagggcccaagatagctaacatacttctgagagacaaatattatctcaatttaggaaactggatgcacaaactcgtggccaagaaggcggcagtgccggggcatgtgatgcttgtgacctcacaccagctctgcctccgggagggtggggccttaccttcatgggatttgccttttcagcctccccccagcctctgggtactcggctctgcctgggatcggccagcgatggctatttatggctcagggaggcgtccagtgaaactcccctcataaattatgaagggagacacatgtgggtcaggacaggagaacttggtgcatgagggaaccccgggactcttgctctctctaatcagggattttccttctgttcccaaggaagcagctgctgcagatggcagaacagccagcgtcgcaaggggtcccagggtcctctcaggtcctgctgtttgggctcctagccctgactgctgacagctctctgcctcgtcccctaaatggggctgtctgcattttcatggttcctatgcccacacaaggagggcttgaacagtgctggatgttttgtgccctgcccattctctctctctctctctctctctctctctctctctctctctctctctctcctctcagctattttctgagcatgctcagtcttgctctgggggtacccaaaaacctggatcccctggagctatccctttccgaatggcccttgacacctggtttgagtgtgtggtgtttctttttttatgctgtagtttcttggttattgttagtcttttgtttaaatcctatctacctttaactccctctagcaattcattcctccctctgacttgctaatctcaagtctctaacctggtcactaagcggctagcattggggagatgtggaagaagcctgacagaagtcaggggttgagaactttcttctgtaaatgaaacatgccagtctccatgtggcctttgagcttcgatggctatctgtctgtttgagacagggcttgccgtgtagcccaggctggcccacgccgaaggtgaagtggggagtcagctggagtcgggaagattgcaccagcggctgcttggtatgtgtgccaagcaacggaggctttcttatttaaggggcggactgaggggcctgggtgactcctctctccctgggacaggtggctgcatgaaatgaggagccgggacgggaggagagcaggaagcatggcagctcaggacgggagcccactgctgacagggtgtctggcttccaattacactgcctcagagctccacataaaattagcagcagcgttctctgtaaaaggagccagagaaataaccacattcagcagaaccgcaagcagggacggaagacagagggagaaagggcaggcttggcccagcgtggactccaggtcccttctaggacacccttggcccctgctgcccaggtggctcccaggctgagtcaggaacacaggataatcctgcaggggtcggggggggggctgagtgtgggagtgtgggaagggggggactgaggggacctggtcaggtggcctagagggctcaacacacacacacacacacacacacacacacacacacacacaacacacacacatgggtgggggagggagagggagaggaagagagaaagccaaaaagaaaaataaaggagaaatggtttagaatatgttggcttgtgggaggacatgctgcccttgtgtgtatgtacttgagtgtgtgtctgtgtgtatgtgatgtgtttgtgtatgtgtgcatgttgtatgtgtatgtgtgtgtgtctgtgtgtgtttctgtgtgtgtgtatctttgtgtgtttctgtatctctctgtgtgcatgatgtgtgtatatatgtgtgtatgtgtgtgtttgtgtgtgtgtgcatgtgtgtgcatgtgtgtgtatgtatgcttgtgtgtacctgtgtgtgtttatgtatatgtgtctgtgagtgtatgtgtgtgtatctgtgactgtatgtgcgtgtctcctgtgtgcatgtttgtgtatgtgtgtctgtgttctgcatatgcatgtatgtgtgtgtgtatattcgtgtctgtgcctgtgtgtgtctactactgtgtatatgtgtgtgtgtgtacatgcgcccccaccaagactccatcagagaaaagtattcgctnnnnnnnnnnnnnnnnnnnnnnnnnnnnnnnnnnnnnnnnnnnnnnnnnnnnnnnnnnnnnnnnnnnnnnnnnnnnnnnnnnnnnnnnnnnnnnnnnnnnnnnnnnnnnnnnnnnnnnnnnnnnnnnnnnnnnnnnnnnnnnnnnnnnnnnnnnnnnnnnnnnnnnnnnnnnnnnnnnnnnnnnnnnnnnnnnnnnnnnnnnnnnnnnnnnnnnnnnnnnnnnnnnnnnnnnnnnnnnnnnnnnnnnnnnnnnnnnnnnnnnnnnnnnnnnnnnnnnnnnnnnnnnnnnnnntattcgctctgcttgtgacgtcaccactctccgagtcagaggctctttagagaccctcagaaacaggcatacctgcccacacacagttgtactcgtctctgcacaaactggccttgaactcctggtcctcctgcctccacgtcctgagagctgggattacatgtgttcttacccttgttttatttggtgctgggactgagccagggcttcactcacgctacacaagtgctctgcatcccagtcccaaaccagcacattttcaagccaggacaggcatgctgtgacacagtctctcactagtgctatgtgacattctcttgtggaagcaatgtcaccatttcctgtttcatgaccacctgttgaccaacattctcctctgcaggggccaagcttgtacctctgtgctcacagacccccctcttccactgcacccctccttgctcccctggttgtttcctccaaaagctgggacgcctgagccccgaggcccagccagagcctctgaatcatgtctagctcctcaggtgtgaattcttctgaagtccaaggcgcctggatttgcagttttgtgtagtgctgactccgaactgcttcctcagcacagttcagagccagcttttctctggatttcacaccagtgggggcttcaggctcgaggctctgaccctgtgcattagctccctctgtctacccatggctggagaacttccttcgcttcctcgggcacccaggccaatggctgagaaaccctctttggtgtttgctgtgatatccagcttcacatgagagctcaaggtggacttcctgccagcagtgggacatgtgacctgcatctggtctctggccagtcactggagcctcatctttagtaacacatgtgtttgccgttccctaggcctgggtatcagtctccatcctcagtcatgggtacaattcctgctcgtcttagacctctcagatcacctttccttgtcttgagcagggatttgtatgcttaaaagagctaactctgtgaactgcggtacttctgtgtgctgggagtaggtcagaccgtccattctacgttcctctaccaccctgatctatctgtgcagtgcaaaggccttgatgaacatgcagtcactggtggagtgtccctctcccactttcctgtcccctcctgtgactttcttcatcctcgtttctgtctccccaggagcccatgccctgcctggccacggggagggcagttctcactgggcagactctatcctgggagctctaggttcatcctctctgggctgggtcagggccagaagatcccttcagggtgacaggatggagggggggacattttaaagtaaggatcctaaaacattctatattcttggagccagatcctgaggagtctgagactgcttccaatccagccccatttaaggtgagaaacataggcggttccagattcctcagggggaaggccctgtccccacagccacgttcccaagttggggagataggagcctgattcgggcaggctgggcaggctgccatctctccttctgtcttagcataccatcaagtggagctggggggtgggggacattctctgggctgctgggcccatcctcactgtaggctttggagagctccctacagaaacaagcattagaaggagccgacgaagaacttcctccttctgctcacataatctgggtgtccgcagtgtagtgctggcctggaagaagcctaacacacaaacacacatttggaacacactggggtagggaacccctctggtgagagcttgccgcaggaaaagcccagagagtggcagggagggtctggtgaggacaggtttgtttcttagagggcagcttctgagctgagacctacaggagataggagaggagcgttgggaatgtggtggcaatgagggaagagagattgggagagcaggcagcccacggggccttggggattctgaagccagcagcgggggcttggggcttttctgagagctgagtagggaggtggaggcagattgtaaggagagagcctctgtgtggatggaagctctgggagagctgaatgtggtatctcagagcccagagccccagatggggcataaaacaatgacttcctagtataagagggagggggaccaggagagcttcctggaaaaagcactatctccaccagaccttaggaatggcaggtcttggatgcttgagaaagggattcaggaagaagcctgaggaggaagtccacaagtgtccttgatggactacccagggctaaaactgctctatggtgggtggagctcagcaccagagacaggcactgaggaaatccccaaagccagtggcctcacgcaagcccagcacccaagggtgccacttcctcaactgctgtgcagctgggaagtggctgagaagacgtgtgagggccaggcagctcaaagcctgaaggaggtacttcaaggagggtccagagaagctgggcagggcgggacctcctcaaaggctgcccccggggacaccccaagcttcaggaagctctcagatgcacataggaggaagtgagaggtgaactcggcctggatctggttgggcaaggcccccatccatctgcttttctgactacccacagccatggccctggcccagcagctgcgatcagagaggtgagagtgtgcctctattccctgccaggctttctcaatgatcccaataggcctggggggtgggtatggggaggtaagaggctgtccctcctgtcacctgatatcagtggatcagcacagagtcaaatttgaaggtcttgctgaatgatactgcaggagctgcatgctccagcagatgtttctagaaccttgacttagtaggtcggcagtgttatgcaccagtgagaagcctaaggctcagaatggggagtggcttggatgtggccaaaggccacagggtgagtgggcggcagagcctgggagcagaggtatcctgggtgctaggcttgggttctgggttcctggttccacactgcaatcaggagcggctcttccatctgcccttcagactgaaactggcctctgcgttttcctatctttaggttcagatagcccaggctctgccgtctgacccctcactccacttccttgtcctgaacaggtcttggatgcttggcacaatgttgggggccgggtctctgctctgcctgctctgagggtgttttagttttttggatcacagttgtgtctctgggaggccgaacggccctgggacacactgagagctcaatacatctgctaagagctcaaaaatgacccagatctatcttggacaatgctgacactatacaggtagggacaaggagacctgatggccccaagcccggccacctcattcagtcagcccttgctcagtgtctcttatggagacagccctgtgttcccatctgcatgtggagactcaaatgacagaaccgtcccctgaatcaagcagaaagcaacgttaggaagccaagtgtccatgtgaactgcttgagagtcaccagaacaggtctgactgacaagacccaggtgtgagcaaagcactcgtgggatctggaaaaagggatgggattcctgtaggtcaaaggtcagaggaggtttgtctgtgtggtaacaagagttagtgttgggtgggggtcagatggccttccttccatagctatagagagtgttactggggtgctaagtaaggctgcataatatgaccccagcctttctcacccccaagttctcctaggagactgacagacatgcaaacttgaatcttctagaaactgtagccacttgaagcttgggtcccttcttgtttcttggggtgcagagttcagatggtgcctgtaaggactatcagggctcagtgtttcctccgcccactctgccctttccacagctgttcccccgccctctgaggggggcggctcttctcctctgcccctgataggaccatggacccaggtcctagggccatcagacccagtatctccagcgtcctctttgagaaccagtccggcagagatacagacgaggagatatcatatatagtgtctcttcgagggcagctgcagagtttagctcccatggccacatgtcattccagctcccactgtgattgaggtaccacacacctgcagttttcaggactcccctagatcaggtccccaagcgtacctccatgtgtagctcccgtgtgcacagagcccggtggtatccacccaacaaaacccgtgtggggtccaagggggacagctatcttcccagtccccttccctctccccacaccacagcctccttggcagctcagctgcagacggctcacactgggacaagtggaagtagccgctcaggaccttctaggcgcctggcgccgctctgggtgcttaggggatgcagtgtgctcttatggggtggcagggatttgatgattgtctccattttcagagaggggtgggaggagccggaggatggggagaggccccacaaggtctcttctgacagggagctgagtgaattctggtcctagtccagggtattatctggccctgtctggcctagtatgtcttctgacactagcgctgcccagacacttctggtttctcctaccccagagaaaggttgctgttcttccacgaggcaggaaggccccttgtgtgnnnnnnnnnnnnnnnnnnnnnnnnnnnnnnnnnnnnnnnnnctccctggtgccatagccggctctctgtgctttccttacccttggctgtagggaaccccactttcccatggcaatcctaacgtccccacccccaccccaccaactgtcttctgctccactgttggtgtcttgaagaatgtgatgcgggtcacctgtggaaagtccttggcccgtgatgaaacagagggattacttcttgggtattcaatttccccactcctcagagctatggagtacaagaagcagagagcaggaccccgtgatgctaagaagtgtctgttctgtgctccaggctgcagaatgcggggaacaggcccagtgctgggcttcatccaaggtctctcagcttctttgtctcgaatcccactcacctcacctgggcaagctccataacctctcggtgcctcaccatcaccctaccccagggtggctctatctccaaggagtaggtgcccagttcctggtgtggtgtgagcactctcagccattagtgttacccaaacttccagaatggccaacggctatttttccctttccagttccctcctgccccaccccagcttctgggggaagtgggtgaggccactctttcagaggatgtcctcatgggacatgttgaaaagcgagtgggaaggccccagtgaccacagaggtgccccagcctgggggacagcccctgctggtctgctgacttccccagtcactgcctggtgacttctgaatccagatacaccatcctgggacagaccaggtcccaggggaccagagaaccagcatggactctgtgcagggtgtgtgggctcctagggatcccatactttgtgaggtgtgggacaagtcctatctgtctctcaggcactgctaggagaacccaatcacttcttcagctcctcctcctcctcaccctccttttcatcttcctccatttccatgttcccttctccttcctctatctcgccctccttcccccttccttctcctccccctcctcatccttttctcctctctcccctctgtcttccatctcatcttcattggaattctattctcctcttcctcctctcttcctcctcctccttttcctcctctttctccttctcctttttctcctcctcttcctcctcctcctcctcgacctcctcctctatctctgcctcctcttttgaaacaggttctcactttgcagcctgggctgagctagaactcctcattccatcctgactccctctcctcagcctcttcatttctgagatcacagacatgtgccacctatgcctgcctacacccacttcctgcttcctggtctgtacacaagtgacagacggttgaccttggctgtgcctggtggccggcttcctctttctctgcttgcccttctcaaccctctccagttcacttaagggtcttaagtcttagccatagccataagccacaggcaggtggctctcactttaaccacacgtcagccccactctgccatctccacacctgcacaccagcctcctgctggatgcctacctagagacatctcaccttagtgaggcctgagcagccctgcctcttcctgtgctggtcagaaacaggcatcactcttgtcgtggctctttctttcagtccaggttggctgctataccttggtcatgtatcccttggaaatgcattagactgcagggaaaggctggtctggtcttggcttaaatgatgaccagttgttctttttcacagtaaaagtccagactgcaactcgttccatagctcagggggctcaaagccagccctgcagaatttttcattctgcatcatgtttttgcctcatgggtgcaactgtggctgtggatccagatgccaccccaactccatctcattgaccagagctagtcacatggttgtgttgagcctcaagggcaggtgggaataggaataggagcaatgtttggtccaggccaatcatgcctctccaagctagacacacttaacattgagcatggctggcacttgaatggccaggaaaaaaaaaaacaacaacaacaacaaaacaccaaaacagcaggaacatatggaatgctactctagcattgtgctggggttctctatcatttgcatgtcctggccgatatcacccttcactgtcggagcttctcatagagctgtctcattaagtctctccccctccttcatggctggccacctgtggtgacctccttgaaccacctagttccttgatctcaagaccctcatatgaacgtatccaccttaagacccaccaggctctcagcaaatctaaactcttcctcagggctcagaaccttagcacgagccatttccactacccggaagaaccttcctagattccagtgaattccagttgacccaccaagagctcaaactccacctttctgaagcttttccttacttgggcatagtcaacaaaccgatctcttggctgggggatgtgggctgctctctgtctgtcagcctcatggtactatgacaaaatactggagtcaattaatatataaagtaaaaaggtttatttaggtccagggttccatggatcccgcctaaaagcatggcaacccctttgcctgagtctctagagatggcagtgaagtgaagcagaagtgcatggcagagtaaaccaggtgcaagcagaggagctggagaagaacatggtcccttagtccccttcaaggcaatccctggggacccaaggacgtcccatgaggctccctacctagaggtccacaacactccccagtggtgatgtccattaactgtgggttgtaggggacacccatacaaaccccttcaggagtcccagcacacacttcatcctgtgacacagagcctggcacaaggctggcacgaaatgggcaccaggacctggcaagttcttgggtagcttggactagaagccagctggtgacaccaattccagctccgcacccctcattctcagggcttgacctgtgtgtgccctgacatctcggggttcccagcctcagtgaggtgccaggcatggacagtgttcagaatggggtgtgcaggcctccatcagctggctgtgtccagagcaggcaaggtggtaaccgatcccctccctctggcctcctacagcgactttgagcagcttccagacgatgtggccgtctcagccaacatcgctgacatcgaggagaagagaggcttcaccagccactttgtaagagtcagcaatccctgttcccttgacctcgaacctctaatcttccaccttgacagtggtttctctggactgggtggttgctgatatttgctggatagaattcagcggtgcttctaaacacatccaaaagcatgggacaccacactgaaggcttaccccactcagtacactgcagggcttgagaaagcctgtccctctctgtgacctctgacctcatacagtgctcatctcccagtgtctctacctcccagcccctccccagccccccaaccctttccactttccagacctgtccacctctcagctctcctaccttataaagacacccagcctcccggtatatcccccccaccccgttctagctcccctcccccagtctctctcctcctcaggtttttgtcatcgaggtcaaaacaaaaggagggtccaagtatctcatctaccgccgctatcgccagttctacgccctgcagagcaagctggaggagcggtttgggccagagagcaagaacagccctttcacctgcaacctgcccacattgccaggtaggctgcactctgtccaacgcccggagctggccctgaccctggcctcaccttccagctcagcagcatgttatttcaaccctctttgcaaacgatgcatttggctggtgcccctcttgtagccataggctggcagtgcccccctagcagccctctgcctgccacccctctgtcttcagggtaccttcactgctacagtttctgcatcataacccttgacctacctctggggacacagtacagccatcttgccacagccattgctaccaagggagcctgggctgggagcactcagcacctgggttctggtctttcttgcctctctcagccacccatgagggtggctctccagccacacagcctcagcctcaacagatgactgcagctctccctctctggcccttggggaagcagggagccacacatagcttctaatcccacccctgtcccccatctccttcccatatgcccctcgtcccaaatctcccatgccacctcctcccgagcttgcccaagaaagtccttggagatgctcctgactctatcatatcacatcttccctaagcctcagaggcctgcccatcttcccttcttccagcccaccttctgtgggtgtgctgtcccccaaacacattctcttcatccatctccaaaaaggacactgagctgagaggcaaaggacctcatagctcctactccccccacttctgagtggtgaggaggagacaccactctccatctcccccccctttcctacaccctttccctgagctctagtcattttccttgacacaccgcccccctctggagcatgtgaagaggtcccccatcacaccctgtctgatgagcgttaaccaagcagtgctgtggggagcctctgttctgagcctcctatcctgagggctcccccttgtgcccagcctcttcccccattaggcctcctccaccagccttcctgagtcccgtccacctttcttgctgcaggctctgctcaccttgggatgggactctcccccatccttgcctgtctcatcttctcactctgaacaactggtgcctgtgactttgtctcgtcttggtgtgtggctcctgggtagccccaacctttatatacccccctcctggcatcacaggtgcccacctttcctgccctattgcacaggggcctctgggtggcagctcctttaagtgtctgccaaaggctcctggcggaccttcatcatttggaccttcatgcactccgctccgcgttagaggcatggctcattcatccacaaagcagattcttagttctctgaagtgtgagtggggcttggagctcatggtttctaactatggtagcctgctgaaaggaaacttacagagccctcctacctccaggatgccaatgtagtttttctggggagccctatctaatgggatgctcaaaagctcctatggtgacctgagtgttatccaagcctgaagctgggagatcactgtgatccaggcaggcaagaggtcctgagttcagagcgtgcatctgttttatgcaagtgtacgtatttttgtgtgttaaagcatgttgcatctgtgtgcatttgtgcatatacatatacatatgtgtatgtatatgtatgtatgtatatatatatgcatgagtgtgtatacatgcacacataggccttacatgtgtatttgcatatatgtgtatgtcggtatactatatgtgtgtgtggtgcatatatatacatgtcccagactgcaggtgtatctgtgcatatgtgtgtgcacatatgtgagcatgtatatataagttcttgtgtatctatttgtgtgcatttgtgtgcatgcatatgagtgtgtattcatgtgtctatgtgagtgagggtgtatgtgcataggcttatgcatgtctaagctttgcatgggtacatagagtgtgtgtgtgctgtgatgagcatgtatgtgtgttcatgcatacatatgagtatgtgtgtacctgtacacacctttgtgtgtaggagcaggcatgacattgagagctccttctgccttctcctgatggtatgatgggaagatgcggttggaaagtatctcggtgacacttggtaccatgatagaaggcaggaggaaccctgagctggggaggagcattggggaggagctctgggctggggaggagcactggggaggagctctgggctggggaggagcattggggagaagcactgattggtggggcagctgaagagtaggcaccgtatggtccaggctctgggcaacttttctcttttcagccaaagtctacatgggcgcaaaacaagagatcgctgagactcggatcccggccctcaatgcctacatgaaggtacctgctgccacatctccttggggtttgagtgggcagggtattactgtggggcatgagtttgaaaactgacattttcctgaggcctccatgatcccatcttcaatcctgaaaggcctggctggagagagaagcaaggtatgcagacgggatcaaggagctgggtcacaaaagtcacggttgacaaatccttgagtgcaccaagctcaaggaatgaatatttgtgctgagctctggaatgcagtgcctgccccagagcacctgcggcccaggggagacccttacaaggtagtgagcaccctgtcaacagtagcatccaagccatggtctgctggaaagccttcctggctgtccagaggtcctttacagctggagtgctctggctttggagacttttgtttggatgggtgctttggagcgagtaagcagtcctctctcaggaagtctcagcttccttctgttatgagacgaacagtcccaccctccccggctctcagctcccaatgagtggagctgggctctattgagaaaatgaagggaagggggttttagaactgtgaacctgcttctaggttgtaatcctgagggatttcccacagaaatctggatgcttctggaactgtagctcctgtacagtggcctcagcgctccagggtacctgagccctgtgggactgaattggtagccatgccagtccccactgctccatgtcctcacgccttagtcacactgtgtgcacatgggcagagagagaaatgtgctttgtcctgcaagccctccccctttcctcaccctgtcccaatcacttctcggacctgcccccacccccaccccatccaagcactgtctctccttatgattcattggatagagtgcttgcctagcatttgagaagtcctgggtttgttccccagtatcaaataaaatagacatggtggcccacacctataatcccaacacttaggaggtagaggcaagatgttccagtcattcttggttacatagcaagtttgagaccagtctgggctacatgagccctgatatgagcacctccggtgtctctggatgccccagttgtgttactaagctgtgtggctctgtgcagatccttttccctttctgatcctagcttacaggtttctggtgtaatcagcctccttaatcgacctctggagacctttaggtgatttcagatgacctcttaagccagcatccctcccctccccactacccgctcacgctgggccaggagcaaagcttgggaattgtctccttcaatcgctgaggactagtaacgtttttgtttttgttttttgttatcagctgagaatgcattagcagagatggtagacggggtggtgtgttgatagggctgtctagatcttttcgtcgactgcccacctgtccctcctcacacagaacctcctgagcctgccggtctgcgtgctgatggaccccgacgtcaggatcttcttctatcagtctgcatacgatgctgagcaggtgccccaggcactccgcaggctccgaccgcgcacgcgcaaaatgtaagtggccatccctgcacttctgatcccgcgacggagtccaatctctctagcctccaggagtcgctgttgcttcttgttccaaagactccagtgctcccttctcaccctgttcctcttagaaaaatgaaccaggcaggccttgaggcaccaaagtagtgaaatggtgctcgtttccgttcgagccacttctttaagaagccaaggaaaagcaggcaggaatcttgagccctgacctccgccaaagcacctaagagggcagggtctgaattccggctttgcaggagagtttggctctgagagccaggttgaggtctggtggagacttaagggcactgagccgtgatccccattccttcttcaagctctccctttgggtcttctgtgggagagcaacctcacctggggcagtggtgagaatacaagatgaagggctagcggcaagagcaaccaaccataactggtggctgcgcataatctttctctccctgcctctccagggacccacaaggctgataccccattttctttccatagcaagggtgtgtctccacaaggggccatcatggatcgcatggaagcgccaagagcagaggtacccacacacaggctagacctcatccgccgcaactgtggcgccctcctgctgtgtgccactgtgcactttggatggtgttgggtgcacagcatgaaatgccatggcaaagaacagtgggatggatgcaggagggctgtaacccatagggaggccagcgaggcgggggagcagggcaagctaggcacagagtttggattccccccttccaaatgtgaaccctacctgctctgaaaggaccacccactttgtagttgggggagagtagggttttaatcgaagtcctctgcaaacagaggggctgtatcagcacccttccaaaccctcagtttccttacctacagagagggacaccacagtggtcaagcccttcaaagactcagcgttctctctgtctcagcaatgctgtccctctcctcaggccttgtttgacttcactgggaacagcaaattggagctaagtttcaaagctggagatgtgatcttccttctcagtaagatcaacaaagactggctggaggtaagctggggagaggggttcagaatcaggaagactaactagaggcaagaaggagggtgatggcagagtacatggatgatggggtggaagtggaattggaggtgagggtggaggtcagatggagatgagattggaggaagggctgaggtggaggtggaagtggagatgaaggtggagagaggttggatgtaaagttagtgatgagaatggaggtgaaggtggcaatgaaggtggaggtgaggatggaagtaagactggagttaatgatgggaacaaggctggggttgatgatggggtaagggtgggggatggtggtaaggatgggggtgaggatggaggtgaggatggggtgaggatggaggtgaggatgggggtgaggatggaggtgaggatggaggtgaggatgggggnnnnnnnnnnnnnnnnnnnnnnnnnnnnnnnnnnnnnnnnnnnnnnnnnnnnnnnnnnnnnnnnnnnnnnnnnnnnnnnnnnnnnnnnnnnnnnnnnnnnnnnnnnnnnnnnnnnnnnnnnnnnnnnnnnnnnnnnnnnnnnnnnnnnnnnnnnnnnnnnnnnnnnnnnnnnnnnnnnnnnnnnnnnnnnnnnnnnnnnnnnnnnnnnnnnnnnnnnnnnnnnnnnnnnnnnnnnnnnnnnnnnnnnnnnnnnnnnnnnnnnnnnnnnnnnnnnnnnnnnnnnnnnnnnnnnnnnnnnnnnnnnnnnnnnnnnnnnnnnnnnnnnnnnnnnnnnnnnnnnnnnnnnnnnnnnnnnnnnnnnnnnnnnnnnnnnnnnnnnnnnnnnnnnnnnnnnnnnnnnnnnnnnnnnnnnnnnnnnnnnnnnnnnnnnnnnnnnnnnnnnnnnnnnnnnnnnnnnnnnnnnnnnnnnnnnnnnnnnnnnnnnnnnnnnnnnnnnnnnnnnnnnnnnnnnnnnnnnnnnnnnnnnnnnnnnnnnnnnnnnnnnnnnnnnnnnnnnnnnnnnnnnnnnnnnnnnnnnnnnnnnnnnnnnnnnnnnnnnnnnnnnnnnnnnnnnnnnnnnnnnnnnnnnnnnnnnnnnnnnnnnnnnnnnnnnnnnnnnnnnnnnnnnnnnnnnnnnnnnnnnnnnnnnnnnnnnnnnnnnnnnnnnnnnnnnnnnnnnnnnnnnnnnnnnnnnnnnnnnnnnnnnnnnnnnnnnnnnnnnnnnnnnnnnnnnnnnnnnnnnnnnnnnnnnnnnnnnnnnnnnnnnnnnnnnnnnnnnnnnnnnnnnnnnnnnnnnnnnnnnnnnnnnnnnnnnnnnnnnnnnnnnnnnnnnnnnnnnnnnnnnnnnnnnnnnnnnnnnnnnnnnnnnnnnnnnnnnnnnnnnnnnnnnnnnnnnnnnnnnnnnnnnnnnnnnnnnnnnnnnnnnnnnnnnnnnnnnnnnnnnnnnnnnnnnnnnnnnnnnnnnnnnnnnnnnnnnnnnnnnnnnnnnnnnnnnnnnnnnnnnnnnnnnnnnnnnnnnnnnnnnnnnnnnnnnnnnnnnnnnnnnnnnnnnnnnnnnnnnnnnnnnnnnnnnnnnnnnnnnnnnnnnnnnnnnnnnnnnnnnnnnnnnnnnnnnnnnnnnnnnnnnnnnnnnnnnnnnnnnnnnnnnnnnnnnnnnnnnnnnnnnnnnnnnnnnnnnnnnnnnnnnnnnnnnnnnnnnnnnnnnnnnnnnnnnnnnnnnnnnnnnnnnnnnnnnnnnnnnnnnnnnnnnnnnnnnnnnnnnnnnnnnnnnnnnnnnnnnnnnnnnnnnnnnnnnnnnnnnnnnnnnnnnnnnnnnnnnnnnnnnnnnnnnnnnnnnnnnnnnnnnnnnnnnnnnnnnnnnnnnnnnnnnnnnnnnnnnnnnnnnnnnnnnnnnnnnnnnnnnnnnnnnnnnnnnnnnnnnnnnnnnnnnnnnnnnnnnnnnnnnnnnnnnnnnnnnnnnnnnnnnnnnnnnnnnnnnnnnnnnnnnnnnnnnnnnnnnnnnnnnnnnnnnnnnnnnnnnnnnnnnnnnnnnnnnnnnnnnnnnnnnnnnnnnnnnnnnnnnnnnnnnnnnnnnnnnnnnnnnnnnnnnnnnnnnnnnnnnnnnnnnnnnnnnnnnnnnnnnnnnnnnnnnnnnnnnnnnnnnnnnnnnnnnnnnnnnnnnnnnnnnnnnnnnnnnnnnnnnnnnnnnnnnnnnnnnnnnnnnnnnnnnnnnnnnnnnnnnnnnnnnnnnnnnnnnnnnnnnnnnnnnnnnnnnnnntacagtcctggaggtcctggcagggttgggtgacctgtggggtgtcctgtttttgatccagatgtgttggtgaagcagaacattcatgccacagcatatgtgagggaacagcttgcagaagttgaccctctcctgtcaggctggttgtggaagtgaaactagggttgtcagacatggtagcaccctctttatccactgagccatttcacagcctcctccccccacccctgccattctctttaatttcttgatcactaacaaggcttctaggaactgacactctttgggggtggggtggggtcgtggagacaaataattcctgggaaagggcaggctatttagggaaggaaaggcagtcagggtgtttagcagtaccctggtcttcccactaggtgtcaccagtgcacctggtcacagcaatcacataggtttctccaggtttgctttgtgggggtcagactttctccactgagagaagtgaaggctcatatgtaataatgttacttccctaatcagcagcaaggatgactgattaagagtgggtgtccgtgcctgaggcagctcggtagaggagctctcacctagtgtgcaaggccctgggtcccactcaccatactgtgagacaacagaagatctaatgcatttctagctgtccttgtgtacctcaggaggttgcttaaccccgtggtttcctttcctgtgaatgatgaaaacagtttcttcagtggttcccgtcagggacaagggagaggcggatgtcctccaggccttggccccagagagtctaggtgcctcgttcccactgcatgtgaggggactgggaagtcttgaatgtgaccctgaagctgggcccccttgggtgtttctttgctccacactgacagggaatgactgtgccaggtccctgggtctggtcatctctatcataatattgtcaccgttggacattctctggccctcactgtgtctgaaggaggcagggttcccggtatcctgaggctgggcaggagtgggagtggcaggtgtagggatataacactttgagcttctgcctccttgtgcactgggtctcagaagccatgtccacccgagcagtgactgttgtgaccaccactgtcataagaggaactgttgaccgctttactgtcttctggaaagtcttactgtctagtgtgtcgtcactggcagacctcaggctgcaggaagggcctctgtggcgtaggaagaggaaggagcctcagtctgcgaggcagcgggaagaggatgtgattcctggggctgcggagatcaatcaggcagcaaacaggacctgagctcaatcccagagcccacacactaaaaagtcagccatggtggcttgtgcttatcatctagctctgggggagacagagacagagacaagccctgggacttgctgtccagccgcaaaccagctacaaatnnnnnnnnnnnnnnnnnnnnnnnnnnnnnnnnnnnnnnnnnnnnnnnnnnnnnnnnnnnnnnnnnnnnnnnnnnnnnnnnnnnnnnnnnnnnnnnnnnnnnnnnnnnnnnnnnnnnnnnnnnnnnnnnnnnnnnnnnnnnnnnnnnnnnnnnnnnnnnnnnnnnnnnnnnnnnnnnnnnnnnnnnnnnnnnnnnnnnnnnnnnnnnnnnnnnnnnnnnnnnnnnnnnnnnnnnnnnnnnnnnnnnnnnnnnnnnnnnnnnnnnnnnnnnnnnnnnnnnnnnnnnnnnnnnnnnnnnnnnnnnnnnnnnnnnnnnnnnnnnnnnnnnnnnnnnnnnnnnnnnnnnnnnnnnnnnnnnnnnnnnnnnnnnnnnnnnnnnnnnnnnnnnnnnnnnnnnnnnnnnnnnnnnnnnnnnnnnnnnnnnnnnnnnnnnnnnnnnnnnnnnnnnnnnnnnnnnnnnnnnnnnnnnnnnnnnnnnnnnnnnnnnnnnnnnnnnnnnnnnnnnnnnnnnnnnnnnnnnnnnnnnnnnnnnnnnnnnnnnnnnnnnnnnnnnnnnnnnnnnnnnnnnnnnnnnnnnnnnnnnnnnnnnnnnnnnnnnnnnnnnnnnnnnnnnnnnnnnnnnnnnnnnnnnnnnnnnnnnnnnnnnnnnnnnnnnnnnnnnnnnnnnnnnnnnnnnnnnnnnnnnnnnnnnnnnnnnnnnnnnnnnnnnnnnnnnnnnnnnnnnnnnnnnnnnnnnnnnnnnnnnnnnnnnnnnnnnnnnnnnnnnnnnnnnnnnnnnnnnnnnnnnnnnnnnnnnnntgtttcaaataggaaaaaaatgtagataaagactggagtgacatctgaagtaatcctctagactacatatgtacacatacacagacacatgtatgtacacactcacataaatgcacacacatgctcacatgcacatctgcatatgcattcgcacacataagtgcatgtatgtacttacacacatacaaatacataagtatacacatgcccacacacatataaatatagatgccaaaaagaatgcatcttctgtctcgtggccatggaggttttaagtgaccacatgagcaacacagagacaggattgggtctccccagtcctgcacttaggtgagaggcccaagcctccgggtgacacccaaaacctgtggaggagcatgaagcactttcaggtctctctgcagtccccaatgtctgcctcttgccctgatttcccctttacacgcgtagccattgaccacagagggctgctcatgtgtccctgtcgttctgtgccatcaggagtgctgcatgagggaacagtgcttgtgtaactcccggacccatagatcgggcatagtggtgctcgagaacctctgctgaaggaaagaatggatgaggaagagaagaaaggaagaagggagatgggagagaagggagaggagagacaggtgaggcagggagcttcccagataagttcagggctcttataaaactagagtgcaggtcgctgggttaggcagcctggtgaatctcctcactttgcctctctgtgttagttggctctggtcactataatagaacgcccgaggcatctagcttatgaagaagaaaggtttgctatggctcacaatgctggaagctccaattcctgcgctgaggtcctgcatcctgacaggagcgtgtgagagtaaaattcttgcattgtggttagaaagaaaaataaataagtaaaatagattaattaattaattaaaaaagaggaaaggagcaggtccccactacttgattaagggagccctctccctagcaagaaaggacatttctattagtatctatttctccaagctcccacaaccaccctggggaccaagcctttgacacctgatctttgggggacaatctatgacaatcgttgttgtaaagagtgtgggactctgagacgtgaccctgggtctcaccagcctcttctttcacttccagggcacctcccagggagccacaggcatcttcccagggtccttcgtgaagatccttaaggactttcccgaggacgaggacaccaccaactggctacgatgctacttctatgaagacacaggcaaaaccatcaagttggtgtcctgctgggagaacgggcctcttactcctccctgccacccctaccatgccactgtctcccagtcaacgctcctgtgttgtctctcccctcccctgcagctgctgctgtggctcccagataaaccatagtgctttagcaagagcttgtttctggcaccacacacgtccctcttccaccctgatgcttgtctcttctactgtcccccttagggacattgcggtggaggaggacctcagcagcacgcccctgttcaaagacctgctagcgctcatgaggtgagaggttgggaagggagggagactttggagggcaatgggctaggaggggacctgtgacagctccagtctctgcagtacacggtgccttagagaggagccaagcaggctgcagagggcaagggctcagtggaggtcccagtgtgtgactgtggatctgctatcagaacatctctctagcgaaaagccttgtacttggacacacacacacacacacacacacacacagagctggggaaattccaggccattgctgaaaagtttactcatagcactgtcccatctctcacgattcaaaacagcgcagtctgtatgaggactatattgcactcctatcgttagctgatgtgtgctcagattctgtcagcacatgcacaaacatgtgtaggcacactaacacacagacacattcacacacacacaaaaaacaaacacacgaaccaatacacacccaaaacatataacaaatgagcacaaacacacagtgtacacacaaacatacacaaacacacaaagatataacacacaaacacataatatacataacatacaacacaaacacaaaacaaacatgtacgcagaaacacaaatatacgtaaatacctaaaacacagacatacacataaaagaagcacacacactcactcactcacaatgtccccctggccatagctaccattctcaagacctcccgatggcttagcccccataccccggttaccactgacaagaatattgtaaatcttcattcacatataccgtctcattatcaagaagtgggattatgggatggaagtgtatgcaagaggattagactgggatggcacatggggagttagttcagatcttgttccctccagccatgatgaagcatggccctcctcccaaagttgtcactggttcctacaggcctcctgggcagccttgctttctcttaggaaactcctaaaccttccacccacttatacacaagaagcttcaggctgtaccattattggattacccagtgtcctcttcctttgaggtctctgtttccccatctgcagaacaggagtaaggctgttggatgataggccccggtaccacttggatccacagactcaaaggccctgggagaagccaggatccatagactaatcctggtgtgttgccctaggcgtgagttccagagagaagacatcgcccttagctaccaggatgctgagggggacttggttaggctgctgtcagatgaggatgtgggactcatggtgaagcaagcccgaggcctcccttcccagaagcgcctcttcccctggaagctgcatgtcacacagaaggacaactacagtgtctacaacactgtcccctgagtcacagggaccctgtggcaaggacggggtgctcagcaaagggcctttactttccaagaacacggagaccttcagggagactgatgtaagatgcaaacctcctggcccagagtgcctactggacaggattctattaagtttttgacactctaccttttggattcaataaaccattctgtctctaagggccacagttgggaaatgggattttgtgtagggccagggagttaagtgtaattgactaagacctcttacctttctaaacgacgttatggggaacatagtgaacccacatttaataggacattagaaccatccgctaaaagtctctaaaagtgcacagtagggagaaaagagtcactgtccatctgcagagtttgggaactgttgggtctatggtattacatccacagctgccctgccccagacccatggggtacaaatcccgccccagccactttgctttgggtaggtgcagtcaagtagatggagtgccctctccctgtggctcctggtcccctgtacaatgggtagcctgccccaatcccctgcccttcctagccccaggctggcctgtggagattcaaggccaggcagttgtggttgatagcctgaatcccagagctgccatgagagtaccacaaaatggagactaaaagacagaaagaaactgccttgtagttctggatggcagaagtccaaaactaaggagccctctccccacaaaacttgagagaaaccatcctccaactctccagcaccccagccagtcacctcagcctgtcggagcttcattctgatttcacaggagttccctcttgtgtgtcccccctctgtgtgcacctgcccctgtcagactggattagagtccacagcaatggccctgatcttaacttgaccacccatctcccagaactgtcgtgttacacgctgcaagtggagacttcaacatgacattttttaacctggacatatccactcaacctgtaataatcacttcattcatgctgttcccactaaaagggcaagcactctgctgtaggccagaggtatgggaaatgcagctttagtaaagatcacggtttccatgacaacagggagaaccagagtccatcagaagacagtccccctctgggatttacctgtagaaaagactccaggagaggcaagctgacttcactgacatcacccaactctgatgcaaaggctctggccatgaagaaaaatggaatttaaggatggggaaatcacattggtttttcttgaagagaaagctgggaacattaccaaaaataagggaccctggaacaagaggccagtgggcaaagcacttgtcacacaaggggattctaatgcccagaaccgacagaaagcaggatgctgcagtcttgggctctgtaacctcagcactcatgaggcaatatgaaaagaggaggccagagatagccagaaactcataggctagcctggcacgcattgaagtgacaactagagaccctgtctcgaatgatgtagaaggtgaggacacctaaggttgtccgatggcctccatacatagcaccctggcatgcacacacacaaaagacttcaaataacagaagctgtaatgagcgataatgccgaaggggttgtcagctccgagacacacaaggtcagaagcatagcggtgagtccagggaggctcagtcaagatgggctctctagaactgggttgcctctgtggcagcatccactcaggagaggttagaacaggaagtgcttccgacttgagataattccctaaaccacccacagctccctggtagaacatatagggagtctagccagctcaaacatggcgagcatggctctggcaggccttgcctttctcctccattcccttggctttgctaaaaaccgttggattacgtccctaaagctagccaccaggctctactcccttatttgtccatgttctccagctgaggctgactaccaaggtccagctatcaatgtattgaagtcaatcaaacaaaagccccctttggctcacctaagtaacatgcccaattaaaattaaatatcccatcctgacatgggatttccccttgtacctttataaaccgccactttcctatgcaccacgtctgtctcttctgcnnnnnnnnnnnnnnnnnnnngtgtagtggtgcatgtccataatcccagcactccaggggtgggaaggattggaggttcaaggtcactttcttgctatcgtaagttcaagaccagcttggactctctgagacaccctcagtaaaaccatcccaccatcccccacaccccaggacacatacccctgccacctttctcttgttcccttccctccgccctcatcctctgtctcttgtctttgttcttattccctgctctgtccctctggggcaaataaatctcttttgtgctgagaacttggtcttaggggtcttgagcttttacttgacagaactcacaggctgactgatcagtagggctcatggctgatgctgactaagccgcaagctactctgacttgaaggagattggcagggaggcaggcttaccagtggaatagcattggtttcctgggctggaagcctgctgcacagtacacactcaaggctgcctgctctcagggcagactggaggaatgaacttgggaccaaacacaggcaaacttaccaacattctgaatgggcagtgtagtctcccacccccaggccttgcccaagctgaaaggtaaaggtctaactggcagagaggcctaaacccaactgctcaccaataaacagcatatgcaaactaagtcaactccaaggaaagggaccaaaaagaccaaggaggaaaaaaaaatcacagtagagatgttagatgttagagactgcacttagtagggaaaatggacttagtttatccaaacactaaaaatgaactaatgaatgaccaaacaaacaagaacaatattaatctttaagggaaagtcagtatctacagttcctataatttgttatttaaaatgttcagtattcagcaaaaatcatgagaaattagaagaaaaactcgtaatgaaaagatcagcttaggaactttgggaaggtcatgagacactcacccctccgaagggagaggctgattagcatttcacagacaacagggaagggaagtccttgtcacctcattccctaaagaccaatcagtttaaaggctgcactgttccgccagtcatattgagcatagttgctgatgctctattctgcccctggaaactatataaaaacccactgaccagtgctgggggtcactgcctctcattcagatctgagatgacccccagttccctggaacagtaaaattcctcttgctttttgcatcgatcccagctctgcatggttcactcagggggtccctggtaagctaaagctccccagagtcttacaataaaccattcctagaggggtgaagggaagtaggtcatagaactgcctttgagggtggactagatgctggactcagcaagcaaggacctcaaagcggatggtttaagtaagctcaacccatgctcaaggaattaaagaaggtatagggggctgatgagatggttcagcagttaagaacactgactgctcttccaaaggtcctgagttcaaatcccagcaaccacatagtggctcacaaccatccgtaatgagatctggcacccaccctcttctggtgcatctgaagtcagctacagtgtacttatgtataataataataattaaatcttaaaaaaagagaaggtatagaaacaatgagtgttccatagcaactcctactactgaatgagggtgagaacaagaattgtgctgtgcttttattttatttttccttttcttggatattttctctatttacatttcaaatgttatcccctttccaggtctcccctttggaaaccccctatcctatccccacacaccctgcctctatgagnnnnnnnnnnnnnnnnnnnnnnnnnnnnnnnnnnnnnnnnnnnnnnnnnnnnnnnnnnnnnnnnnnnnnnnnnnnnnnnnnnnnnnnnnnnnnnnnnnnnnnnnnnnnnnnnnnnnnnnnnnnnnnnnnnnnnnnnnnnnnnnnnnnnnnnnnnnnnnnnnnnnnnnnnnnnnnnnnnnnnnnnnnnnnnnnnnnnnnnnnnnnnnnnnnnnnnnnnnnnnnnnnnnnnnnnnnnnnnnnnnnnnnnnnnnnnnnnnnnnnnnnnnnnnnnnnnnnnnnnnnnnnnnnnnnnnnnnnnnnnnnnnnnnnnnnnnnnnnnnnnnnnnnnnnnnnnnnnnnnnnnnnnnnnnnnnnnnnnnnnnnnnnnnnnnnnnnnnnnnnnnnnnnnnnnnnnnnnnnnnnnnnnnnnnnnnnnnnnnnnnnnnnnnnnnnnnnnnnnnnnnnnnnnnnnnnnnnnnnnnnnnnnnnnnnnnnnnnnnnnnnnnnnnnnnnnnnnnnnnnnnnnnnnnnnnnnnnnnnnnnnnnnnnnnnnnnnnnnnnnnnnnnnnnnnnnnnnnnnnnnnnnnnnnnnnnnnnnnnnnnnnnnnnnnnnnnnnnnnnnnnnnnnnnnnnnnnnnnnnnnnnnnnnnnnnnnnnnnnnnnnnnnnnnnnnnnnnnnnnnnnnnnnnnnnnnnnnnnnnnnnnnnnnnnnnnnnnnnnnnnnnnnnnnnnnnnnnnnnnnnnnnnnnnnnnnnnnnnnnnnnnnnnnnnnnnnnnnnnnnnnnnnnnnnnnnnnnnnnnnnnnnnnnnnnnnnnnnnnnnnnnnnnnnnnnnnnnnnnnnnnnnnnnnnnnnnnnnnnnnnnnnnnnnnnnnnnnnnnnnnnnnnnnnnnnnnnnnnnnnnnnnnnnnnnnnnnnnnnnnnnnnnnnnnnnnnnnnnnnnnnnnnnnnnnnnnnnnnnnnnnnnnnnnnnnnnnnnnnnnnnnnnnnnnnnnnnnnnnnnnnnnnnnnnnnnnnnnnnnnnnnnnnnnnnnnnnnnnnnnnnnnnnnnnnnnnnnnnnnnnnnnnnnnnnnnnnnnnnnnnnnnnnnnnnnnnnnnnnnnnnnnnnnnnnnnnnnnnnnnnnnnnnnnnnnnnnnnnnnnnnnnnnnnnnnnnnnnnnnnnnnnnnnnnnnnnnnnnnnnnnnnnnnnnnnnnnnnnnnnnnnnnnnnnnnnnnnnnnnnnnnnnnnnnnnnnnnnnnnnnnnnnnnnnnnnnnnnnnnnnnnnnnnnnnnnnnnnnnnnnnnnnnnnnnnnnnnnnnnnnnnnnnnnnnnnnnnnnnnnnnnnnnnnnnnnnnnnnnnnnnnnnnnnnnnnnnnnnnnnnnnnnnnnnnnnnnnnnnnnnnnnnnnnnnnnnnnnnnnnnnnnnnnnnnnnnnnnnnnnnnnnnnnnnnnnnnnnnnnnnnnnnnnnnnnnnnnnnnnnnnnnnnnnnnnnnnnnnnnnnnnnnnnnnnnnnnnnnnnnnnnnnnnnnnnnnnnnnnnnnnnnnnnnnnnnnnnnnnnnnnnnnnnnnnnnnnnnnnnnnnnnnnnnnnnnnnnnnnnnnnnnnnnnnnnnnnnnnnnnnnnnnnnnnnnnnnnnnnnnnnnnnnnnnnnnnnnnnnnnnnnnnnnnnnnnnnnnnnnnnnnnnnnnnnnnnnnnnnnnnnnnnnnnnnnnnnnnnnnnnnnnnnnnnnnnnnnnnnnnnnnnnnnnnnnnnnnnnnnnnnnnnnnnnnnnnnnnnnnnnnnnnnnnnnnnnnnnnnnnnnnnnnnnnnnnnnnnnnnnnnnnnnnnnnnnnnnnnnnnnnnnnnnnnnnnnnnnnnnnnnnnnnnnnnnnnnnnnnnnnnnnnnnnnnnnnnnnnnnnnnnnnnnnnnnnnnnnnnnnnnnnnnnnnnnnnnnnnnnnnnnnnnnnnnnnnnnnnnnnnnnnnnnnnnnnnnnnnnnnnnnnnnnnnnnnnnnnnnnnnnnnnnnnnnnnnnnnnnnnnnnnnnnnnnnnnnnnnnnnnnnnnnnnnnnnnnnnnnnnnnnnnnnnnnnnnnnnnnnnnnnnnnnnnnnnnnnnnnnnnnnnnnnnnnnnnnnnnnnnnnnnnnnnnnnnnnnnnnnnnnnnnnnnnnnnnnnnnnnnnnnnnnnnnnnnnnnnnnnnnnnnnnnnnnnnnnnnnnnnnnnnnnnnnnnnnnnnnnnnnnnnnnnnnnnnnnnnnnnnnnnnnnnnnnnnnnnnnnnnnnnnnnnnnnnnnnnnnnnnnnnnnnnnnnnnnnnnnnnnnnnnnnnnnnnnnnnnnnnnnnnnnnnnnnnnnnnnnnnnnnnnnnnnnnnnnnnnnnnnnnnnnnnnnnnnnnnnnnnnnnnnnnnnnnnnnnnnnnnnnnnnnnnnnnnnnnnnnnnnnnnnnnnnnnnnnnnnnnnnnnnnnnnnnnnnnnnnnnnnnnnnnnnnnnnnnnnnnnnnnnnnnnnnnnnnnnnnnnnnnnnnnnnnnnnnnnnnnnnnnnnnnnnnnnnnnnnnnnnnnnnnnnnnnnnnnnnnnnnnnnnnnnnnnnnnnnnnnnnnnnnnnnnnnnnnnnnnnnnnnnnnnnnnnnnnnnnnnnnnnnnnnnnnnnnnnnnnnnnnnnnnnnnnnnnnnnnnnnnnnnnnnnnnnnnnnnnnnnnnnnnnnnnnnnnnnnnnnnnnnnnnnnnnnnnnnnnnnnnnnnnnnnnnnnnnnnnnnnnnnnnnnnnnnnnnnnnnnnnnnnnnnnnnnnnnnnnnnnnnnnnnnnnnnnnnnnnnnnnnnnnnnnnnnnnnnnnnnnnnnnnnnnnnnnnnnnnnnnnnnnnnnnnnnnnnnnnnnnnnnnnnnnnnnnnnnnnnnnnnnnnnnnnnnnnnnnnnnnnnnnnnnnnnnnnnnnnnnnnnnnnnnnnnnnnnnnnnnnnnnnnnnnnnnnnnnnnnnnnnnnnnnnnnnnnnnnnnnnnnnnnnnnnnnnnnnnnnnnnnnnnnnnnnnnnnnnnnnnnnnnnnnnnnnnnnnnnnnnnnnnnnnnnnnnnnnnnnnnnnnnnnnnnnnnnnnnnnnnnnnnnnnnnnnnnnnnnnnnnnnnnnnnnnnnnnnnnnnnnnnnnnnnnnnnnnnnnnnnnnnnnnnnnnnnnnnnnnnnnnnnnnnnnnnnnnnnnnnnnnnnnnnnnnnnnnnnnnnnnnnnnnnnnnnnnnnnnnnnnnnnnnnnnnnnnnnnnnnnnnnnnnnnnnnnnnnnnnnnnnnnnnnnnnnnnnnnnnnnnnnnnnnnnnnnnnnnnnnnnnnnnnnnnnnnnnnnnnnnnnnnnnnnnnnnnnnnnnnnnnnnnnnnnnnnnnnnnnnnnnnnnnnnnnnnnnnnnnnnnnnnnnnnnnnnnnnnnnnnnnnnnnnnnnnnnnnnnnnnnnnnnnnnnnnnnnnnnnnnnnnnnnnnnnnnnnnnnnnnnnnnnnnnnnnnnnnnnnnnnnnnnnnnnnnnnnnnnnnnnnnnnnnnnnnnnnnnnnnnnnnnnnnnnnnnnnnnnnnnnnnnnnnnnnnnnnnnnnnnnnnnnnnnnnnnnnnnnnnnnnnnnnnnnnnnnnnnnnnnnnnnnnnnnnnnnnnnnnnnnnnnnnnnnnnnnnnnnnnnnnnnnnnnnnnnnnnnnnnnnnnnnnnnnnnnnnnnnnnnnnnnnnnnnnnnnnnnnnnnnnnnnnnnnnnnnnnnnnnnnnnnnnnnnnnnnnnnnnnnnnnnnnnnnnnnnnnnnnnnnnnnnnnnnnnnnnnnnnnnnnnnnnnnnnnnnnnnnnnnnnnnnnnnnnnnnnnnnnnnnnnnnnnnnnnnnnnnnnnnnnnnnnnnnnnnnnnnnnnnnnnnnnnnnnnnnnnnnntgtgtatgtttgtatgcatatatgtgtgtgtgtgtgtatatatatgtgtgtgcatgtgcatatatgtatatatgtgtatgtatccatatatgtatatatgtgtgtgtgacatatgtgcacatgcatgtacagatgcatgtgttcatatatttgcttttggatgccaaggagctcatcaagtgtcctgctttataacttttacttaatgtctctctctctctctctctccctctctctctctctctctctccctctctccctctctctctccctctctccctccctctctcccttccccctctctccctctcttcctctctttggatctatagctgttccagtggtcgagcacaagtgagccctagtaatactagtgtttacaccccgcaaggctctttgatgtgtgctgtggacttgaactggggtccttataattatgccacaagcactcttatcctctgagccatctcgacaaccactaaggtagggccttaagataatgtcctgtgaccttgaagagtcacaagaaagtcactatttttatttgtgtgtattatgagtgtactgcatgagtttattgcaccatatatgtatgcatgtctgcagaggacagaagagggtgccacatctcccggtactggaattgcatgtggttatgaactgtgtgatacaggatcctgagaacaaactctagttcctctgaagaaacaatgcttccaactgttgaatcagctctgcagcccagcaatcatcattcttcatgataaaatgttagaataataacaattcctgtgcaaggaaggaagacacacacacacacacactgtcactcagacattcaacattagaggccccagctagtctggcagagctttaaaaagaaatgcgctcataaggtttgagtgatggaagtgtgactgtcgttactcatgcttaacacaactgtatatgccaagacccagtagaacgtaggggcaaagtatttcatgacaccatggagatttgctgggtgggtgattatattgatgctaaacaatgattgcccttcctacatggcagcaaaataatctaaaaaataatcttaaacagtatgccatctgcagcacaacaatatgtttaagagacttagggatagtctaatgatgttcaaaacacacaccacacaaacacacacacaagcaacagaagaagataagcatgccacacacacccacacacccatacacacacacacacacacaccaaaagataaacacacacacccccaaaagataaacacacaccacaaaccatacacacaccagaagaagataagcacacacacacacacacacacacacacacacacacacacacacacaccccagaagaggataataaagatgatatatgcttagatgcccagcatttgacagtagaggcaggggggtcactaactcaatgccatcctcagtcacacagtgagttgaggccttttgggactacatgacactctgtctcaaaaaggaaaacaacgatcaagcaaaaaacagagaattaagagaagctgaaattagaggaaagcaagcccgtgtccatgaacaggaagccagtagttatgacagttcccccaaatagttcatagattgtgatgaggttttgaaacttcctgctctgattagcttttgataacttgccagaaactagagtcacctgtgaaaaggtaactctgctgttgaggaactgacttcataagacacacagataggcaagtctagtggggaattttctccatcaataattgatgtgaaaggacccagctcattgtgggtggttctgggcaggtgtcctgtgtataagaaagcaaactaagaaaactgtgggtagaaagccaggacgcattattctttcatggtctctgctttagttcctgcctccaggttcctattgtgagtttctgccctaacttacaccaggggatgaagtgtgacctaaaagttgtaaaatgaagtaaaacacattttgtactaagatggtttgggtcagtgttttattacattaccagagaagcaaattaaggcagaaattggtatcaggagtggggttgtgttgtgacggacctacccgtgtggtttgtatttcttggaacatcttatgggaggaaagtgaaaatttttggagatttggaggaaagtcattgtgcacacaaagcttagtgagctgttatgactctttaggaaagtatttcctcctggacagcacacaagaacccatagttaagagggtttgcatttcttaaagagactagaacttttgaagtatttggttttttaagactacaggacctttaatgttatactgtgctttatcatgatattatcacaagatcctggga

SEQ ID NO: 1559 - DNA, 1425 bp, Mus musculus
gagaagacgtgtgagggccaggcagctcaaagcctgaaggaggtacttcaaggagggtccagagaagctgggcagggcgggacctcctcaaaggctgcccccggggacaccccaagcttcaggaagctctcagatgcacataggaggaagtgagaggtgaactcggcctggatctggttgggcaaggcccccatccatctgcttttctgactacccacagccatggccctggcccagcagctgcgatcagagagcgactttgagcagcttccagacgatgtggccgtctcagccaacatcgctgacatcgaggagaagagaggcttcaccagccactttgtttttgtcatcgaggtcaaaacaaaaggagggtccaagtatctcatctaccgccgctatcgccagttctacgccctgcagagcaagctggaggagcggtttgggccagagagcaagaacagccctttcacctgcaacctgcccacattgccagccaaagtctacatgggcgcaaaacaagagatcgctgagactcggatcccggccctcaatgcctacatgaagaacctcctgagcctgccggtctgcgtgctgatggaccccgacgtcaggatcttcttctatcagtctgcatacgatgctgagcaggtgccccaggcactccgcaggctccgaccgcgcacgcgcaaaatcaagggtgtgtctccacaaggggccatcatggatcgcatggaagcgccaagagcagaggccttgtttgacttcactgggaacagcaaattggagctaagtttcaaagctggagatgtgatcttccttctcagtaagatcaacaaagactggctggagggcacctcccagggagccacaggcatcttcccagggtccttcgtgaagatccttaaggactttcccgaggacgaggacaccaccaactggctacgatgctacttctatgaagacacaggcaaaaccatcaaggacattgcggtggaggaggacctcagcagcacgcccctgttcaaagacctgctagcgctcatgaggcgtgagttccagagagaagacatcgcccttagctaccaggatgctgagggggacttggttaggctgctgtcagatgaggatgtgggactcatggtgaagcaagcccgaggcctcccttcccagaagcgcctcttcccctggaagctgcatgtcacacagaaggacaactacagtgtctacaacactgtcccctgagtcacagggaccctgtggcaaggacggggtgctcagcaaagggcctttactttccaagaacacggagaccttcagggagactgatgtaagatgcaaacctcctggcccagagtgcctactggacaggattctattaagtttttgacactctaccttttggattcaataaaccattctgtctct

SEQ ID NO: 1560 - DNA, 1020 bp, Mus musculus
atggccctggcccagcagctgcgatcagagagcgactttgagcagcttccagacgatgtggccgtctcagccaacatcgctgacatcgaggagaagagaggcttcaccagccactttgtttttgtcatcgaggtcaaaacaaaaggagggtccaagtatctcatctaccgccgctatcgccagttctacgccctgcagagcaagctggaggagcggtttgggccagagagcaagaacagccctttcacctgcaacctgcccacattgccagccaaagtctacatgggcgcaaaacaagagatcgctgagactcggatcccggccctcaatgcctacatgaagaacctcctgagcctgccggtctgcgtgctgatggaccccgacgtcaggatcttcttctatcagtctgcatacgatgctgagcaggtgccccaggcactccgcaggctccgaccgcgcacgcgcaaaatcaagggtgtgtctccacaaggggccatcatggatcgcatggaagcgccaagagcagaggccttgtttgacttcactgggaacagcaaattggagctaagtttcaaagctggagatgtgatcttccttctcagtaagatcaacaaagactggctggagggcacctcccagggagccacaggcatcttcccagggtccttcgtgaagatccttaaggactttcccgaggacgaggacaccaccaactggctacgatgctacttctatgaagacacaggcaaaaccatcaaggacattgcggtggaggaggacctcagcagcacgcccctgttcaaagacctgctagcgctcatgaggcgtgagttccagagagaagacatcgcccttagctaccaggatgctgagggggacttggttaggctgctgtcagatgaggatgtgggactcatggtgaagcaagcccgaggcctcccttcccagaagcgcctcttcccctggaagctgcatgtcacacagaaggacaactacagtgtctacaacactgtcccctga

SEQ ID NO: 1561 - DNA, 40304 bp, Homo sapiens
  misc_feature (14527)..(15049): n = a, g, c, or t
atgaggagcgagagatgcttttatttcaatcacctgggtcctggcctcatccggcaagagggcaatgtccgagatcaaaagcccagtcctactgcaagtctacccacttgctttgtctccttcttcactctcggcctccatcctcccctctttttctccctcccttcctcccacaaacccttattggtcctgttttggacactggtgattcatagatgaatgggacatggttcttgcccccaaatgtgcccatgctatggaatcttcagcaggaagaggtgagaagtgaagacgctgacagaggctggaattaaagtgacagctctagctggggagggtgctgccccagccttccagggaagtctttgaccagttttgaatcttaggtgatgcaaagaatcaaatggatgaagaaaagccataaaatcatagagatgggaggaagacggggagaatgcatcaggagaggtcaagttgatgtacaggacaatgagcaggcagaggaagggaggaaggcatgtcctggggcccgggctggagggagggtgcgggtgggtgaggggcttcagagtgctgcagcgcagaggagggaggagagggctgtggaaaggggaggttgccattcctttgtagttaatatttggaggcacgactgatttttgaatatagtttcatgcagatgctggtcagcctggagccacacttttctgctggctgtagatttttccccttttgatgcctttaggaaaatcaaattccaacatgtctgtgctggataaactgcagctagaggagccctcctttcctggggcactttcaaaggcagtggcatcttagcagcatcaggaaccagaggtagaccctcagggaggaggcagccctcaggcagctgctctgcctcacccctcacccaggattcaccttcctgagctctttttaaccctctctgtgaactgtcgcaaggtagtctctttgctgttaactctggtgcagcgtccacacagacctgcttgcttttataaataaagttttattggaagatagtcatgcacattcaactatttattgtttatggctgcttttgtgctgtgacagcagaattcagcagttgtgacagagaccaactccctgcaaagcctaaactatttactatctggcgttttttagaaattatttttcagctgggtgcagtagctcacacctgcaatcccagcactttaggaggctgaagcaggtggatcacttgaggccagaagtttgagaccagcctgccaacatgttgaaacctcatctccactaaaaatacaaaaattagcggggcgtggtggcagatgtctgtaatcctagctactcaggaggctgaggtatgagaatggcttgaatccgggaggcagaggttgcagtgagctgagattgcaccactgcactccagcctaggtgacagagcgagactccaacttaaaaaaaaaaaaatgaaagaaagaaaatgaaaagaaagcatttgccaatccctgctccagtgtactgggtagggtacaggttcagctgctgtaacaagcatcaaagaatcagctgctaaaacacaatagaaatttctttctccctgaaaaatctgaacagaagcagggtcagagatccaagctgttttgttgcttaactgttctccatagctggcctctccagccagctggaaggggagatgggaaatggaagatacaccttctgtctttcacgacacagcctgatagcatgtccatggcctcccctcccattctattggccagcaactggtcacatggccacagggagctgcaaggtaggctgggaaatgttctctttagctgggtggccatgagtccagccacaactcagggactttatcactaaaggagaaaggacagagtggatcgtaggggatattagcagtctctgctacaccttatcaagaagaataaagacagagtgcacaggggaaggatttggcattccctgcagagtattagaaaaaaatttgtaacatgctcaaatgaagtaggtatcaataacggatataaaatacctccttcttccacttcctccctcaaatatttattaagccctcatttatattaggctctatttggatgcattttgcagataaataacctgaagctcggagtgcttgagggagatgtctgagagttcatagccaaagagtgagagctctttctgccttattgccttgcttcccttgggacaccctggggctgggagctgggccttgcagcctgctaggctggctaggtttggtgacacagaaagcaaatgaataatttttaaagtgagaattctataaaggagactgcttgaacagattctgttagactgaaaaggcagaaggagacaccgaggtcaccagagatagaaacttcaggaagcagccatcacccctgcggctgtgggaacggaaggaagagagcggggttacgctagcctggaagcttggaggaggagacttagacctgcggggaggagctgggactcagaactgcagacctctgaggagggggtggggtgagactggctctgggaatgtgaaaaaaactaaaacctagaatcaactgctgctgggccaacatggcttccagggcagggcagttgggtcccgcctgcaaagagaaagaagcaagcccctccttcctctcccatccttccggcctccctccagcgccccctcctggccaagggcagcggaaatcagccagcaaagcagaacaaacagggttttgagtcccagctcgggcaccacaaagcagagggtagaagaaaggtttggagctgggagaaaatcatttaataaccagccccaaggctatgactcatttagacccccagtctgtgcagacctggggccactgcctctgagccagtgcacaccgggtactctggagcctctgtcttctgatacatgggtcagggggaatgcaaaatgattcaaccactttggaaaacagtttccttctttttgtttgtttgtttgtttgtttgtttgtttgtttgtttgtttttagaccgagtctcgctctgtcgcccagggtggggtgcagtgacgcgatctcagcttgctgaaatctctcctgggttcaagggattctcctgcctcagcctcccgagtaattgggattacaggtgcccaccaccatgcgtggctaatttttgtatttttaatagagatggggcttcaccatgttggccaggctggtctcgaactcctgacctcaggtgattcacccacctcggcctcccaaagtgctgggattacaggcgtgagccaccacacccgacctggaaaacagttttcctataaagttaaatatgcatctaccatatgacccagcaactctctcttagatatttacccaagagaaatgaaggcacatgctcactcaaacatttatgcttgatgtttgtagcccctttgttttaacagccccaaactggaaaacaaaaaaaaaaccctaatgtttatgaacttgtgcatggaaaacaacttatgttatatccatacaataaaatactacttgacaataaaaagaatgaataccgatgtacatatcaacactcatgaatttcaaaagcgttatactatgtgaaaaaaaacaggcacaaaagatcacatactctgtggttttgtccgaaatttcagaaatggcaaaatactgtgatagaaagtggatcagtcattgccagggcctgggggtaggggaaggagattggctgcaaagtgtcctgagggatcttttgagataatggaaatgtcctatataatgattgtggtgctggttacacaactgtccaaacccatggaattgtatactttcagttggtaagttttactgtgtgtgaattgcaccttgataaagctgattttttaaaaattgaagtagaacgctgttagaagtggtgcttcctccccttgtttctaatgccaccctcttgcaagcccatatccaagtagtggaccaaggcatcttataaaaacataaattcaatcatatcactccttgtttaaaacacttgaatggtttctctttcctctttgaatgaaatcctgagaatcaccatgacttacaagcctatctgtcctgctcactgaccctgacatttggagggcctagagcaatgggacagaggcccatgtaccacgattctaaatatgtacagttaggaatcaagccaatcaactgctaaaaagtaagttctatccttctttgataaatgtaccttcatgataaactggaaggccaggttcaaatgtagagtttggagttctgtcccagaatgtaaggttaacgaaaggcagacgctagactatagcctactgccattgcctttccacccccggatccatctgaaacctccaggctacctgccaggccgctgtagacatttgtgtccataacctctggggaccgaagacagcactggagatggaatcagagaaactggatgtgaaacatgtatctcttggttttccccaaattgtacttgattctgtatgtgtgtacatgtttgagcatgggtatgcatgcacgtgtatatttgcatgtgtgtgcatgcatgtatgtgcatttctatatgcctgtgtgtacatgcatgtgtgtgcaggtgtacatgtacatgtgtatatgtatgtgtctctgtgtacatgcctatgtgtgcatgtgtatatgtacatgtgtatgtgtatatgtgcctgcgtgtgcatgtgtatatatgcctgtgtgtgcatgcatgtgtatgtgtttatacatgtttgtgcatgtgtatgtgtgcctgcgtgtgcatgtgtatatgtgcctgtgttgtgcatgtgtgtttatttatgtacctcaacagcagtgtgagctacctgagggcagcagttgtgctgaattcatctcaatatcctttctacctggtgcagagtgatactagatgaatgcttgtggagtgaataaatgaatgaatgagggccagtacagcagttattaagtgtgggtcttgaagccagactgatgtgaggtccaaatcttactctgccggtcattaagcaagccgctttggtttattttcctaatcccgtaaagcctgggtttccttatctcccggtggggataagaataccactattttatgggggttggtgtgaggattaggtaacaacaatcagagccaacatggaccaagccaggctgtgggccaggcactgtactaagggctttgcaaatgctagctctcgtgctcctcctggcaatttcacggtgtaggggtggttacacagtcaactctcagagtgacttggctgttaccgtatttatgatggtggagaggagattcaggattcttagcccctgggggaagcttcccctgagtgcagctcagattctggctgatagggctgtctggagaggttgtctgagccagcaggctgcgcgctctgcctggccagctgcaacttgactctcgacttggccgggtccttctagtgcggcttatagcattcaacctcctctaggtggcgctgcggagcggggactcggctgctgatcgcggcgccccctggcggtctgttcccgtcaacatttagattaagcgcagagccggttccgccagggaagtgcgcgtcccggtgcccccgcgtgatgagagcggatgacagattgcgggaaaaagttagaatgtaacgttagttgtatgacagagaggaccaagctgtgcagcagagggagacagaaaagggagggaccaagccacagcaaggaatgatcgtcaataacattaacgtctagaatttattgaccacctgctatgcgcgagccactgtcctaaacatctggtattcattcccttagttaacacacctctagtaagtgcgtgtctcaagaacagtgtctgtgtttcatttagggcctagcacacagtgggtgtctggcacatagtaggttctcaacacatttggaaatgaataatacaataatcctgcaatttttctctccaattaataatgtagaggcaaatattatctccatttagaaaactgaacaatggtcggagagtttgcacaactaatgcgtgacacagcgagggcacacgaggtttagacccagctcagccgtgtgccagggcttctcagagaagagaagaccctctgccttcagggagtttgctgtctaattggccacgtctacaccctccctgcctgggtggcatgccagggatggctatttatggctcagggaggaggtccagtgaagttcccctcataaattataaagggagacacatgtgggtcaagattggggaattcagtgtgtgagggatccccaggaatcttacactgtccaatcagggattttccttctcttaccctggagagtggctgatgtaggcagtggggatttgctgagtacctataatgagctctcaagggtatctcctggtcctgtagaagaggctcacctcctccctatcacagagttccagttcctatggctggagctctcagccccagccgctggctgctcaaaggagagtttcctcatgtccaaaatgggggctatggtttatcttgtataccccagcacctgcatgaggaaggactgaaaagtgctgtgcacttttgtgattcgcacatccagtccccattcaggctctggggatcccccaggcatggtcttggtgtattagactttttcctggagatgtgattatgaatgggcattagtaagtggtgttatgcagagatgcccttctctgaatggcctctggtatttgttttttgagttcttgagaacatatatattttttggtattccatggtctttatcattgtcaggctgtcactgaactgtcgcttgcatttggctgcccctggtaattttcttccttcccctaactcactgcttcaagttcttgagttggcaggaagagaggaccaggctccttttatatttcttctgtgaataaaatatgccagtgtcaatgcatagactttgagctatcaattctaaccattcaatggcttttctctttttttggtttattcacaggctgtgggatgtggaggttatcaaaaatcaggtctccataagtgagaggtcacttcaggcatttctttgcacttatccaaaaaagattccatccatacttgtttaatggaacgtgtgaagagcttggctcctcttccaggtcatccctctgcctcattctccccctgcagcaggagcagcaagagcccggttctggagtgggagtagaaggtacaggcattgctgcagcggcaggacaggagcccattgctgacagagtgcctggcctcaaattacactgtatcagagctcgggcataaaattggcagcagcgttctgtgtatgaggagacagagaaatacctgtattcagcagaaccacgggcagggacagaagaaaaggagagaaagaggggaggaggggaagagctggcccgtcgcgggctcttccctggacatctttgtcccccaggtgcagaggtggcttcccagtggctgagtcagggccacaggaggtttcttggggggttgggggggccggggtttggagggcaagccatgaaaatacctgggaaggtaaacttgagggcttaacccacctgaaacacacacatacagatatacacactgaaaacgattaaaaaaggaataagaaatgtccatgtgtctaggcacttttatacagttttctattaattcctactacaactccattaggcaagactgtttcacagattggtgaagaagaaaggttcaaaaaggacatgttatcttgcctgagttcacctattataaatgtacttgtgtttatactcatttgtcaccgactgcaacctaaacatctaaacacattctctcacagccacaatgccaccactatacacattatatggtcttttatagacacaacacaaatgcacttacacttgcctatgcgagctgtatgtgtttatacacaaatatgtgtttccaactataggcatatactacacacacagtttacacaatcacctacaaattctgtatcatgcttgcttgctaaaattgttttgccacttcctgtccttcctgaccaactgtaggccaatgtcctcctcttccctcagttatggctgtgtgcttgcacctgttggtacttacagacacctgcactaataaccctgctctctgtgtttcatttcatcctctagcctgggagccccgagacaccagcaactcatcagacttattgtttgtattatttctagttctttgggtgtgaattcttcatgatgtggaggctctgagctgtctttcacagctcacgatttgtagttttggtctgtgagttgacagagtaggccctgcagagtcactgactccaagctgtttttatataatgcctcagcttaggatttctgcaccacgtgggtagcttatatcggggccttacaccagtgcagagggcaggcttgaggctgatctggtacacacgtcccttgttccacccatggactgtgagaggacctcagctcctgccgtgactctaggctgatggctgagaaactctgttcccataatcagttctgacacccactttacactgagaactcagatttgactttctgctaacagcaggacctgtggcctgtacctagtcccagatttggcattaaaatctcagcccaacaatgcatatccaatcttggttttcccatgggctgttggccacgttcctctccccctggtatagattcctgacccctctctttgatcctacctaaaaattatgctttcttgttttttttagctgggacttgtatgtttaaagtagtttaaaacaactttctgctctgcatgtatgaatacgagtgtgtgagcgtgtgtagctggcagggagttactgggtgtggctgtgccaatgactcctgtggacctcttctcagagaagtcccttcagaatcaaatacccatacctgttaggagctgcagtcactgactggcagcgtttcattcattcactgaatattggttgagcacttgcaatgtgccaggcacgctgctagccaaggaggcagtcattaaacatacagataaacaaacaaatgtgagatgacaatagttatgagtgctctgcagtagacgtgcagggacctgtgagagaatgtagtagggagggccttaatttagggtgtgtggtcagggaaggcctcactaaagatgtagcttctaagctgagatgcaaaggaggcagtgaagagctttttccagcagagggaacaccatgagcataggccttggggcggacgtcttagaacattctagaaacggaaaggaggccagtgagaaaaagggagctcaggagcagaggctggggaaggctgcagggcctcaggggcattggaggcaggcagggcaaggactctgaactttatcctgagcacagggtgatggggcaggagagtttaagcagggagggtgaaactcactctgattggcagccctgtgaaagaggattggctgggcatggagatctaaggatgaggaaaggatatcccagagtgccagggcgcgcaaaccaaacttcacactctaggaagacagaggccagaggaaccaggagggcttcctggaggaggtggcatttactctgggcctaagagatcacaggaaaatggaggccagcattctaggcctggggaagagtttgggcaaaggcttggcagtaagagaataaaggtggggcttgatgggccagaggataagtgactcctcaaggtcacaagacaccctgatgactgggaccccatctctgatggagcaaggcttctgatacccaactgaggcttggcgccaaggactgacatcaaggaagtggattcctgcaaacctggcacccgagggtccacttcctcaatttctgtgcagctgggaggtgaggtaagaggaagtgtgggccacaggctaggcccagagagcctggaggaggagcctctgccagactggagagaagcaggcctgagcctccccaaaggcagctcctggggactcccaggaccacaggctgagacgagacgcagggtggctggaggaagtgagaggtgaactcagcctgggactggctgggcgagactctccacctgctccctgggaccatcgcccaccatggctgtggcccagcagctgcgggccgagaggtgagtgccggggtgtggccgcccccgggccttctcactgctcctcataggccttagggacaaaggccagtccttctgcagtccctgatcaacatgagaggctggggttgagtcagaacccaaatactcagaaatgcaacctctcagaactgctttaacgaaactttgagctgtggctcaccaccctcagacacaaatgagaacactgaggctccaagagtgggagtgacttgcccacggtcacacaacgagtgaccggcagtgtctggagaggaatgcaggtgtcctgggtcccaggctggggccctttgcttcacatggtgatcagcaatgactttccatcttctgcgcaaacagaattcacagaatctggcttgttcttccgctaatcagggcttgcctcaaatgtcacctcctccaagaagccttcctgacagcccctacctcattgctgtctgaccctttgccctatttcccttttctgcctggttcttatattacaggaataatattatatgctcatttattattttttcttgaacgttggctcccccatgagaagcaagctccacgaggctgtgtccgttttgatcgctgctgtatcactagaaggtagctcatccctattgagcaccaggaccaagggctcaataaatgttgctgaatgaatgaataaatgaatgaatgaatgggtggatctttgagacggaaaaggtcttagattcttctagtccaaccttgccattgtacagattggaaatctgaggcccagggaggataagagacttactcagggtcacagagagtgactggcaaggttggggcttggagcacggcctcaccagcatctagcctcgtcgcttgggaagcattttcagaatttttcctcagtagccaggtctgagctctaagctgcgggggccctgaggacgcaaagcctggcccctgcaccccctggattggaacagcaggtgacctctgttacctacgtggaggccactcagggggtcaccagagacaggccaggctggtgtgtgcctacgcggggaacagaaggcccatgttggggcctggggctggaagtagaacctgaagcgtgggttggggcaagggcagcagaagcaaatgcctacaggggagtccacgtggccttcctgagcctcagagcggggtgcaggagctgggtaaggctggccgacctgaattccttcctcccctcacatgctcctgggggacccagccgcacgcaaactcgaatcttccggaagcagcagctgtttgaggcttgggcacttcctgctttctggggtacagggttcaggggatgacacggagagctgaccagcaggactgtgcactccctcccccactccctgtcccctttcagctgccttagccctcagagggggagggactgcttttcatgaggccttgagccaggtactaggggcatgggggctccctgtacctcgaaggtcttatctgaaagcgagcctggattgttctgcttaaggtcaaagcagagagtacaaggagagggcgcaggttcgcgcagcggggactttctagaaccccaaggtgagacatccaaagatggggagggctgccttaggggtggcaagttcggttccaacagacatgttttgagcacctactatgtgccaggtgccagaaaacctgccctggctgccctccaagggttcttccaacctcggcctcccccagggcaggctccaaaacctcccccaggccaggctccaaagtctgtgaactgtgcgagtgtgtcttgagccagaacatcccggcccagtagggcctgggtgaggtccccaagggagcggatattccaggggacttccggttgggtttgctgctcttcttgcccgccccacaggcagccaggccattctcatgctgcccatcaaaaaactctataattgcagacgacggtagtggccgtgtattgagcagtactgagcacctactgtatgccgggctctgttctgggcactgggatgtagggtgagcagagtccttgccctcatggagattttagggctgtgtttgttacagatgggactgcatgaccacccggagacataagtacttctgcctgtccccattttacagaggagggaaggagcggagcacagctaggaatcttcccaagggagcttgatcttcttgtccccagtgctgcgcctatgcctcgagcatctgccaatgtctgtcctgcttgactccttcctcagcccccaccaccccagggaaaactcgaggtccctctgcgaggcatcaaggcacctcgtgagcgggccctgcctgtctctccgactggtctctcatcacgttccacctcccgctctgtgctccagccatgctcagcaacctgcggttccctgaactgagcagctgtggcctttgcacttgccgctccccctgcctgaaatgcctttgctgccgtcctgcaaccaactcctctttgctcttcccggctgatcactggtgctgctgcttctgggaagccctccttgaccaccctcagcccaaggatgccctctgacggcgcatgagcctccacagtacaagctcctgctcccaatctctcctgtctgctgcatgattgattatttgagggaatataataatggccaggctcctgttctagttcaaaatgccacgtgcttttccttcccagcactatgcccatttgaattatgtcattatttgtttagtgtccagtgtccccttcccttctccttggagctgtgagatctgagaagcccatatgtcttaatgggcttagaacagtgtctggcccacaggcagtgccacatacaggttcgctaaaattataattattttagacggagacacaggctgagaagggctgggaattttttaagttcacacagcaagttgccgggaggctcagagtgcagggcagtatggcagtgtttggtgacaaatttctggagccagactgctactgcttgggctcaaatcccagcttcccgacttactctggctaattttactgtgcctcagtctcccgatctgtacaaaggtgacactgtcttagaagagcacctggcaccctcaggaaacaggcagctgccattcttattacccaacctgcctgccgccctgctcagggccgtttctaccctttaggttccttcctgtgtgccccccacccccaccttcccacctgatcgtactgcagaggaaattacctaggacaagcacagcctcaggggagaaagtggaggaggaagcttctcccaagggtatcaccacaggggcatgtgtggaaagtgagtggggctgggaggggggatttccactacctgcccactgctatcctgagtcacctccatgtggcagccccctgaattctgatgcagcctcagattctaggtcatgtgggtccggcgtggactgggactactgtgtgtagactccggaggtcccagccagctctggggccttggacttggcagcccttgcaatcccccaaccaccgccacccccccacccccgccactgtttcccctgtttcccaattgccgcaccagaagaatcatagttgcttcttgtttccttgtctgtctccaagtggctggactcagtgaccactcagagactcctggctgtgccttctcctgctccttggaagtctgtttcttcttcccctatctgtccctctcagacccctcctctgttccctgataggtcttcactgagtcaagagcgggggtcttagccacaagccacaggcagaaggttattcctgcctcaccacttttagtcgagacctcgagacccccatgctgagatcctgagctataaagcaggcctctcaaattagcatgccccaaactgagtccatcaactctgccccgtgtccccatcctggccagaagtgtgggtgtcactcttgacagtgccttttctttcacctccacatccaaacagtgcccaacctctcctgatcatgacttaggaacaacaagaaattggtaatgtgtctgttggaaatgcattaggctgcagggaatggaggaactgaccatggcttaaacaaacaggggattatttggtcacctaacaagaagtccactttgggaggctgaggtaggtggatcacttgaggtcaggagtttgagaccagcctggccaacatggtgcaaccctgtctgtactaaaaatacaaaaatcatctgggtgtggtggcttgtgcctgtaatccaagctacgtgggagactgaggcaggagaatcacttgaacctgggaggcggnnnnnnnnnnnnnnnnnnnnnnnnnnnnnnnnnnnnnnnnnnnnnnnnnnnnnnnnnnnnnnnnnnnnnnnnnnnnnnnnnnnnnnnnnnnnnnnnnnnnnnnnnnnnnnnnnnnnnnnnnnnnnnnnnnnnnnnnnnnnnnnnnnnnnnnnnnnnnnnnnnnnnnnnnnnnnnnnnnnnnnnnnnnnnnnnnnnnnnnnnnnnnnnnnnnnnnnnnnnnnnnnnnnnnnnnnnnnnnnnnnnnnnnnnnnnnnnnnnnnnnnnnnnnnnnnnnnnnnnnnnnnnnnnnnnnnnnnnnnnnnnnnnnnnnnnnnnnnnnnnnnnnnnnnnnnnnnnnnnnnnnnnnnnnnnnnnnnnnnnnnnnnnnnnnnnnnnnnnnnnnnnnnnnnnnnnnnnnnnnnnnnnnnnnnnnnnnnnnnnnnnnnnnnnnnnnnnnnnnnnnnnnnnnnnnnnnnnnnnnnnnnnnnnnnnnnnnnnnnnnnnnnnnnnnnnnnnnnnnnnnnnnnnnnnnnnnnnnnnnnnnatgtttggctcagacccgtcatgatctatcaccttggggctaggcacatggccactctgaacaaaaccagtgcttggttagccaggaagaagcagaggatacagtaaatgctcacagtgtccaccaaggttggtggcccttgtgtctatctcctcctgtccctgctgtctggctcacatgcacacaatctcttaatcagaccacttcaggacctcccagtggtgctctctcccctaagtctccacccattctttcctccccacacacctgcctgagctggcccctaaagccaaaattgtatttatgttttactttctttctttctttctttttttttttttgagatggagtcttgctctgtcccccaggctagagtgcagtggcatgatcttggctcactgcaacctccgcctcctgggttcaagcgattctcctgccttagcctcccaagtagctgggatgatgggtgtcatttttttatattgcctgcctcagcctcccaaagttctgggattacaggcatgagccaccattttactttcttccaaagtatgttttactttcttctgaagccctacatgactccccattgcctacataagttccctacttggcccttgggaccctcagactggcctcacctgcccactcagtctcagatcacactggccccagccatacagatccgggcccactccgcaggtcatgctgctcccactgcctggaagaccctccccaatttctacctggcagatgcctattctaccctctagacctgctcacatgtcatctcctttttgaggatttccccaacctgggcacaattaggcagtctctctatgggggtcccatagcgctccatccagggcacatgttgactttgtttacatctgtgacccagggcctaggacagggcctggtatggagatgtttgatgccttattcccaggtgaatctgtgcaattgacagcaatgtgttagactataatttggctattgctatatggtcaccagcttcccattcctacactcaatatggccaccagcttcccattcctgcactcagtatggccgccagcttcccattcctgcactcaaggcctgggctgtgtcttgttatctccgtattcccagggtcagtggctggacctggcctgggaaggggtgctgagagacgaatgttggcttcacaacattagtttgctttgcactctacctcatacccggtgggcccacaaaacacatcagggtgataagcaggatctcttttcccctccttcgcacagtgactttgaacagcttccggatgatgttgccatctcggccaacattgctgacatcgaggagaagagaggcttcaccagccactttgtaagacagactcctagtccttcacccaacaacctctgaacttccacccagctgacctctgaaccttgccctctgacctctgaacctccaattctctgatctcttaacttctatctcagtggttctcaacaggaccgattttgcccatttgacattaccctgggagattctgattattgcatcttggggcaggtctactccacatctagtgggtagaatccagggtgctgctaaacaccccactgtgcacatgacagccctgtccccagtaaagaactgtccggccccagcataatactaagattgagaaatcctgatcgcgtcctttgacctcagaacctccacctggagagtcgggggtgagggactttagtgttgcccccacaacacccctgtcatattcagacacagatggagggggcatcctgcgcccacagcacagccaggggcaggttcactctgcaccatgacctccaaggcatggctcctcatttcttgggcctgaatgtgtgtttggcctatttccaagggctcttgcctctaacactaggtctcacttcctctctttttccagttttttttttcttttcttttctttttttttcgcaaagctcgtctgcttctggggcgccagccttttgacttgacaggggtctccttctccagagacccttctgcatccttatcctcatcatcttcctcctcctcctcctccccttttcccttccacctctttttggcttgtgctcctggcccctgagccctccccacaacctctgtcctccttaggttttcgtcatcgaggtgaagacaaaaggaggatccaagtacctcatctaccgccgctaccgccagttccatgctttgcagagcaagctggaggagcgcttcgggccagacagcaagagcagtgccctggcctgtaccctgcccacactcccaggtaggcggccactcccgtcctgctgctgcagagctgctgactctccttccttccagggcccctgacactgttctgtgatttgatctcaaccccagtgaaaactgttcatgtagtttatagcccccactcccggcagttacaggctgccaagccctccctgcatggctccccctgcctcacgccatggcttccaccccaagcactctagcctcacagccccggagctctgatgaccatcgtggccactcgctcctgctgtccactaccaggaggccacagtctggagcacttcagcacctggcctcccttcctcagagacaggaatcccccagtctggtccctaaacacactgactcacctccctgcccaccctcagcttcctcccacgagaccagccctctgacttcatggtcttggcttccagcgtccctgtggctctccttcttctcctgtcccgccaggaagctgggtggcctcaagcctctgcttgcaaacagtctccccgccccctggcctcctggtccttcctccccagctggatcctaacgcgcaccttggacagcgccaagcccttagctgctcagcacctgccccgcaggaggaaaccccatcacgaatgggttacacgggggtggtctcagcggcgcccttcgtgccctgcaagttagagacagggacaattgtctcccttccccaagcctcagggacccttccccaagctccaaccccatctccagtttgttttttctgtctctgtttctgtctctctctgtctcagcatatgaccccgctccttctcatccagccccaccaaggaacttgaagctccccctaggagtcttgcctactctaagccagcctcccctctcaggctccatcattttccctcctctctcttttggggctctctcctgacaatctacccctccttttccttgtatattcatcttcctcttgatataccaactccctctgctaagcgtctccacagcctcaaccctcttctgtctttaaacaatcctgagccatgaaacagcattcttacaagcctccctgagcctccgtgcccccagggcccccaaagttctctttcttcttcctttggcatcaaattcacgcactgtctcaccttggcatggccatcctctccttaactcctcagcttggtttagctctgactactccactgaaattcctctcggtgaggtgggccatgacccatcaattctggcttccatggccagtgccaagcctcatcttcacacccccactccttcctctgttaagctttctccaacctcctgaggcaccagtgtctcccaatccccttcctagcttactagagactccttcagcttctctgttacagaatcaaccttctctgctgctccttggaaggtggggatcctctgagcagacatcctctctcccctgccttgtcttctcattccaaacactcaccctggcaaactgacccatgtctgggacttaattgtcacgtttttgctcctaactcccaatgtctagctctagcccagaccctcctaccgccgccgccatcacctctgtccatctcctggacaccaggagccaggcaggtttcagacttgcttcctcgtaggggttctcttggtgaatggttccaccagtgcgcccacatgaaggcacctggaggggacatttgtctcttggtagcccgtcatatttccttttcctccagaacatctgccttgagcttgaggaattgttcattcatccacttaacaaatgctcattcatctgggcatgattctagacccatggttcttaactttggtggtatgtggacgtgccttgagagatggaaagaatcctggttcctgagtcctgcccccggagattctgatttaattgctctggggcaagtgctacacagtgagatatttacaagctccttgggtagcttgaatgtgcagccggtgttgccactgtcctgggtgatgggggtacagctgtgagccaagcaggtgaaaatcctgctctcttagaactaagagtcgtgtgtgtgtgtgtgtgtgtgtgtgtgtgtgtgtgtgcgcttggatgaacaggcagtaaataaaaaagtaagacaagaaaaatatcagctggtgatagcacaactgagaggatgaaagttggatggtgccagagtggccacttcagtgctgtgaaaagataacagggaagaatgctgagccatcgggaaggggctctggccagggttcctggcctgtaggggcagccctgagccccggggccatgttgggccaggctcctaggacagctctttgtctcttctcagccaaagtctacgtgggtgtgaaacaggagatcgccgagatgcggatacctgccctcaacgcctacatgaaggtaccagtgggccttgccaccttggcacgtggaagggcatgcagtattggtgggggagcccacgtaccatccctgggtatggctttgggaactggggctggctctctggctctgatggccccatcttcaatccctaaaggcctggtctggggagtaaaacaggatgcgtccttagggttccagagataggagcaggagcaacggagaaggtaaaagagccacactaggaattgacaagtcttcatttaatgctccaagccccacaggtgaatgtctatgccaggagttaaaatacaaaggtgaattccatccagtgtctgcccccaaggtacccactgtcctatgggaatgccaacaggtggatcataagatcacacggagacatatgtgtgcctccatcatgggggtgtggccaagcaggccgcaggttgctcatatagcatctttgtgcaaactagagtaggcctcctctgggacaactcactcccttacgtgaacatgggctggattttagctacactcatgggtcttggctgggggcccttgtgtattctccgacttgcaaactctgcatctctatgagatgggagcgtagaggaaggagcatcttaaaggcagaggccaaggtggtcaggaaaggacttccaccagccacagccatccaggaaaggggcagtgttcctcatgaggtggcagtgagtgcaccgtcgctagagacctgatagtgacctcaggaagctggcaagcgaagccctcctcccagcccagcggcatcctcacagctggagagcgctgggctaggatcctttagtcttgactctgacactgactggctgggtgatttggggtgagttgcccatcctctctaggccttggttttcacacttgtgaaatggggcagtgccctctagtatcacaggagtgaagttgggatctgtcgagaacaggatgagaaagtgctttgtaaactgtgaacctgcttccagaatgtgagagatcttgactcctgatggagggaaggagcagatggagggcagaggaggtgggaggaaggaggagagagcaggtagctgcaggaatcctgggctctgagcagggaagagggagggaggggagctgggtgggctccagctgctccttcagggtggctgaggctccacccttctccccctgggctagaataggggagtgggctgtgaagggagggagggagggaaggaggaagagaaggcaggaggcgaggctggggaactggggctcctcattccacacctggtcttagcaaccagcagcccagaggatccatctctgcctctttgtgtccaattgggttcctggaagccagagatcattcagggcaggaatctctgccatggccaccccatcctgtgcttgcataccctcagagatggggagctcactaccactccgccctgacccaggctgcctgtcccattgttgggcagctatgagaaaagcccaactctctgtaagtcctacccactggtctcaccccgccctcatgaagaatgtgaatcacatgataatgacaactgcctggaactgcgtgaagagctttgactggcaaccaggagactcttgatacacgtttattgataaatgaataatcttatttaatcccctcaataacttgtgagttaagtgtgacagagcagttaggtaggtgggatgagatttgaattcacatctctgtgactccagggtttgagctcttacccactgtgcctcgttgtaatgaaaatcacagtaacaatgatgacatctaactttgatgggcacctggtatatgcctggtgttgttctaaggattctgcatgtatttactcatttaattctcacacaatcccacgagggagaggctattattgtccccattttattaatgaccatctggagccaggtttgcccaaagccacccagctggtgacaggcagagctgggattcgatcccaggagcccctggctccttaaacacctcccaggctgtccccatatgacagccttttccgggctctgcatccccagttcctctcggacaaagttccccgaccccacctcatcctgctgcccccatgggatcctctgcagggctctgggtgcctctggagcctcagcacccaaagccaaccctcagtgtccccagacctgtgcgcttggagtttggtgagatgaccccgccaggctctgggtgctcgcgtcctcacagcttcaaagtctttgcatcgtggtgggtgtaaccagcttggatgaaacaaggacactagggctcaagtccgggccctgtcacttagctcggctcctctgggccaggtactttccctctccaagcatcagtttcctcaactatgatatgagataaagtatcaggaagcattttgtaggctataatgccaccaactgttgttaatttgggttattttgggagccccccacccccgccaactgttgtctcaccttaagctttgggtagcctttagtggcagatggctctgggtgccccagctctgtcccttgctaggctttgtggccttgagcatatcccttcacctctctgatcctaactcaagggatgtcatgagatggagcaagggcgcgcatgtgatacccacctggtaaagtcaccgccgggtcatgttagttgtcatcaccattactgctgtttctggagaactttaagtcttttccaaatggactcttctcaagcccctggtccctctcctgaccttggacccaggagcagagcttgtgaagtgttaccttcagcatgctgagttttcttattcttttaaacaacgcatttctgttatcaggcatcatgcattagtaaagagaggagggctgatgtcagggctcggggacgggacatctaggctggggtgtccagatctttctgctgactaccccaccggttctgctgtctcacccacacagagcctgctcagcctgccggtctgggtgctgatggatgaggacgtccggatcttcttttaccagtcgccctatgactcagagcaggtgccccaggcactccgccggctccgcccgcgcacccggaaagtgtaagtgaccagcccctgggcttccacatggccagagccctgggtccctgctggaaaagcatctcttttccctgaaaggagagaaggaaaatacagatcagccatatccctggacactccaggatgatttgatttattagatgggtttagaaagtcatgttcaggcttggagggacagagggtgtgtgcctttcaatgtgataataaggattggaagacgaggactgggatattgactccagagagtttggtgccacagcaactactggggatagcccagaagctctgggtgcctggaaagaattgggggcagagaggagggaaaagctgccccatccacaaacattctctgagcatctctgggaatgccttctccctggtgtgttggagctccatggggccagctatggctctagttgtatcatgctggcctccagagcacactgttcctcccttattccaaaaagcccatccttcccaccaaaaattcaagccactcgtagactgctgggcttccaaagcccaggttgctgctactaagaattctgggaaaagcaggacggagctcctgagctccccaccagctcctccctctgcttcctcccaccaatgtctccaagggtcctctccatgcctggcatctcccctgtgcacacaggcaggtgtgtcttaattccagctgtgccatgtggcagccgcaggccccagagcaaggcacttcacctctccaaccttcagtttccctcagctgaaaaattagaaacagtcacatttacatcagagcttggttgtagggagcagaggaacaaacacatctgaacactttggcaagtgaaaggcaccgaatgagcgtgtatccccttccccacctgctttctgagcctggcttcctggtccataaagaagggagaacaatcccacctccaaagaggttgtgaggatttggggacaagtgtgcccgcccagaggagcaattgcagccacatttcagcatcttctgtctcctctgccttccctgctccttgcaaggggctcctctggacacaggagcaggaagctgggccctgagagaatcacagggctaacaagcccctcttctctctccacagcaagagcgtgtccccacagggcaacagcgttgaccgcatggcagctccgagagcagaggtaacccccgcccccacgctggccaggctctcacactgtgggcatctgccttggcccacctgccagccactgggcctctcctgctgggtgctgctgtgtgcctgggacagtgctgggcaccaggaggaaggaaggggttacagcctcagcctctgccactgggggtcccccgagcccagctaaggggagggcatgtgaccagcgtgcggagccagaggagaatgcttccatccctacgctcatccggacagtttacctgggcctcctctgagtcagccctgccttaggcatggaagctgcagagatgactcagacaaggcccagcccacgatgaagcctggggaccagggtgggtgctcagcccagagagttcgaacccttcccctgtgtgctcacccccaccaggtttggaaggagcacccatcctggagtcagggagacctgggttcaattcccagctcctccactaaaaaatggggtggcctcagagaagtcgcttattctccccaagcctcagtttctacatctgtaaaatgggagactaaagtatgtaaggcacttctataggaactcagtgagtgttctctccttccctccttactgcacgcttctcctcaggctctatttgacttcactggaaacagcaaactggagctgaatttcaaagctggagatgtgatcttcctcctcagtcggatcaacaaagactggctggaggtgagttcagaagtgaggatggaggtgagattgaaggtgaggttggagggaaattaaaagtgaagatagaggtgagggtggaagtgcaattggaggtgaggatgaaggtgagggtggaggtgagattggaggtgaggatggaggtaagagtggaggtgaggatggaggtgagattggaggtgaggatgaaggtgagattggaggtgagggtggaggtaagagtggagatgagattggaggtgaggatggaggtgagattggaggtaaggttggaggtgagattggaggtgaggttggaggtgagattggagatgagattggaggtgaggatggaggtgagggtggagatgagggtgaaggtgaggatggagattgagggtggagatgagggtgaaggtgaggatggaggtaagggtggacgtgaggatgggggtgagactggcagtaaggttggaggtgaggatggaggtgagattggaggtgagggtggaggtgagactggaggtgaggatggaggtgagattggaggtgagattggaggtgagggtggaggtaagggtggaggcgagagtggaggtgaggatggaggtgagactggaggtgagattggaggtgaggatggaggtgagattggaggtaaggttggaggtgaggatggaggtgagattggaggtgaggatggaggtgagcgtggaggtgagattggaggtaagattagaggtgaagatagaaatgagaatggaagtgggattggaggtgagtttagaggtaaagatggaggtgaggatagaggtgaggaaggtgagtttgcaggtaaggatggaggtaagattagaggtgaggatgggggtgagtttggagttgaggatgaaggtgaggttggaagtgaggttagagatgaggttggagatgaggttgggaataaggatggaggtgaggttggaggtgaggatggaggtgagaatgcaggtaaggttaggctgagattagaggtgaggctggaggtgaggttgcttcaggcattgtatgcttcagagactgaggatggtctcagaaggcctcagggaagagatgctatctgaggatagccctggagatccaggcaggttggggagcctgcgggaacaaagcctttggggaggcaggtgttcggtggcagcagaacattcttggagctcatgctttggttctgaccctgaaaaatgggttgcttagggcaagtaagttaacctactgagtttagtttcttggtctgtaatgggtgtctcagcaggggcactattgacattggggccagatggtcccttgtggggttgtcctgagcattgcaggctgttcagcaatatccctggcctctccactagatgccagcagcactgctaaattgcaccaatcacatggctctccagatatttgctcctgaggggtgaaatcgcaaccacttgtgtaatatgggacaacagtacataccttgcccacagcagtaaaagctgctgatgaagagtgtgaactcagagtcagcctgtttgggccatttcctagctctgtttttcactagctttgtggacctttggaaacttgctcaaacttgcggtttccttttctgtaaatgtttcttcatcggcttcctggaaagggtaaaggaggtggtagatggccagggctcgccccagagcctgggtgtgcggcgcctggccaggtactagggtcattaggagacttaaatgaaacttcaaagccagggactttcccagtcactgctttgtccctgtgtggcccacagaagggctgtgttctgactcagtgagtggaggtgggaagtggctgtgttgggccttggcctgggaccagccttttgtattaggtcctgtcttcagacttagtgctcctgtggggagtgttgaaggaggttctgggacaggcccagaggcagggtcagcccccaggggtcccaggacctttaagagttgggttgggtccctagcgtccaggccctggagaggagctagtagtgaccactggtttagccagtttagcagtttccattttaccctaatcatagatctccatctcaggaactcagggctcttacagaggcctgaggagtatctctgggccactttccagaaatagaaaacatgtattgccttcctgttttccggaaagtcctacttatcagtatgctggctaacttctggcctcaggttgaaggtgggggcagaggggcagggaggggaccactttgagccttggttaatatgtttgtaaaatggcatgtaaataatccatgttccatagggtcgttgtgaagatgaacagaacacgtgcccaaagcccaggccatggccgggtctgggtctgatttctggctacttggtctagagtagaggcacagttgtatctgatgaatgaatgagtgagtgagcgggatcagcagcaggcccttcctcacccctcatcctcttcctcccctgttctattttcctctgtaacacctgctgccatctgactcactggataggtcattgttcacagcgcgcacagcgtgtcattccccatcatactggaaactccgtgggggcaaggacttattattatttttttattattattttttctttgagacagagtttcactctggttgcccaggctggagtgcaatggcgtgatctcggctcactgcaacctccacctgccaggttcaagtgattctcctgcttccgcctcccgagtagctgggattacaggcccgcaccaacacgcttggctaatttgtatatgtttagtagagacagggtttcaccaagttggccaggctggtctcgaactactgatctcaagtgattcaccagcttcggcctcccaaagtgctaggattacaggtgtgagctactgcgcccggcccaaggacttttatctattttgagagcccagagcctgtcacgtggctggttctcaagaagcctttgttgaatgaataagtgaatgagtgagataaaagcagctttctatataaatccagattctggcatattgtaaaacccaaatataagccttcttagaagtgaccagctcagcgaacttcctcgctttccctcctccctctacagaagaagacccggacctcatctgcctttccccatcactagaacggggctgagggctctgaggcgtggctctgctgcctctcctctcaccagcatggcatcccttctcttcctctgcagggcactgtccggggagccacgggcatcttccctctctccttcgtgaagatcctcaaagacttccctgaggaggacgaccccaccaactggctgcgttgctactactacgaagacaccatcagcaccatcaagtctgtggcctgggagggaggggcctgtccagccttcctgccatccctacgaccaccgcccctcacatcaccttctcatgggtccctctcccactccaaagcccccagtggctcccagatgagccacaatgctgtaacaagccatcaacgtccagggtggcctggccagcctcattcccctttcccccaccccacaccccacttccagcctgatgcctccttactccagcctgtcacccccttagggacatcgcggtggaggaagatctcagcagcactcccctattgaaagacctgctggagctcacaaggtgaggggctgggaatggggctggggagttagatactctggagaagagagcgcagggagaaatgttaagcactagtattaaggtgctggggttttgcgtgtactttgtcttctctttttatccgcagcccagccctgcaggttaggcagcatctccccactttagagatgagcggggaagctgcagagaggttaggggaactggttgagctcacgcaggttgtgggtttagatccggatctgcagctggagctaaagtctctctggctaaaagccttggacttgaaccatccactctcagggactcactacccccccaggtccaggacattgctggacagttattttacagaatggtaaccgcattgctacatttctgactataaaacttgtaccaactcattatatattaaaaaagaaatgtcagtaaccatgtcagaaagatacaaagaagtgaaatcacctcatatttttactcccctcgttatgtgacgtacactcagatttcttcagtacttacaccccacacacacatgcacacacaaaagtcactttggctgcacaaaacctttcagtggctacatcattaacatggccatgcgcttttgctggcctcttaggatttcttctgcttttttactactctaaacaacattgtacagaccatcttagttaacctatttgatgacttatctgatcatttcctttgaatgattttcaagaagtggatttggggattaaagcatttgcaagtctcataggcttctggcccacactgtgaaattactggtagaaagctcagatcaatttctacgtacaccagccaagtagaaggatgcgcatcttcccgcacccaggccagacagttcctgtccttacaaggttctcctcaatagcctcacacaggtgtctctctgaggctttatacagccccactctgtgcccagtcaaacccactcttcttcacaactcttaatcctttagcacatttatacacgagacatttcaggctgtgccactaatttccgtgaaagtctcttctccttctcctttttttttttgagatggagtctcactctgttgcccaggctggagtgcagtggtgcaatctcagctcactgcaacctctgcctactgtgttcaagtgattctcctgcctcagcctcctgagtggctgggatcacaggtgcatactacctcgcccagctaatttttgtatttttagtagagacagggtttcaccatgttggccaggctggtcttgaactcctaacctcaggtaatctgcctgcctcggcctcccaaaatgctggaattataagcgtgagccaccgcacccagcctcttctcccttttaggcctcgatatccccatctgtacaatgggaggttagattacttggatgacacgggcttgtatcaggctctgactttttcttactcctggcttcaggacataaaacccttttcaccccctctccctacccctaccttacgcttaggccctttgattatccctgacttttcccatgcaggcgggagttccagagagaggacatagctctgaattaccgggacgctgagggggatctggttcggctgctgtcggatgaggacgtagcgctcatggtgcggcaggctcgtggcctcccctcccagaagcgcctcttcccctggaagctgcacatcacgcagaaggacaactacagggtctacaacacgatgccatgagctgacggtgtccctggagcagtgaggggacaccagcaaaaaccttcagctctcagaggagattgggaccaggaaaacctgggaggatgggcagacttcctgtctttgaggctaatggacccgtggggcttgtaatctgtctctttctactatttacatctgatttaaataaaccattccatctgaaaggggcaggctgcgggaaagagtgtctttcatggggagtaaaataccatttaatgagcatccacagggcgtcatttatatctggcaggggccctggctctgagacccctgtcctgccaccccatttccttgctctgtccctgtgttggggggaaacccgagggtccccaagccataccctttctccctcccactgctccccttttcctgggattggccacctgccccacagaagtgatctgctctgggtgccctctggggttccaccaatgccaagtcctcggctgtgtgatgagggtcagaagctctcctctgccttcctgtctctgctgctctgtggagcaggaaggcaggtctcggggttggttgtctccactgtaagtagacacagggggaggactctagtctcatccaggaggagggggacacaaagcaacgggatctccttctctgagctgaatctccttctatcctaatctaccaaaaattaaacaggtgtgactcccacaatggtggtgtgaggagcttggtggaccctctccccagggaaacagcagtttaactgatgagaaatacttaaaatcaactgtttaaagtctctggaaattgttctaagggcacagagcacatggagagacagtcgttcaagtagatcattacgtctcagtaagaacagtgagtcggtggcattggagacacatcgtgttcccgtccccccacccccagctccatgtgatggaaattccactccagatcctccactctggatggatgcagccaggaagatgggctccctcatccctcagctcctaaccttccacagtttcaccccaggaggaacaggctgccagaatctcttctctctgcagccctgtgttgtagaagcactattccaggtcattacagcagagaggactgagtttcctgcagttcccatacaaagtaccaggaaattgagcttaagcaacagaaatcgattgtctcacagttctgaatgctaggtgtccacagggccatgctccctgtgaaatatgtagggaaatccttccttgccttttcttagcttctggtggtttgccggcaatgtttggtgctccttagcttgttgatggatcactctgtcttcacatggcattctacctgtgtgtatttacagtgtcttccctctgtgcatgtctgtctctgcatccaaattcccccttgtataaggacacaagtcatattggactagggcccatcctagtgatcttcttttaccttgattacctctataaacctcctctttccaaataaggtcacattctggagtactaggggttaggacttcaacatgtcatttttaattccaacataacacttcaacccatgacactccctttacccactcagctccccctcctagggcaagggctctgcaataggcgtagcaggctaagaatgctgaaccttaaccctctggtagagcaggggttccatgctgagaggggcaatctgagatcaagggataccgtcctccactccagtgcccactcacagaacaggacatcactcctggagaagcaggctgatttccccatccccagctctgatgcagtggtgcagaggttctgcccagggagagagtcaggccttagggatggagaattccacagcttttcctgaggggactaactttatttgggaagcatgccgaagaagttggcaaaaataatggaaatcttggtggccggcaattaaggaggggctagatactaatgccatcaagagaaatgtaaggccagaaatttaacagagaaccagataaagaaataacgaagaatagtggttctaggactacagtcatccctgaggactcaaaagattgtgctctcgtgccaggctgcacccacacagcagaaatcagagtggaaagtgtggcagacttgaaatcattccctaaaccacatacagatccatcagcaaaacacgctagctcaagaggctgaagcataacctctgaccaagcaatggctgaacaataagctaatctgacacagaggggattcttaggaaggcaggcttaaaaataaaattacactcatttcctggtggtctggaagactgcgtgcacgcccaggccgatcactctcaggagtgactggagaaagaaacgctgggctatcagtttctgactgaacatggggcaagtttgaaccctgtactgtaaaagatgtcttcaaaccacattcacggccaaaagtaaggggtgaaaccaatctaattgagggggcttcagcacaacttttcaccaataggtggtttatgcagacccaggtgcaacctctaggaaaccaggataagagagaaaaaaaaaaaaaaaaacacaagaggaaaaaatacgagcgggggcatcataagctacacattgtaggggaaacggccctcacaaaattagttcagtgaagccactaaacaagtaaacagataacaaaccaaataacaaaaacattaagccctagagggaataggagagcagcatctagagttgcttcaaaatataatctaaaatgttcagttcctgatatggtttggatctgtgtccctgcccaaatctaatgtctaattataatccccaggttgaaagtggacccttatgggaggtggttggatcatgggggtggattctcataaatagtttagtgccattccctccgtgctgttcttgcgatggtgagtgagatctggccatttaaaagtatgtggcacctcctctttctctctctcttcccctgctcttgccatttaaaacttgcccgcttccccttcatcttccaccatcattgtaaggtttcctgaggcctcctcagaagcagaagccactaggcttcttgtatagcctgtagaaccaagagctaactaaacctcttttccttataaattatgcagtctcaggtgtttttttgtttttttgtttgttttttgttgttgttgttgttgttgttgttgttttgagactgagtcttgctcttgttgtccaggctggagtgcagtggcatgatctcggctcactgcaacctctgcctcccaggttcaagtgattcccctgcctcagcctcctgcgtagctgggattacaggcacccccaaccttgcccagctaatttttgtactttcagtagagatggggttttgccatgctggccaggctagtcgcgaactcctgacctcaggtgatccacctgcctcggcttcccagagtgctgagattacagtcatgaaccactgcacccagctggtatttctttatagcagtgcaagaacaggcaaatatagttcccaacaaaaaattataagaattgcaaagacacagcaaagtgtaatccatacacaggaggcaaataaaagcaggcaaaggaaactaaaaaaattgcctttgagggaaggattcagatgctggacttagcaaacaatgactttatattaggaatatgtttaaataactaaaggaaaccatgtttaaagaattaaaagaaagtattgtaacaatgactcttcaaatagagaatatcaatacaaagacataaataattttttaaaagagaaccaaattgaaattctagagttgaaaagaacaataactgaaatgaaaagtccactagaaaggctcagcagtagatttgagttggcaaaagaatgttagcagagaaagtataagcaaactgagagatagatcaatagagatgatgcaatcttaagaaagaaataaagaaaaaggagtgaagaaaaatgagcagagcatcagagaaatgtgggacccatgaagtgtaccaacatatgcataatgagattaccagaaagagaggagagaaggagacagaaaaaggatgaaaagaaataatgattggaaactttccaatttttattttttaaaaaaccaccaatctacatatccaaaaagctcaacaaactccaagtagtaaaatacaaagaaagccacacttaaacacatcatagtcaaaatgttgaaagccagacataaagagaaaatcttgaaagcagaaagagaaaaatgactcaccgcataaaagggaactacattaagactaacagctgatttcctgtcaaccaagaatcttacataaaacaaatctaccactcaaaaatgaaggtgaaattaaaacattccaaaataagcaaaaactgagaatattcattgttaagcagacttgccattacaaaaaaatattaaaggaagttcactctaatggcttcattttaacttgattagctctgtaaagactctattttttttttttttttttgagatggcgtttcactcttgttacccagactggagtgcaatggtgtgatctcagctcactgcaacctctgcctcctgggttccagcaattcccctgcctcagcctcctgagtagctgggattacaggcgtgcaccaccacgcctggttaattttgtatttttagtagagatggggtttctccatgttggtcaggctggtcttcaactcccgacctcaggtgatccacatgccccagcctcccaaagtgctgggattataggtgtgagccactgcacccagctaagactctatctcatgtaagatcactgcattctgagatactggggttagaaattcaacatatcttttgggggagaatacaatttgaaccacaacagtacactagaaaatatccatttaagaaaaattttaaaagaccttgcaaggtgtgatctcccaaacccagttatttggcttctagtttgttgcctgaccacattcaccaagaaaattttctgccacaaaacaaccagacctcagctaggacacaggctttgaggaattatgagcctcacaagaagcaaaggagttctccaatgattcttccactccccaccaaaaaaactatgataggagctgaaaccagaatacagagcagttggggtgttgttttctggagtgcagaggcagtccagaaggcagagccatggggaggccatgagatagggaggctgcgccaggggcttccgtgccaggccaaggccctagatgtgagagctgaggtgatctggagagagtggcattcctggcttcaagcagaagcggaagagggtctcctctggagtaaagtatttccagtttaggctggcaggagttaccctgattaatatcaagcaaaaggctcatagtcaaagatcaccaaatctctgtgagtgagaatgagcagaggcaataaacaatagctttagagccccagggactaccgattaccgaattatgtgactgaaatatttaaagaaataaagaatgtaaccataaagataaacaagcaaaaaagaatgagatggcaaattttcagatgtgtaaaagaaagaaggtatgaacgcatctatgtgtgtgcgtgtgtgtgtgtgtatacacacatatatattattcaatgggtgagttggtaaaaagtccaaatttatcaataattctgataccataaacatagatggattccatgcatgagttaaaagactgtcagggccgggcacagcggctcatgcctgtaaccccagcactttgggaggtagaggctggcagatcacgaggtcaggagtttgagaccagcctggccaatatggtgaaatgccgtctctactaaaaacactaaaaaattagccgggcgtggtggtgcacacctgtaatcccagctactcaggaggctgaggcaggggaatcgcttgaactcgggaggcggaggttacagtgagccgagatcgcaccactgcactccaacctaagcgagagagtgagactccgtcaaaaaaaaaaaaaaaagactgtcagattgaatttttaaaaatctaaatctatgtaagtgtcatatgtacaagagacacacataaggtaaaacgtcatggaaacattgaaattaaaaaaaaagtatgaaaaaagatattcctggaaaccactaaccagaagacagctgggacgtctatacagattcacaatctacttttgtgtaaacttggtactcaaactcacttggtagcactccttgaccctgagctgaatagttaacgcttaccagccatatgtgtctctgctattcccttattttttgatgcttttggggggatgaattttgattttatgtacagctcaagtaagaacccgtcaaaatcagaagtgaaaagcttttgctgataatgaagctgatgaaaattgcatgggtggatttgttaagtaacggtatctgatgaaaaccttggctctgatcaattggcagtgggcttcagtctgctctgcagaatggctgatgaggacccaccaattgcttacaccctgttgactgttcttggcgtaccatgtgctacaggaacacaccagatacatttgacagtaactggaaaaagcctacatccaccatctttgtaggatgtatccaatttaccgtctgtcagtacacatactagacaccatgagtaaccagagaaatattttctgactgattaataacatttttataccagcggtacaaactcattgcagggattctagcttggaaaaaacaattgttagatgttatcattcctaggaaactgctatgcatactccctccctaaacatcttgtggaaaagcagtttcagcttttatttccccttgggggatatgtgcattttagcctaagtgcaaagaagtttagaggaagggtaaacactttttttcaggctgtgctcttgctaccatcacagaacctaagattccatggctcccgaaagagtccagtgttaagaatgtcatgtacacaattgacagtgtttggaatgatgctgattatacattaacacatttgacacagattctgactatactgatgcttgcaaacaagtctgtacataaaggttttggagaatttttgtgacttatgagaaaatgatgatgtaagacttcattcttgcacaaaaagtttatcagctaaaagtggaaataactgagaaaaactgataccaaagaaatgtcaaacaccgtgattcagctattgttcattctttgcatagtggggaagttgctaacaaatacagataagggttactgtgatgataatgactacacaattaacacagagtaaaacattcccattaaaaatatggtgaatatttaattagttaattatgggccttgagcaattctcaattaatggtgagcaggagataatggaaaattacccaattagaaacaggcttctcaagtaggcatctcatggaataggatgctggaagaagtcattaaaaaggcaattgattgcagtgtgcttcttggtttggggaccctgttcctggtacatcatgagatgtccaggagggaatatctggcatcctcaagttaagataattcaaggtgtgtttaataaagggactgtttacaaagacgtagacaacacacaggaaaacctcaaggaatagttcaatatcccagggataggacctcagacctgttacattcctgagcccaaaggaataaagggaaggagtgtctacaaaacctggaaggaggggattgtgtagacatggcctccttagaaggactggtgatctttgactggtgggcgagattgacccaaagtaaccccgctgggaggcgatcagaggaacaaataccccgccctcctctccttccccattctgatctcaggggaggggttccctactgccaaacaaaactggaagccctagggccaggctgttgtaatccacacaggttagcttcccaaggtagacagcagggcggaagagagcacagtgtagatgtgagtggggaaaaatgaagatatctggcatcctccacccgttttgcccctcattatatacgcttatccttcagccaagtgaaaactccatgttcccaagacagggaacacaggaattcccatcagctattttggcattttaggatcatatccatacagacatactcccacctgaaacccaaagtgtgagctgctacgggtattctttatataaagcagtggaggcatgatgaatgaagtaatacacgcatggctgttagagcccctgcatccgcagctggtcacaggtccaaagctgatattttgagctacctgttcccagtgttcatttcatgttcctctttcctctgccagtacatgggtcaaataagggtctttatgtggtggagcaactcaagacttcattcctatgggatctgagttctcgttagacttgtctttatcagattgcctcagtattccattgaccaggactattgggtaagaaaatactgagaggcacctatgtgaatcacggtgggaccacacatagtcctgtctacctcctttcttttttcttttcttttcttttttttttcttttttttttttttttttttttttttgagatggagttttgctcttgttgcccaggcttgagtgcagtggcacaatttcagctcactgcaatctctgcctcccgggttcaagtgattcttctgcctcagcctcccaagtagctgggattacagacacccagcaccaagtccagctaattttttttttgttgtatttttagtggaaacggggtttcaccatgttggccaggctggtcttgaactcctgacctcagatgatccacctttctccacctctttctccacctattggctcagtggcacaaggagggtcaaatggttcaaatttctaaaaaatatcactttgtatatgccacaagttttcatatgccctattgtcatttgattgtaactactatttaaattcaattaggatattatctgagctatcagttacttagaagtgtgttttaaaatttttaaacatgtgaggattttattttttgtttgtttgtttttgggggtttttttgagttggagtcttgctctgtcgcctaggctggagtgcagtggcacaatctcggctcactgcaacttctgcctcccgcgttcaagcgattctcctgcctcagcctcccaagtagctgggattatagggatgcactaccacacccagctaatttttgtattttcagtggagatggggtttcaccatgttggtcaggctggtcttgaactcctgacctcaagtgatccacccacctcggcctcccaaactgctgggattacagttgtgaaccaccatgcttggccatgtgaggactttaaaaaaacacttttttttctttttctttttaaagtatccttgcacgttttgtgcagattcatttgtctttcatgtccttcagttttagagacctagacaagctaagggagtgaatcaaaatcaacagataacaagggtgaggtttctcaaactgaagcatcctgtttacgtctggtaaaaccacctccacagaacatcatgcgtcgtcaggtataaggcctaacacctgtggtgtgtagtgatacagcattttatctcttccttgtagcccatgaaataaagagaaagtttgttcaagagatgatggtagttttcactgcactagagtgttacaagaaagtaagtgagaacaataaccccaggacagggaggctgctgctcactgctccagcatctgcagcattctcctgaggggacacattaaggcagcagagagacatttcccaaaataaacagcgagggaaataaaggtgtaggagtcacagtgaggaggctaaagtgactccatcttggaagctaatccaccatgttgacttctgattaaccccggttctgggaatgccgctaagatttccattttatctattgttctttgtgtgagaacatatgcctaccataaatcctgcctttagatcaaattaagcgtgctaccctttctttatggtgtataatccctgggtctgggggataatagtgtagagatctacctgtctcacagctgcccaagaccatccttcagtccctaagttcccaaataaaaccatcctataacaagctggattcgtctgcttccttctttggtatcctggctcctatgtttgc

SEQ ID NO: 1562 - DNA, 2692 bp, Homo sapiens
gaagcaggcctgagcctccccaaaggcagctcctggggactcccaggaccacaggctgagacgagacgcagggtggctggaggaagtgagaggtgaactcagcctgggactggctgggcgagactctccacctgctccctgggaccatcgcccaccatggctgtggcccagcagctgcgggccgagagtgactttgaacagcttccggatgatgttgccatctcggccaacattgctgacatcgaggagaagagaggcttcaccagccactttgttttcgtcatcgaggtgaagacaaaaggaggatccaagtacctcatctaccgccgctaccgccagttccatgctttgcagagcaagctggaggagcgcttcgggccagacagcaagagcagtgccctggcctgtaccctgcccacactcccagccaaagtctacgtgggtgtgaaacaggagatcgccgagatgcggatacctgccctcaacgcctacatgaagagcctgctcagcctgccggtctgggtgctgatggatgaggacgtccggatcttcttttaccagtcgccctatgactcagagcaggtgccccaggccatccgccggctccgcccgcgcacccggaaagtcaagagcgtgtccccacagggcaacagcgttgaccgcatggcagctccgagagcagaggctctatttgacttcactggaaacagcaaactggagctgaatttcaaagctggagatgtgatcttcctcctcagtcggatcaacaaagactggctggagggcactgtccggggagccacgggcatcttccctctctccttcgtgaagatcctcaaagacttccctgaggaggacgaccccaccaactggctgcgttgctactactacgaagacaccatcagcaccatcaaggacatcgcggtggaggaagatctcagcagcactcccctattgaaagacctgctggagctcacaaggcgggagttccagagagaggacatagctctgaattaccgggacgctgagggggatctggttcggctgctgtcggatgaggacgtagcgctcatggtgcggcaggctcgtggcctcccctcccagaagcgcctcttcccctggaagctgcacatcacgcagaaggacaactacagggtctacaacacgatgccatgagctgacggtgtccctggagcagtgaggggacaccagcaaaaaccttcagctctcagaggagattgggaccaggaaaacctgggaggatgggcagagaagcaggcctgagcctccccaaaggcagctcctggggactcccaggaccacaggctgagacgagacgcagggtggctggaggaagtgagaggtgaactcagcctgggactggctgggcgagactctccacctgctccctgggaccatcgcccaccatggctgtggcccagcagctgcgggccgagagtgactttgaacagcttccggatgatgttgccatctcggccaacattgctgacatcgaggagaagagaggcttcaccagccactttgttttcgtcatcgaggtgaagacaaaaggaggatccaagtacctcatctaccgccgctaccgccagttccatgctttgcagagcaagctggaggagcgcttcgggccagacagcaagagcagtgccctggcctgtaccctgcccacactcccagccaaagtctacgtgggtgtgaaacaggagatcgccgagatgcggatacctgccctcaacgcctacatgaagagcctgctcagcctgccggtctgggtgctgatggatgaggacgtccggatcttcttttaccagtcgccctatgactcagagcaggtgccccaggcactccgccggctccgcccgcgcacccggaaagtcaagagcgtgtccccacagggcaacagcgttgaccgcatggcagctccgagagcagaggctctatttgacttcactggaaacagcaaactggagctgaatttcaaagctggagatgtgatcttcctcctcagtcggatcaacaaagactggctggagggcactgtccggggagccacgggcatcttccctctctccttcgtgaagatcctcaaagacttccctgaggaggacgaccccaccaactggctgcgttgctactactacgaagacaccatcagcaccatcaagtctgtggcctgggagggaggggcctgtccagccttcctgccatccctacgaccaccgcccctcacatcaccttctcatgggtccctctcccactccaaagcccccagtggctcccagatgagccacaatgctgtaacaagccatcaacgtccagggtggcctggccagcctcattcccctttcccccaccccacaccccacttccagcctgatgcctccttactccagcctgtcacccccttagggacatcgcggtggaggaagatctcagcagcactcccctattgaaagacctgctggagctcacaaggcgggagttccagagagaggacatagctctgaattaccgggacgctgagggggatctggttcggctgctgtcggatgaggacgtagcgctcatggtgcggcaggctcgtggcctcccctcccagaagcgcctcttcccctggaagctgcacatcacgcagaaggacaactacagggtctacaacacgatgccatga

SEQ ID NO: 1563 - DNA, 1020 bp, Homo sapiens
atggctgtggcccagcagctgcgggccgagagtgactttgaacagcttccggatgatgttgccatctcggccaacattgctgacatcgaggagaagagaggcttcaccagccactttgttttcgtcatcgaggtgaagacaaaaggaggatccaagtacctcatctaccgccgctaccgccagttccatgctttgcagagcaagctggaggagcgcttcgggccagacagcaagagcagtgccctggcctgtaccctgcccacactcccagccaaagtctacgtgggtgtgaaacaggagatcgccgagatgcggatacctgccctcaacgcctacatgaagagcctgctcagcctgccggtctgggtgctgatggatgaggacgtccggatcttcttttaccagtcgccctatgactcagagcaggtgccccaggccatccgccggctccgcccgcgcacccggaaagtcaagagcgtgtccccacagggcaacagcgttgaccgcatggcagctccgagagcagaggctctatttgacttcactggaaacagcaaactggagctgaatttcaaagctggagatgtgatcttcctcctcagtcggatcaacaaagactggctggagggcactgtccggggagccacgggcatcttccctctctccttcgtgaagatcctcaaagacttccctgaggaggacgaccccaccaactggctgcgttgctactactacgaagacaccatcagcaccatcaaggacatcgcggtggaggaagatctcagcagcactcccctattgaaagacctgctggagctcacaaggcgggagttccagagagaggacatagctctgaattaccgggacgctgagggggatctggttcggctgctgtcggatgaggacgtagcgctcatggtgcggcaggctcgtggcctcccctcccagaagcgcctcttcccctggaagctgcacatcacgcagaaggacaactacagggtctacaacacgatgccatga

SEQ ID NO: 1564 - DNA, 33468 bp, Mus musculus
  misc_feature (1578)..(1778): n = a, g, c, or t.
  misc_feature (2792)..(3115): n = a, g, c, or t.
  misc_feature (9060)..(9290): n = a, g, c, or t.
  misc_feature (14053)..(14178): n = a, g, c, or t.
  misc_feature (17998)..(21098): n = a, g, c, or t.
  misc_feature (27074)..(27502): n = a, g, c, or t.
cctccaaatgccaccatactcagggctcaggtactcacattcatttcctagagaacagcgcggggcaggtccacacagcatctctggtttggatccttctccttcttcagatttatctgacaggtctctcagctgaagtgcccaggacagaagccctattctggggtccaaccatcccctctggttacattcatatatagttaagcaatactatgtctatgcctgccacattgctaaaaatgaacctgatatattatatgtatgtaatatatataatataataatataatatataattatatattaatataatataaaatttatactaatttatactaataaaatatgtaatttataatataataaatatataatgtataatagaatagaatatatatatcactttaaatttttatttactttttgtgtttgtgtgtggacacatgtgtacatgggtcagctccttccttctattttgtgagtcctgggcataaaactcaggtatagttcaggcctggcagcaagtgtcatctcgctagtcaggctagcattttgggtaccagataggagattctactactaccaagttccgaagactgtgtaatacatatttgcagtttgtccgcatcacatctgccctccacatcttctccttggtcacagctcatccctacccaccctggaggtccctgtagctgcttggccttttttcctgacttctgccccacccaccctggcctgttcctcatgtggccaccagagggcgggagcggaattcacatcctgcggtttttcattttatgtgtgggaaaaaaaaaatacaaagtagcgtcaagagtgtgtttctgggaccaggggctatgcatccggtgcgaatcatcccagcactactgcatccacagtgagacctccagctgaatccccactttcctttgcaggctaccctcatctccctttcccagtgagatgtctgtctgtttgtctcccagggagctctttgggaaagagatgttttgttggacaccgcacgagcttgttttaatatgttgcgggagccacataacatgttagctatgcaatgcacgtgggatttttttggcagtagaccaatcttctttcagggtccttcccctcctgccttctgaggctcctccctcccccctccccccccaaaccaggaaggaacacaaggcaggagagagcagagacctccagcggttggacagagtgagattgtgtacacaggcaaagccagtcagttccgggttcaatatgttcccgcccctcttgtgtgggcttccaggaagctggacggattgggactggggctgctgtaccccagcggggcccccaccccctttctggctgagtctggagtactagtgagaggtgagcaagggtgttagacctattttagagaagtaagcaggaagtagggacatggttgcagagaaaaggcagcagggcattgggtaagggcctgtcccagggtcaggccagagtccccggagagaagcaagaggcagttggttgggagagttagccggaccagtaggacagttcttatcatagggccannnnnnnnnnnnnnnnnnnnnnnnnnnnnnnnnnnnnnnnnnnnnnnnnnnnnnnnnnnnnnnnnnnnnnnnnnnnnnnnnnnnnnnnnnnnnnnnnnnnnnnnnnnnnnnnnnnnnnnnnnnnnnnnnnnnnnnnnnnnnnnnnnnnnnnnnnnnnnnnnnnnnnnnnnnnnnnnnnnnnnnnnnnnnnnnnnnnnnnnncatatacacacacacacatatatatatacatacacacacatatatacatatacatacatacacacacacacacacacatatatgcacatatatcttcagtcatggttatacacttctgtaatcccaacgcttgggacacagcaggagaatgaggttaaggccagcctgagcttcactgtgacactttgctttccacccctaccccaaaaggaaatgaaatatttaagagagagaagagtcctgggtgctggaacccagaaggggaaactatgaagaacaatagcttaggccagctcgactttaaaagtagtttagtaggaagcaggaagcctgtcactgtgaagacacacatcaccaggctgaacggctggctaatgggggccatctggagaaataggaagtaggatgtattccacatggatgggtgatatgagctgtcccaggcaagcaactgtgaaatgttaaaccaggaaacagggcgtagaaatcacagaaggatgcttctaaaacacggcccagaatggcagaaggctttctgggaagctcgcacccacccagaaatgattaaggaagagataggttaattagcgcacgacccatgaagctagaaccgactctcatgcctgatactcgcgatagaaagagcgcatttccctagtaaggaaatcagtgggaaaaaccaacgtaaaggatataaaggacaaggcacgagaaaacactgcggtgggggagaaactgggtgagctccaagctgactggaaaaatgctagctcagaggaagccgaatgcaaatcacaatcaacccactcttcttttcttttttgcctgcccgactgtcaaaaacattcgcgcccgcctgaacctctgagatgatgggaggttagaggaaggggctggctaacgcattgcctgccagcaggagcctgaatgagtcctggagggcagttaaaaacaagcgcctagccctgcacccaatccaatgacccagaggattgggggggggggacggggggnnnnnnnnnnnnnnnnnnnnnnnnnnnnnnnnnnnnnnnnnnnnnnnnnnnnnnnnnnnnnnnnnnnnnnnnnnnnnnnnnnnnnnnnnnnnnnnnnnnnnnnnnnnnnnnnnnnnnnnnnnnnnnnnnnnnnnnnnnnnnnnnnnnnnnnnnnnnnnnnnnnnnnnnnnnnnnnnnnnnnnnnnnnnnnnnnnnnnnnnnnnnnnnnnnnnnnnnnnnnnnnnnnnnnnnnnnnnnnnnnnnnnnnnnnnnnnnnnnnnnnnnnnnnnnnnnnnnnnnnnnnnnnnnnnnnnnnnnnnnnnnnnnnnnnnnnnnnnnnnnnnnatgggtcaggtcagctgatgaggggactcaggcagcagggacactagcctgtaagccaggcttttgactactttgtgggttcttctttattccacccttctgcacccttattccaccgtttcaacccctaatactaggcaagaaagaatgagagaggagaaaggggtaatgttattgttaaaagagttcctgctaattagggccatagagttccttggggcaagtttgagcttccctgtcaagatatctaacaactttcctcctcctcctcctcctcctcctcctcctcctcctcctcctccttctcctttgcacataactatttaacaaacagcaaccaatcaacaaacaacagcagcccaccaatgggtctttagcatttatatattctccgaaaagtccctagaattccaactatcacacaattgcagaaactatctgcagctggcaaaatcagaaccctgctagagcacgaggcatgtcggtcagctgctatggacaatctgaagcagtcccatttcccacacctgggattaaaacgaaaacatgttcttatagtatttctgtattttttaaagaatccaaaattctcactaactagccagagatattctttttgaaaatattttattttattatctttaaattatgtatatttgaggaatatgcatacatgtgtgcagttgcccctgaaggccagaagaggacgctatcccctggagagtactcgctcataatccctgagtcttctctctagcccctttaaatatgtttgagtttggttgtgtgaacatatttcccactcaaatgtaacagggaaatatcacaatgttgccaaaagctctaaaagcttttaaactatattgcttagggttcagctagtgggatggatgagtggaaggctagagtgaaggatcatgggttacctaaggttgagtgaagaaaggtcctcagagtctcaccctgaaccagtctcagagagtgcaaaaagctggggaccaaagagtagcagatgcagcagctagagaggtgatgtacctgaaagaggggagctccatccatccatccatccatccatccatccatccatgcatccatctacatctctgtgcatccacccatgcactcacccatgtgtgtatccattatccattcatccatcgctgtctatccatccacgaatgaaaccatccatccatgcatcatccatctgatccacctctccattcattcatccgtacaaacatacgtatgtgtatccacccatgtgtgcatcattcatccatgcatccatccatgcatctatgtatccatgtagccacccactgcagccatctgtgtatccatctctccattcatccatacactcatgtatccattcatctatcagtatatccattctacccatccctctactcatccatccatacatgaattcattcatttgcacaccatttatctgatccatcacatgtacacacacgcgtgcacacatgcatccatccatccatgccatgattcgcctatccatccatgtatgcatccatgcatctgtctgtctacctgtctgtctgtctgtccatccatgaattcattcatttgtgcaccattcatctgacccatcatgtgcatatatcttcataccatgatccaccacctatccatttgtgcatgcatgcatccatctctctctctctctctctctctctctctctctctctctctctctctttctccctctctctttctctctctctccatgcccatccacacaccctcccatctacctgaagtgagctaggggagctagctgcagaggggacaaggatgtcagatcctagctctgccacatgactaggtttctggtgaggaaagtccctgatggagggaatggcctgcgttcttctggggatttcctgggagaaagtcccctctctgagccctggttgtacctggtacagcctcccaggtggcatctcttgctcagctgtggagaggaaggagtgagcacgacagagtggcttagcgaggcccatagagctgcaaagaacagagaggggcagctcagtggctctggggaaggtcctgccaggctggtgcctgcctactgcttttcaccaattctttgggttaatctatcaaggtagagggcactttgacccatatgctgcccaccctgaactctatcccacacccactagggttagggtagaggcagctttccatttaaaaaaaaaaggtcatttaaaaaaattattccatttaaaagtgtttttggagctggagaggtggctcagtggttaagagcattggctgctcttccagaggacccgggttcaattcctagcacgtactagcagctcatagctgttcaggtccagaagatctgagactctcacacagacttacatgtaggcaaaaacatctatgtacataaaaaattaaaaaaaaaacaaaattacatgcttgttatgcgtgtatgtgcctgtgcatgccatgtgcaagtttagaagtcaaaagacaacttttctttgggggtcagggggaggtcaccttttttcttctgagttctggggattgcattcaactcaccaggcttggcagcaatcacctttatccccactgagccagcttgccagcccctaaatcaatctgtgtgtgtgtgtgtgtgtgtgtgtgtgtgtgtgtgtgtgtgtgtgtttgttgtggagggtgcacttttgccacggtgcctgtgtggaggtcacaaggccagctcaggactcaatcctagtcatccctttgctttgaggcaaaggctagccggcagtgagcttccggggtgttcctccttccaccttctgtctcacagtaggactgtctgtatcacagaatggtccccactctgcctgtcttttatgtggcttctgaagaagttcaggttctcctgctgtgtggcaagctttctacccactgagccgccatctcctctgcccaaagggatgttttcaaacctcttatttccacaacaatttaaagagtcagctctggggaggatcttgagataaagatcagctggctgtttaaggggaaagtgtttagggaggtatagcaattctaaaggtatgtgtggctgatgatatagcctcagggtttagaaagcaaagattggatgggggtttgggcagagctactgttgtagtggagataggacacctggccttggaagggagttctagccagatagtgtcttctttgtgacactaaaaaagactgagcactctcagcaagcatttctgatggtaaatagtttgcagctaacttacacccattcactaagaatgccacaagcctggtactcaagtctgtcatgccctcagggctcagcagggcacggtacatggtgcgtggttcacagttctttgtaagaaaagcatctttgggaggcataggcttcccctggcctgtggacatgagtgatacaccttcaaaggacacactatgaaaaaggagatcacaagtcaaaaacggcgtagcgctaaaacataaaacaacgcacacagaaatatcaagattggtaaattgtgtgtgagcatgtgtgcacacgtgtgcaggtcaccacccgtgagcccacgtggaggcagagtgagagtattgtggggaggggacagccaaacagattgtcaggactgtttaagcagggtgacagacagcacatcagaaaatattgttctctgtagcatctccgttcatatggaaaagtgttcggtgaacagaatgaaaactgaagccactgttaggaggagcagtggcaagcagaggtaatgggcaacagctctctcatgtttcatgttaagacatcagaagcgccttgttcaggccaggactgaggctccacgcctagcactgtgggcttatgcaaccttcccgtaaagagcccaaacaagccaaggaatgactattataacattaagaggaagaacactgtcacttaaaaaaaacaaaaaacaagcaagcaaacaaacaaaaaaaccaactagtgataaaactttcctctgtccactgtcaggtttgttagcaaatttcaaggtatctgtagcaagagccagcaaggaggctcagaggggaaagaacttcctgccaagtctgatgacctgagtctgatccccagggtcccacatggtggaaggagagaaccggcgacttccatgggtgtgtgcgtgggcacgcacacaaatacattttccattttaaaagcagccatgggtctctctttgtgccaggtttccacatacacaaatccaatatgcaaaggctgacatttccccttcatccaaggagtggcaaggaaattcaatttgagaattattagctacagtagtgctgagagtaataaggaagcaagaagtgaatcttttgaaaaaggtgcctgacctttctgggaggaaatggtaaaattttattgaaagatataaaggagaaggtgaagatgctaacaggcagacagaatgactatcacaaggatgtcaggtccctactcgctgctgcaggttgaacgcaggacagcccaggactcttatgtcatttgcttgagcttattccacagtgtagatggaagagcagagattcatcaaacactagaacaatcctgaaggaatgtaagagaggcacgtttctcctaggcttggagctggggtaactgaagcaggcttgtgtcagcccctgggtggatgggaggactagcagagaaaggggccaaggtttggtttgcaggtgacagtcttggtccacgaggcttcttgactgcccattcactgggaaaagataggtagaactttgtttaatagatggcactctgggatgatggtctgtgtccattgtcagcacgacagagtcacctgggagaaagacatctggagcacatcgatttgaggtgggaagatcagcccactgtgggtggcaccatcctgtaggctgggaaactgcattgtgttaaatgaagaaaggatctgagcagcaatgcgctcatcgttgtttcctgattgtgggcaaccagctgctccaagctcctgctactctgacgacttccccactgtgatggattctaaccttgaaccatgaaccagaataaaccctttctcccttctgtcgctgtggtcggagtattttttttttcatagtgataggaatagaaactaagaaagccctagagaaatcaaatcaacatctcacaaaacctactagcagcccctttgtcatctaaaatccactctgtgtatcaaggtcactgtctgtagacagaaactgtacacactttgtagaatatctttgtgaaattgcataggaatgcttaagaaagaatcactcaaagagtatcaatcattagggaagaaaaattaaagttgaccacatacaaataaacctttataaatatcacagcttcaaaaaaaataattccacatactggaaatgaactatgaaacggttatagcaattcacacttgaaaaatcaaacaccgaacttctccaaataaatatgaggggaaaaaatactccagtagagaaatggacaaatacacaaatagtaacttgtgtaataggaaacccaaaagtccaataaacaactaaaaacacaaatgcccaacaaaacacctgcaaacacaaacacccaaccaaacacttataaacacaaatgcccaacacaaggcgagtgtagttgatatcatcaaaacggcaagaagcctacgacagtttgtaggtaggattttcggtttggagtggtttcccagctaggatcttgctgtatcgctcgatggctctggctgccttggaactctcactctgaatcctggactcaagctcccagcaatccctttgtctcagcttcctgaaagcttagattgcaccatgctgtgagaaggtttggacttgccaaacttctaccagcttgctctactgcatctgtnnnnnnnnnnnnnnnnnnnnnnnnnnnnnnnnnnnnnnnnnnnnnnnnnnnnnnnnnnnnnnnnnnnnnnnnnnnnnnnnnnnnnnnnnnnnnnnnnnnnnnnnnnnnnnnnnnnnnnnnnnnnnnnnnnnnnnnnnnnnnnnnnnnnnnnnnnnnnnnnnnnnnnnnnnnnnnnnnnnnnnnnnnnnnnnnnnnnnnnnnnnnnnnnnnnnnnnnnnnnnnnnnnnnnnncaatttccccccttcctccccttcctccttttctcccctctcctctacctcttcccttctctctttccctccccctcctttgccttctctctacacactggcccttgcttaggcagcaccccccccccccccgggccaactttgtttgacatcacacgtcatagccaccagttttccctgctggtgactctgaggtcactctgtagctctcccttggcccatgtctcctgccttgctcacagcacctgtggttgtggtttgccttctctacagagcaggaactccaggacaacctggcttcctgcattttagagtcaccagctcccaacacaatgcctgatacacagtaggcactcaagtgtttgcccatgggagtcaggccaactgacttcttggaggatgcagattcttcgagagcaactttgtccctgccctggcttaggaagtgaatcttcaattctctagggtgcctgggttccctttggagcctaagtcaagtgcccttggtggcctgggcccaacctagcacctgtggggccccaggtcctcttccagaccgcatgctccaccccctcaaggctgtggggcagcagcttgggtaagttcctcttccgtttcctcccgcctcttgagctggggtgctgctcctcactgccgggtacctcctagccactccataccactggtgtccacagcaacgctcctggcccccaactgtcatccctggctgctgggcctcagatgcaatgcaggccatcaagtgtgtggtggtgggtgatgggtaagtacctggctgagttgtctcccacccctaccaggatgcctctgagatcctccctggtacacccacagattcagggctcccaggaggttctggggaaagtcgcttcctttccttgtaagggcttacaaggaacatttggggtgggtctggactgctccctgtccttcagcctaccccactccggaagctacttgggtggagggcctggactgtgggtggggtgctgctatttgcctgtaccctgagagctgggacagggctcctaccgggccagcatcagttcagggtacaggtacgaggagggaaatcagcagcttgcccttcggacctttgtttcccaggctggcccaggctctagttgctgtcttgctgggcctaggggacttctggcaatctccaagctttctgactctcagtccagcctctgctcttaaggactccagagggcaggctggctgcagccctgctaaagtctgatagtcattgtcagatcttgggaccacaggctctcataacccaaggcctgagtttcttcatgtgtctcccatatattccgacacattagggtgcagtcctcaagtctatcttgggtcccgctagatccatcctcacatgtactagacagccatcttcagttcgaaacggggaggggctgaggcctggagagctttcctggcttaggtcccaaggtcacacacactttggctctgctggtggcataggctatctacctcctcagctgactaggtccgacttggtcgctgctgcagccgccaccgcgctagggtgtcagccgttatctgtggcagctgctctgctcacttctgctttgtgtctgatctgggggaggagggggcggacacggagggccggaagtcaatgattctatgcattcaaagttacctgggtggcaggctggggcttgagggcagaggtttagggggcagggacagcagagcaacctcctcgagtgggaagtgacttaacggaattgtactggggaaggcccggagctgtccctctggcctctcagcttcctgctgaatgacctgggtgacctcccagcttggcagggagatagcttaaatggtggtcatctccatttatcccattctcttttgtatgtggtcaccgggctgtggctctctgtatgatctgtcttccaccaaccctacttaccatcacagagttcgttttacaggtgggaaagaccaaaactccgaaaagttacataacctgccttggaggcagaggatttgaacccaggcccctctgacttcaaagaggggcgatgggcagtccctaacagtcattagttggtgccacttctatggcaccgggttcagtgtcttagaagtatcagttattttactgggaagatgggcttgtccttgttgtctacatggggaaactgaggtacaaggtgcttaggtgacttgcaaagttgtgtagatggcaaatgatggaggcaggatctgaagcttaagagagacacgtgacagtcttacccagctctccagggtcctctgttcggccccatggtcatctgtgcctatcacctgtatcccacacactggtacatgtacagtactggagttctcctcagatgtgtggctcacacccatggctaagactgaagtcaggttctttatgggcactgcacggggtagagcacactggtatggggtgtctgggattgggagactggagcctgagtacagttcccgcctccccttcatcttgaccttggtgaaggggagctatgaccttggtctctcctgcatcttgtctcttgtctttcagagccgtgggcaagacgtgtcttctcatcagctacaccaccaacgccttccctggagaatacatccccactgtgtgagtggcttcttgggggctgtcccctgtgggggcctgagaccaagtaggctggtaaggctagagagactctccattgtggggaagctggctggtgatccgacatgcaacgcagtgacttatgctaagtcttagaatgtatgctaaggaggcagaggctccagaaggcagagggactgtggggtgggaaggcgtaaaaggacaggaaggaatatgtccttcaagccagccaggaggagaaagaggggtggagatgggctatggaggtgagggaggaagagtacctcagaaacttagcagcagtgtctggggacccgtgtgctggggtgggcacagtgctagctgtggtctgtgggaagcctatcttctggtgcaggatgtagccatccgctcccacatgatacacaaggagtccgcaggtgtcagaagagtctcagagcatccccatactcacagagcagctccccagcttcctgcatagatttcaagctcttcaagtatcccccaatcttcccttctagagatgttacccactgttttgctttattggatcaacgatccttaggcaaacctaccgcaggacctttgcaccagctcttctccctgccagaaatgccctagggtgatttcttgtctcattctcatacctacaccctccaggcctatccatggtgccctcctggaagccttcaaggctaaaggcctgtcaatcgccagaggagcttgccagctctctctcaagaccaaggacccatatgttgagaaggccttggcttctcaagaaagtggttgatacattgtgtaatatacatatgtctcataagtgatatctgtgcctcgaggtgacgagatccagagaagtcttcaccactagcatctagttagaatgcctttgggttggtggccctgtacaggataccacactagtgattgcattgggtcctcaagggaaatgggtgttacaatatcctgatggccaatagccaatagcagctatgaggcttgtccccctgggtcactcagcctgtctgccttcagtatctcaccggggccttcatttttatcttcatggaagccctgcctggagtagaaagcagagatatacagagggatagtatcctgagcccaaagcttcccacactatcaaaggagccaccacccaaccagtgccaaaccaaggctccgctccaagtccctagtccggctctatagggatccctttctggaacagaggattcagctgcctctaatacctggctaagctgaaggacccagcagggggcagccagaggggctgggcaggcagctggacaccgatttctgcccaactgcatcctgatttgaatgaagactaaaaacttccctggtacacaaagcatgaatgactcctgccattaggcttataagtcagagaggactgaggctagacctgagcaagaacaggatcaaaggggattatggctgaaggtcactgtcaccaggtgtgctgatgctgttcttgtccctgagtcaaggccctagcctgcctttacctgctcaggcagccccgagaacccacttgctcaaggatttccaagcactcactcttcctctgagcccacgagctcagtttccttttctaccagaggcaagccctggactgggagatccaagccttgggaagcagtgtccctgtgaggaggtgggaggtggaagtcagaggctttccagtgtcctagcggcccatgacagaccgcactgctggccagccggtcaggtgccgagggccctcaggtctgtccacgatcaatcaccatgtcctgttcaggtggtagctggggccgggctgtcactgggacttcctcctctgagatgaactttcttccaatgaggttggcacacatattctcagatggggacacctgcccgagaatggttctatgtcaagtgttagggacacagaggcatgtcagcagctccgtgctttcgggcgctgtgatgtgggctctcatcctgtctcctacctgactctgtccaactgaagcccacataaactttaaacttttggttttgtttttcccgtttgtggtaggatatatactcaggctggccttgagcttgtagnnnnnnnnnnnnnnnnnnnnnnnnnnnnnnnnnnnnnnnnnnnnnnnnnnnnnnnnnnnnnnnnnnnnnnnnnnnnnnnnnnnnnnnnnnnnnnnnnnnnnnnnnnnnnnnnnnnnnnnnnnnnnnttaattaatgaatttatttattttccccctagatgaacttttaaaaagaagaacttagctagagcctcaacctggcccaagcccttcatctggccccccctttatgcttaaaatccagtacaaggggttatcaaagctccccaagttccacctcacctgccccatctcttccagctgttcagtcctgtccacaatctcctgggctctcttggctccctgctctccctcagagagccccaggagcacgcccccctttctgacagtgttccctgtctgctgcagcccacccctcccactttatgtcttccccactgagaactcttcagggctggggcagagccgtgcgaggccaggaggctggtatatctagctcactcctgattctagagcaaaataccagtttctagaccatcacacagcagctgctggcagtgggcagagcaccctggccggtgggtggagcctgtccagtgctttgccaaccctctgctgttcattggctggcaccccccaatggatatcataagaagagcagccactttccatgcttctgagccgacctggggcctcagtttcctctctggtctcctgggtcatgtgagacttcaaggcctaatacgcgtagggaatccccttccacctgaccaaggaaggcacttgaagggcgctttgaaaggtcctgaccgttccctaccttctctgggtgtcctgaaagctcagaggagccaaaaagacagatgcctttgcctcaaggcatcttgggacgatagagggtcctgatgtctccagcttgccagaaccccacacagctaaggcacttgccttctgaccttgaccacccttgtctcccagaaggttcttctgagactcacaaggatgcttcccagagtaggcacacagcagccctatgtgccgaccacctattctggactagctttagggcagaaagtaacaagctgggttcccctgtcccccccccccgcccccgcaaggaatgtaattagtggggctgacctggctgaggcagaaaagtctccctggagtgatgcaaagagtcctgttgagggtgagaagcaagttaggatacgtgggactgtcctacgtaggtaagctggaataggaaggagtatttctccagatgtcagtgtgggcaacctcaggaggtgggtggtgtgagcctgccgggtgaaggaagagcagatagagaagctaggagctcgaggtcttagtgaaccctgtcatgagacaaggagtgggtgcatgtgtaagctcagtgaggtcggatgatctctagacccaggggcaggcaatggaggtgtccctaaatcacagctatggcagggcatagtgagcctgttggacacagcttgtcccttaggttggtcactcactggctgtgtaacctcgggtgagtcacgaagcctctctgatcttggtttcgctccacctccccccaccgtaccatgaggagcctgttcttttaacctaggtattcgattttactttcaaaagtgctctctccacttagcgtagaccactgggctggaacacccccatggctcagagtgttccctgtcccaacacgagcttgctgggctcctggtctagtgtttggcccacaccaatacaaggcttagacatgtctatgggtctgtctgtcccttggaactggccctagcacagtcacttgtcatatgagtggagagtgggtcatctgctgagtcctgcccctccaggaggctcaggacctcccttcaccttcccacaggcctgccaggagaacagctcactggtgctggcctggctgtgttccgtctccttcctgtttcccctctgacagcttcccaagtacaccttgcacctcctctctcacccaggattggcttcagggagacccagcttaactcagggacaagccgccactcaatagacaccgtgcgacccacgctaggtgtccagcatagggggaagattaagttcactctgatcaacctgggaaagaatctcacacaacccagcaatcccctttcccagggacgagaaaagggaggcagaaagaaaaaaacaaaacaaacaaacaaacaaaaacaaaaaaaaaaccaaaaccaaaaacaaaaacaaacaaacaaaacaaaaacccaactgatcaagacggtcatcctctttgtttacttgtacttaaggcatttgtaatagtatccattagttgtggaaacagccagttgcacggtgctgtgtgactttgggctggtcacagtccctctctgagtcctggcctcgggagaacaacactggcctgggctggaagtccgggcatctgggttcaaggctgacccgttcctttctgctccttacagatttgacaactactcagccaatgtgatggtggacagtaagccggtgaacctggggctgtgggataccgcaggtcaggaggactatgaccgcctccggccactctcctacccacagacagtgcgtacccgcccctgtgcctccttgtggtccctgtcttgatcctgttccatttactgctgatggccttcaggccagcagtgtctgctcagccctgagtctccctttgaggcctgggggggagggaggggcagagctagggtcctccctcagccatgctgccccgagtatcaccatgccccgagatgctagcctttctcagtgtgtgccaggcaggggctagtgtgcctggagctggggtaggcaggtggcctgctgcaggggactctgtggcttctgggtccctagagctgggctctctacccacaagggcaaagggagtcggcaggtagatggttatgggagccgagggatggtttcccagacaggaccctggcctccctatgctaacctgccctgttctgtatttaggatgtatttctcatctgcttctcgctagtcagcccagcctcctatgagaatgtccgtgccaaggtgagccacgagtggcctgggaagggtgctgaggaaaggggaatgggctatcctgggttaggagaggccaggggagagagggtcactagtaccacacaggaccaatgagaggagagtctccttgggctgtgtgtgtgttgtggggggaggggtgggacagtgagggttcctcctgcctctgagccctgtccctttgtctatccaacctcgtgcctcttcttatcaacacacaaactcgcttgactcttatctccaaaaaagtcttgccatttttttgtttttgcatgcctgctcagatcctgctctgccttgtgaccctcccgctaggggggctcttaccccccttttcctggtgccttgggcgtctttgtcccactccccactgctccctctcactctccactcccccacctccagtggttccctgaggtacggcaccactgccccagcacccccatcatcctggtgggtaccaagctggaccttcgcgatgacaaggacaccatcgagaagctgaaggagaagaagctggctcccatcacctacccgcagggcctggcactggccaaggatattggtatggggcttgagctcagagagagagggtatctgggggttggaggtgcctgaacacagccttgtcttagcgctatgctgcatggtcaaactctgttctcccaaccattgtaccagctgtgtgacctaggctggtcccttggcctctctatgcctgtgtttctctgtcacaaaggtataacagcagtgatggcttctgccatgtcagtgcctgggtaaaatgacttggtccacggtccccagaacatcacagcatgggatgggaggcatagcctatgattgcttggagcacagnnnnnnnnnnnnnnnnnnnnnnnnnnnnnnnnnnnnnnnnnnnnnnnnnnnnnnnnnnnnnnnnnnnnnnnnnnnnnnnnnnnnnnnnnnnnnnnnnnnnnnnnnnnnnnnnnnnnnnnnnnnnnnnnnnnnnnnnnnnnnnnnnnnnnnnnnnnnnnnnnnnnnnnnnnnnnnnnnnnnnnnnnnnnnnnnnnnnnnnnnnnnnnnnnnnnnnnnnnnnnnnnnnnnnnnnnnnnnnnnnnnnnnnnnnnnnnnnnnnnnnnnnnnnnnnnnnnnnnnnnnnnnnnnnnnnnnnnnnnnnnnnnnnnnnnnnnnnnnnnnnnnnnnnnnnnnnnnnnnnnnnnnnnnnnnnnnnnnnnnnnnnnnnnnnnnnnnnnnnnnnnnnnnnnnnnnnnnnnnnnnnnnnnnnnnnnnnnnnnnnnnnnnnnnnnnnnnnnnnnnnnnnnnnnnnnnnnnnnnnnnnnnnnnnnnnnnnnnnnnnnnnnnnnnnnnnnnnnnnnnnnnnnnnnnnnnnnnnnnnnnnnnnnnnnnnnnnnnnnnnnnnnnnnnnnnnnnnnnnnnnnnnnnnnnnnnnnnnnnnnnnnnnnnnnnnnnnnnnnnnnnnnnnnnnnnnnnnnnnnnnnnnnnnnnnnnnnnnnnnnnnnnnnnnnnnnnnnnnnnnnnnnnnnnnnnnnnnnnnnnnnnnnnnnnnnnnnnnnnnnnnnnnnnnnnnnnnnnnnnnnnnnnnnnnnnnnnnnnnnnnnnnnnnnnnnnnnnnnnnnnnnnnnnnnnnnnnnnnnnnnnnnnnnnnnnnnnnnnnnnnnnnnnnnnnnnnnnnnnnnnnnnnnnnnnnnnnnnnnnnnnnnnnnnnnnnnnnnnnnnnnnnnnnnnnnnnnnnnnnnnnnnnnnnnnnnnnnnnnnnnnnnnnnnnnnnnnnnnnnnnnnnnnnnnnnnnnnnnnnnnnnnnnnnnnnnnnnnnnnnnnnnnnnnnnnnnnnnnnnnnnnnnnnnnnnnnnnnnnnnnnnnnnnnnnnnnnnnnnnnnnnnnnnnnnnnnnnnnnnnnnnnnnnnnnnnnnnnnnnnnnnnnnnnnnnnnnnnnnnnnnnnnnnnnnnnnnnnnnnnnnnnnnnnnnnnnnnnnnnnnnnnnnnnnnnnnnnnnnnnnnnnnnnnnnnnnnnnnnnnnnnnnnnnnnnnnnnnnnnnnnnnnnnnnnnnnnnnnnnnnnnnnnnnnnnnnnnnnnnnnnnnnnnnnnnnnnnnnnnnnnnnnnnnnnnnnnnnnnnnnnnnnnnnnnnnnnnnnnnnnnnnnnnnnnnnnnnnnnnnnnnnnnnnnnnnnnnnnnnnnnnnnnnnnnnnnnnnnnnnnnnnnnnnnnnnnnnnnnnnnnnnnnnnnnnnnnnnnnnnnnnnnnnnnnnnnnnnnnnnnnnnnnnnnnnnnnnnnnnnnnnnnnnnnnnnnnnnnnnnnnnnnnnnnnnnnnnnnnnnnnnnnnnnnnnnnnnnnnnnnnnnnnnnnnnnnnnnnnnnnnnnnnnnnnnnnnnnnnnnnnnnnnnnnnnnnnnnnnnnnnnnnnnnnnnnnnnnnnnnnnnnnnnnnnnnnnnnnnnnnnnnnnnnnnnnnnnnnnnnnnnnnnnnnnnnnnnnnnnnnnnnnnnnnnnnnnnnnnnnnnnnnnnnnnnnnnnnnnnnnnnnnnnnnnnnnnnnnnnnnnnnnnnnnnnnnnnnnnnnnnnnnnnnnnnnnnnnnnnnnnnnnnnnnnnnnnnnnnnnnnnnnnnnnnnnnnnnnnnnnnnnnnnnnnnnnnnnnnnnnnnnnnnnnnnnnnnnnnnnnnnnnnnnnnnnnnnnnnnnnnnnnnnnnnnnnnnnnnnnnnnnnnnnnnnnnnnnnnnnnnnnnnnnnnnnnnnnnnnnnnnnnnnnnnnnnnnnnnnnnnnnnnnnnnnnnnnnnnnnnnnnnnnnnnnnnnnnnnnnnnnnnnnnnnnnnnnnnnnnnnnnnnnnnnnnnnnnnnnnnnnnnnnnnnnnnnnnnnnnnnnnnnnnnnnnnnnnnnnnnnnnnnnnnnnnnnnnnnnnnnnnnnnnnnnnnnnnnnnnnnnnnnnnnnnnnnnnnnnnnnnnnnnnnnnnnnnnnnnnnnnnnnnnnnnnnnnnnnnnnnnnnnnnnnnnnnnnnnnnnnnnnnnnnnnnnnnnnnnnnnnnnnnnnnnnnnnnnnnnnnnnnnnnnnnnnnnnnnnnnnnnnnnnnnnnnnnnnnnnnnnnnnnnnnnnnnnnnnnnnnnnnnnnnnnnnnnnnnnnnnnnnnnnnnnnnnnnnnnnnnnnnnnnnnnnnnnnnnnnnnnnnnnnnnnnnnnnnnnnnnnnnnnnnnnnnnnnnnnnnnnnnnnnnnnnnnnnnnnnnnnnnnnnnnnnnnnnnnnnnnnnnnnnnnnnnnnnnnnnnnnnnnnnnnnnnnnnnnnnnnnnnnnnnnnnnnnnnnnnnnnnnnnnnnnnnnnnnnnnnnnnnnnnnnnnnnnnnnnnnnnnnnnnnnnnnnnnnnnnnnnnnnnnnnnnnnnnnnnnnnnnnnnnnnnnnnnnnnnnnnnnnnnnnnnnnnnnnnnnnnnnnnnnnnnnnnnnnnnnnnnnnnnnnnnnnnnnnnnnnnnnnnnnnnnnnnnnnnnnnnnnnnnnnnnnnnnnnnnnnnnnnnnnnnnnnnnnnnnnnnnnnnnnnnnnnnnnnnnnnnnnnnnnnnnnnnnnnnnnnnnnnnnnnnnnnnnnnnnnnnnnnnnnnnnnnnnnnnnnnnnnnnnnnnnnnnnnnnnnnnnnnnnnnnnnnnnnnnnnnnnnnnnnnnnnnnnnnnnnnnnnnnnnnnnnnnnnnnnnnnnnnnnnnnnnnnnnnnnnnnnnnnnnnnnnnnnnnnnnnnnnnnnnnnnnnnnnnnnnnnnnnnnnnnnnnnnnnnnnnnnnnnnnnnnnnnnnnnnnnnnnnnnnnnnnnnnnnnnnnnnnnnnnnnnnnnnnnnnnnnnnnnnnnnnnnnnnnnnnnnnnnnnnnnnnnnnnnnnnnnnnnnnnnnnnnnnnnnnnnnnnnnnnnnnnnnnnnnnnnnnnnnnnnnnnnnnnnnnnnnnnnnnnnnnnnnnnnnnnnnnnnnnnnnnnnnnnnnnnatcctttgtggggagctgaaagcccctcccttgcagctgctgtgaggatgggcaggtgaatggccagctgaatgcctagggacccagcttcagagtgcctcactgctggtcaccacaagaatggggaacccatgagcccccacccagagtcatctctggaacaaacggctggatgccagggcaggaccctggcttcatcttctcagtgggaatatggagccttgagaactttccaggaacaagaagcacctggtgtgatgcacagggtctggcttcctgaagctccatttcctcctggctgccatgacccgtttcccaagccctggcttcagtggcttcctctccaggggtgaccgctctttgcagttctgtgggcctgtggctgctctgcgctgggcccactgaggcggggagagccaccagttcctcacagctgtcagaagtgcctgccccagaaaggaaagcagaaggagccagggaagtcaccggcctccctttctttccctttccttcctcggaccctgcatctcccagcctctgtgtcagggctctgggctcaggttgcaggggtgggtagccatgcagatgccaccaggggcctgtcctctggagggcacagaagagctcactattttcatctccttactgagttgccctggggcaggcaggtcccacagctgctgttatggtttgcccataaattggggtgtgactaaatgatagatatattggggtttcctcatacctgctcagaggtgtcagctctatgaggaaggctgtggggaacttggtcactgaagcaggtcatctccaccttccaaacaaagggtcttgtgtcctggggtctttcaccatccctactgagtctacaagaagaagatgaagtacagagaggcatattcccattcgggtgatactccccacttgagtgatactccctgtttgagtgatactccccactcaggtgatactccccactcaagtgatactcctagttgactgatactccctacttgggtgatactccccactcaaatgatactcctagttgagtgatactccctacttgggtgatactcccactcaagtgatactccctacttgggcgatactcccctctcgggttgacacagcttctccatgactcaggcccctgctctccctgtctctcctcagattcagtcaagtacttggaatgttctgcactcacccagcgaggcctgaagaccgtcttcgatgaggcaatccgcgcagtcctctgcccacagcccacacgacagcagaagcgcccctgcagcctgctctaggggtattacacctctcctctgctgctggaagggcaccctgcccctgggcccagcccttaggtcactgagagtaaagttagaccaggacagagggccatgggtacctaggtagcctcagtttcccctctctgtcactacctgtgaagagtcttccttgacggatacaacccaagcaagctagaacctgccaatgccctaagccaagacacaagagctgcctggctctcattaagcctgtccttgtcacaaaaaccagagaaccccaaccataccctgggcaggatacatggggggtatgtggggaggagttggaagagagttctggggcaggcagaaattgaaagcagccatggtcccggatggccctgagctgggaccttcttgtctgtcctcggcactgaccctctgctgtctcccttccaggtgtcaccccagtcctcccatcccaatggtcctgaccctccagggtccccaccaaagctcagtgacgtgctggtggaattgctgtttctccgtgtggcgttctttcccagttagctgcagaacttgcctctctcctccacggaggtccctggggatgggcggatgttcataggccacatcctatttgggaggttcctatgttcccaggggccatcagggacccccaagacgcagccatccatcctcatacagagtcatatgcccacctgctccaggccttcctgacacctctctcgaagcttccggtctccatggcctgccactagtgtgttcgccatgttgggataccttcttccctgaaccaaagggagagatgtggaaatctgctcctctgttctcctttttcagaaaagcacagaacaaatctacttcagtaaatctctcatctgcccagccaagtgagggtctgagctcagccaacccctactgtctctcgagacctcctactctacttgaagggtagagctattccttcttgggactgtccactccacctgccagtcaggacccgatccatagcaaatggaaaatacagctctcttgcttacacagaaaataaatgtgttgattcttttggtggaagtgcagtgagttcaggcacagcttgatcaaggtggggcgaagggatcagatgacaccacggagcctggcttcctgcctgttttgggtctgcctgctgctgccaggctcatttttctggccattgattcttgggacttgatcctccgaggtcaagttcaggtgatgtctgccccaggcaagctctaaggaaaggtcactctggttgaaccagcttgtcttaggcccaccttcaatcacacaagtgtgtcagagagaggctgcactgtggctggctgtgagttgtgttagagccaggagcagaggtgatgccagggagctggggtatagaatgggtgtgtgtggcgttgggggaataaattctttagggaacaaccttcttaaaactgggtgggtatccagtagctagggttctataacccccgactgtcagaggtcacggtaagtgtcctttctaccattatcagggacagtttctgccccagctggcactaagaaaaacagatttttaaaatttgttttttttttgtttgtttgttttgttttgttttgttttgtttgagacagggtttctctgtgtagctctggctgtcctggaactcactttgtagaccaggctgtcctcgaactcagaaatctgcctgcctctgcctcctaagtgctgggattaaaggcgtgcaccaccattgcccggctcatttgtttttgagataagattttattatatagcctgggctgacctcagacttgccatcctcctgcctcagcttcctaaattctgggtttacagatgtatacttccgtgcctggataaggttgaaattcttactagagagttctatggaagttgatgtggtgtccatatcaggcacccagggcctgggcctgagacagtcctacctacatcttccctgaattatcaatctatggtcaagaccgtggcactgtctgagcttccacgtccttctcccaacacacttttgatggcctgtctgtgtcaggtgctaccatagtctcagagattcagtgacatatgtgttgttctccacccctcccccaccccccagccctggagtctccgaggctgagagaaaatggctcccccgacattggaaagctagccctaaggagctcagcattttctgtctccaagagttccagagctgccccccaactcctcccccccaaacttaagggactccacctctggaggggcttggcccagtgagggaagcttctgttcttagcttggctcacacgagggcaagatttctctgacacagaaagaaaggttttaagcccacaggtgctgtgttctccaacacggttgagaggacctgcacccccatcgctttggggagttaaagacctggggtgcacccagagtccctcttttagctctctgctccttttctagtgcatgatactaagcaaaaccttacatgattcaaaaccgtagatctaagcccagaacctctcaaactaagcctctaagtagctaaacctccccctcctcctcccccgcccccttctgtaggaggcaaaccccggcctgttaccttgagcctctgtgtgagttgtggagcacacagccagcccactgtcaccttgacagcttatttcacccagatctcagctttcactttaatctgaataaagtccccgatacttttgcaatttgtgtggaattttatttcggttccttgactaagaggccaagaaccgagaaaaccctgaccggactccccaccaccactagtgacctttcttctccttctgttgcccacccacccaggccctgtccctgtgtgccttaaactcccctgtgtgctgggttgggctcctgctgtgggtgttcagctccctgccagctgccctggggtctttgccttaccccaagagtaatgacatgaaatacctgttccaccccctcaccgcacatgtaacctcagtcctgcatttggtcacttggggtgctgctagccattgcagaggaggaaacagggcctggaaagcctaggggtcagtgctctgatggacaaagcagcctgacccctcctgcccctccccgccctgccccttctgcttgtctcacccctccttctctcttccaacctccctaccttctcttacggttgctacccctcccactcctctctccctctcccaccccttccatccctcccactccctcctatcctctcccatccctcccacccatccctatcctctcccacccctcctgcccctcccccattcctctctccttgcctacagaatcccagtttagggcaggacagcagtgtgctcagcattgatgaaatacttgttttcagtgagaggaaaggctgtttaagtgtgtgtgcttgttgctgttagagcaaccaagttttgttcctaattccccctcccctggaggaggatctgacaccctcttttggcttctgtgggcacacacacacaccccattaaaaacaaaactaaacctttaaagtaaatatacgtgttttctcagcctttggggctccgaggtcacactgttttcaccaaccacatccacacaaggaaagtcagtcagagatgctgtttcttggaagaaagataacaaaagtggtctcttgctctgaaaactgatgggatgtccagagcagccactgtcacctggtgagcttgcagcctacagcatcaacagcagaagccaacggcttcaaacagagacagaaagataaaccgggccggtgctgttagcctgcatcagccttgcttccagaatgaatgctggaggacccagttactcgtttttagcacacttggccagacttcccaccgatgttccctgttagtacctgaggccctagaccctgagtgcagcggctgaggatcagaggcctcctgagcagcgaatgacaagctgtgagatggttttgaaacaggaggaagtgcttgctgggtaggctcagaagtgaggcttgctccacagcattcacctggtaccagagcacacagtgtgtggcctgggaggggccggggctctctactctatgctcagccctcttgtccatggcatcatggcccaggagtgaggtaagcacctgctggaccagacctccatctcttccaaagctctcagcctccagctagctgcttcctgctccttcttccgaagcagggacctcttagccccaccatctcacgtccacactcacaagtcaagcctggatgactgtcatcctagggtcccctaattcaagcccccaactgcactgcccctcctgagctgagccttggccctttcctctggtcagcagtgacgtctttcccaggatgcctcctgctttctctctctcagtccccgctccaaatgcaccgggaagtctcagtaggatcgtgtgtcacagactgtgccaccccaagtgtcatcctaagatctgctgttcgctggagccgggactcatctgacagactgtcatggagtctgggggctgcaccgtgccctcaggagctcacaggctatataggaggtccccatgtcagcagagaacagggaagtggtccctctgtgtagctgtcccctgtgctttcagtcccatgtgctctgtcaacatannnnnnnnnnnnnnnnnnnnnnnnnnnnnnnnnnnnnnnnnnnnnnnnnnnnnnnnnnnnnnnnnnnnnnnnnnnnnnnnnnnnnnnnnnnnnnnnnnnnnnnnnnnnnnnnnnnnnnnnnnnnnnnnnnnnnnnnnnnnnnnnnnnnnnnnnnnnnnnnnnnnnnnnnnnnnnnnnnnnnnnnnnnnnnnnnnnnnnnnnnnnnnnnnnnnnnnnnnnnnnnnnnnnnnnnnnnnnnnnnnnnnnnnnnnnnnnnnnnnnnnnnnnnnnnnnnnnnnnnnnnnnnnnnnnnnnnnnnnnnnnnnnnnnnnnnnnnnnnnnnnnnnnnnnnnnnnnnnnnnnnnnnnnnnnnnnnnnnnnnnnnnnnnnnnnnnnnnnnnnnnnnnnnnnnnnnnnnnnnnnnnnnnnnnnnnnnnnnnnnnnnnnnnnagagagagaaccagccatgcccataatctgccatcctgctgaagcaggtttctactgcccaccaaggtgtagccatgcctgtgatccatcttgtgtgtgccacatcagctgagtcccctctgactgccccatctactactaatgtgagcgaggagagcggcctggatgagcccagccatcccggatcatgagggggagcagcacagctcctctgcaggctctgagtctggagaaccttgatgtctgcagctttgctctgtctccccacccccacctgcctctacacaggcttcatgggatgtcagtaaaggacacagtaaagggtcctgcagatggcgaggcagagctagatgccatgagaggacccccaggaaggcaaaaggccacaaggcatagaagaacactggcttctattcactccctgtgtccccactcctctgtgctaagactgcacacacagagaaggatgaggcccagtcttttctcaccaggggctcggaggtcaggagagacagacacgtggatacctttgcccttgtgatttgttccacacatcagaatcttctgtacagaaaggaagagctctggtctgagggtcagtacatccggggttggtataccatgggatggtacatataccctaagtccttataccctggccctgtggaaaggtggccacgaaccgaggacagaagaaacagaaaaaaatctgtgtgcagagaaactgtgagacagctatgacctcaaatcctggtagttgaactatagagcagagggcggtgaaggctagacctcagggcatgatgggaagagggaaggatcggggaggggtgcagatcaaaacgacacagagaaagcccacctcctggaactggggggtggggtgtctggatctggacactgtaggctgtcgatgacagtgatggcttaggacactgaagagcctgcttgagggagcagttaaccttctgagcctgcttcaagaaagccagggtgaagacccacactgggtttggaagatgtgaattcgatcttacttggtaatccctccacagggacaagttagccaagatatagcatttaagggaagaaagatttgttttggcttgattccaaggctttggttggtggttggtcaattcctcccttttaggccagtagcgaggctggaacaccatgtaggaaggacatggagcagagcttgctcatctctgtaatctgccagcaaacggataaagaacaaagagccaggaccaaggtttacccttccgaaccacggtctgagtgacctgcgccgtacgttccgcagttccacttcccaacagtctgtctgaaattagactctcggggggttaaatcagtggttaactcagaggctccattatctagtcgtttctggaaatgatcacactcaggctgttctttattaatttcctaggtgtctctcaattcaatcaacttgataattgagattcacctttgcagtcccagcccatgtcagtttgacacctaatgcatttccttagatcacacttaatctccaaataaagacgtttgcagaagacgaccagtctactcaagacggctgccctgttcataccccggactacacggaggttttctccaaacatctcaacaatttcaatattgatcaaaagttcaaactgaaactgagagtccaggcaaattgacaaaatcaaaagtatataacaccacacagtaaacactcttattcttttgggttgaacagggtgtagagagactctttcgtgcactgggtgggagcatcacctgtcaataaaaagctactggcctattagcttagacaggaagtaggaggtgggagtcttggcaggaagagagggttctgggatagagtctgctgtgggaggatatttgcctgaactcggaggagacagatttatgaaactgagaagaggtagccagccgtgtggcactcatgaaatagaataaacagttaattgagttacgagttagtcggggaacaagcccaagcttgtggcttagccatttattaattcaagaagtaattccgaaggcgggttctgggccgcagcaatggcggaggcggcgggctggtaacgtgaaggtgggttggaaggaggaacagcagcagaaatgcagacagcacacacaggtttaagcactgcagatggcgcctacggtccgactagccgctgctgtcctggtaatgcaggcacaaaggcagttattcccagtggagcgcaccctgttggaagaggactggaagcctcccgaaatcccagcaaaagcatcgtgcctttaacccaaaggcctggaagccgatatcgtagatttgccctcttcgtgcctttcccgacctctttggaggcagaaatcgcctgtgggtccctagttccagatgtcgaaccacaccgagaactggtagggaaggagcttaaagtgagcggctgcctgctggaggtacgctggatcgcggaagattctcgactcctccgaatttccatcatcaactttcttgaccagctttccctagtggtaaacaccatacagctttttgggcccccggtttcccattaagtctggctggggacccaagactgaccttatttccatctcctcctaagcaatataattttccctagggaaaagattctagaaatagtaactactgcataaatgtgggggcctaatatttttttcctgacttgatcctcaggcacttaggggccatttagtctggtgcttcaatgtttgttgctgaagaaaataaagctatgctgctaatctgcatttggaaaaaaaaaagaagaagaagtaattcagtctcagagtctatttctggaatttaggcactggtagaaaagctcatggttaagcaggagaacagaaagatgtgaggccaaagacccaacaggtcaaacatcaaatcctgtatatcatgttttgcatctggggcacacggtgtcatgatgtgaacgtcccggcacatatctcactgctctggccttgctggctctaatgcacacggtctctttcctgggttggctctgctcactgctcatggtttcccttggcagctcttccaagtctctggcatctccagcttggcctggtctccacagcatcttcacctttctccccagtttcacacaagaggggactcttggggctgacccagacacaacccccgtccccagcctcccaggattttctttggaatctgcgtggttgcctccgtgatcttacaacccttccactctttgtggctgcaaaaccagcgtcgtatgaacaacagaaggtctgccactgtctctgtggaccatgactgtggctgatgagcatggtgaaaggaattctgggaaagtcttttaaaagattacattaacagtatagacactgccaatggctgaggtctgaccaattcttgagatggccttgaagtactttttcctactggtcagatacaaggtcttggcttcttttgttgtttttgttattgttgttgttgttggtttttgttttctgaggcaggttctcactgcacagacacaactggcctgggacttcctttgtagaccaggttggccttgaactcacagagattctctcctgcctgtgcctctcagggttgggaataaagacgtgtgccattacaccagctatccttttaatggtgtgagtctctttagcaatctacttctcctctttgagctaactttaaccattccttttctgagcaatctgcaaggttttcaaatccttctctgttctcaccatcaacatggctaaaagcagctagcaataaccacgctgtaacctaaatgctgaaatgccttaaaactttctctgccagattagtcagtcagccaccttgaagctgagactcacaaagtctcatggtatggggaaaacagagttaggttcttggacaaacataagcaaacataaatggtgtgtggtctagttcctagagcattcatgttcccgtcagaagcttcacaggcactgactctgtccacatctgtcttagtcagggtttctattgctatgacgaggcaccgtgaccaaaaataacttggggagaaagggtttatgcactcacagttccatggaacagttcatcatcaaaaacaataagagatagaactcaagcagggcaggaaccagaggcaggagctgattcagaggccatgggggcaagctgcttactggcttgctcagcctgatttgttatagaacacagagcccacaatgtgctgggccctctcccaacaacttctgaaatcccctacagccagatcttatggagggatttttttgtcctttcaaatatctctaccttgtatcaagttgacataaaactagcaagcacaattgacctcttgttaacttgacacacaaacccatcaccattaaaccataacctttccttgattgtacttccctacaaccacacattaatattgacattacaatataaacattccaaattttagaagttccagagtctttaaattttttaaacacttaaaagtccagtctctttaaaatagccagtctcttttaaaatctggtcttttaaaattcaaagtctctcgtctgtgggctcctgtcaaataaaaaattaatcaaatgcttttctacttcaaaagggaggaaccagggcatggtcataatctgaacaaagaaacaccaaactccaaaagtgtgaataacctaaactgtccaattacctgggatcactcacaatcttctgggttcttctaaggggcttgggtcactgcttttcctctgccttctgtagcatgcacagcttgtcttctaggctccgtctggctacaccccagtgctcttgctgctcttggtgatcaccccatggtacgtgtgtcttcaaaaatgctcgagttctgtcttagggcttctattgcagtgaagcgccatcatgaccatggtaacccttgttgagggaattatttaatcgaggttgccttccagtttcagaggtttagttcattaccttgacaagaagcaaagtgcatgaaggtaagcatggtgctggaaaaggagctgagatgtctacatcttgatccaaaggcagcagaagacagtgtgccatactgggtatagcttgagcatatgagacctcaaaacccactcccatagtgacacagttcctccgacaaggccacacccactccaacaaggctacatctcctaatagtgccactccctatgggccaagatttcaaacacatgaatctatggggccattcctatccagaccaccacaggtttcttgctgcaactgagctgcagttttaccaatagcctctcctggcctctcttcagggactccagtcaggctacacagtgccaaatctcagctgctcttcatgacccatttgtgtcttcaaaatcaggaccacctgggggtactcttgcactatcaagtttggttgccagcataaggtacaatcttggctccttctggaatacagattctgtgtgctgactcccagaagacactttccagaagatttcacctcaataatgctgtctcttaatcacagctaattctttagccgaacctgagcagaaccaaagattattcacataaatagcccagcaatctgcttccctctgaacttcataagttgggcatccattctctgcattgctttcaacaggtttatcttccaagctcctacagaacggctcactgagctctcaacactcaacgccttttgcagcccaaagttctgaagcttttccataatcctattcaaaacaacatggtcagttctgtcacggcaattaccccactcctggtaccaatttaacttagctaagttttctattgctgagataaaacacggtgataaaaaccacacagggagggaaggctttaaggcttcatttactcatggttccatataatatctccattgcattccagtttc

SEQ ID NO: 1565 - DNA, 1255 bp, Mus musculus
ccaactgtcatccctggctgctgggcctcagatgcaatgcaggccatcaagtgtgtggtggtgggtgatggagccgtgggcaagacgtgtcttctcatcagctacaccaccaacgccttccctggagaatacatccccactgtatttgacaactactcagccaatgtgatggtggacagtaagccggtgaacctggggctgtgggataccgcaggtcaggaggactatgaccgcctccggccactctcctacccacagacagatgtatttctcatctgcttctcgctagtcagcccagcctcctatgagaatgtccgtgccaagtggttccctgaggtacggcaccactgccccagcacccccatcatcctggtgggtaccaagctggaccttcgcgatgacaaggacaccatcgagaagctgaaggagaagaagctggctcccatcacctacccgcagggcctggcactggccaaggatattgattcagtcaagtacttggaatgttctgcactcacccagcgaggcctgaagaccgtcttcgatgaggcaatccgcgcagtcctctgcccacagcccacacgacagcagaagcgcccctgcagcctgctctaggggtgtcacccagtcctcccatcccaatggtcctgaccctccagggtcccaccaaagctcagtgacgtgctggtggaattgctgtttctccgtgtggcgttctttcccagttagctgcagaacttgcctctctcctccacggaggtccctggggatgggcggatgttcataggccacatcctatttgggaggttcctatgttcccaggggccatcagggacccccaagacgcagccatccatcctcatacagagtcatatgcccacctgctccaggccttcctgacacctctctcgaagcttccggtctccatggcctgccactagtgtgttcgccatgttgggataccttcttccctgaaccaaagggagagatgtggaaatctgctcctctgttctcctttttcagaaaagcacagaacaaatctacttcagtaaatctctcatctgcccagccaagtgagggtctgagctcagccaacccctactgtctctcgagacctcctactctacttgaagggtagagctattccttcttgggactgtccactccacctgccagtcaggacccgatccatagcaaatggaaaatacagctctcttgcttacacagaaaataaatgtgttgattcttttggtgg

SEQ ID NO: 1566 - DNA, 579 bp, Mus musculus
atgcaggccatcaagtgtgtggtggtgggtgatggagccgtgggcaagacgtgtcttctcatcagctacaccaccaacgccttccctggagaatacatccccactgtatttgacaactactcagccaatgtgatggtggacagtaagccggtgaacctggggctgtgggataccgcaggtcaggaggactatgaccgcctccggccactctcctacccacagacagatgtatttctcatctgcttctcgctagtcagcccagcctcctatgagaatgtccgtgccaagtggttccctgaggtacggcaccactgccccagcacccccatcatcctggtgggtaccaagctggaccttcgcgatgacaaggacaccatcgagaagctgaaggagaagaagctggctcccatcacctacccgcagggcctggcactggccaaggatattgattcagtcaagtacttggaatgttctgcactcacccagcgaggcctgaagaccgtcttcgatgaggcaatccgcgcagtcctctgcccacagcccacacgacagcagaagcgcccctgcagcctgctctag

SEQ ID NO: 1567 - DNA, 38764 bp, Homo sapiens
  misc_feature (26811)..(26830): n = a, g, c, or t.
gctacttgcgaggctgaggcatgagaatcactggaacccaggaggtggaggtggcagagagctgagatcacaccactgcactccagcctaggtgacagagtaagactctgtctcaaaaaaaaaaaaaaaaaaaaggaattccaaatagtcctataccccttaaagaaattgaattagtagtttaaaatctacccctcttccccctctcccccataattctgaaaccaggtccagatacagatggctttataaattttataaaatatttaagggagagataatgtaatattatccaaactggctgggcgcggtggctcacgcctgtaatcccagcactttgggaggccgaggcgggcagatcacgaggtcaggagatcgagaccatcctggctaacacggtgaaaccctgtctctactaaaaatacaaaaaattagccaggcgtggtggtgggcgcctgtaatcccagcaactcgggagactggggcaggagaatggagaatggtgtgaacctgggaggtggaggttgcagtgagccgagatcgtgccactgcactccacctgggtgacaaagcaagactccatctcaaaaaaaaaaacaaaacataatattaccaactctcataatgaaactagtataaccttgataacaacaacaacaaaaaaagacaaagacaatataaggaaaatgaccggccgatctccccaccctacctgtaaatattggcaatttcaagccagcaatacacaaaaggcgatgcatcatgactgactgagtgagggtgtgactgaagctgctgtaacaaaaagatctgaaaacgcagtggcttaaagaagcaaaagtgtatttctctctcaggtctcgagctgagtggtctggctctatgttgcccccacatggttccaggattgttctggcgtttttatttcctactccgtggggagaggggaaaatgctgtacaggataaatggtttagcttccaaggagatgatgcagaagttgctgacatcacttccatttgcacctttttcccccagacatgatcatagggcccactctgctgcaagggagactgagaaatgtctttagctgggtgaatgtgtggctagccccaatgctgggatctctgttattaaaaagaagcagagaacggttgcttagggatactcagcaatagtccccatattaactaaattagacttatctgggaatgcaaggagaattggacatcagaaaatgtattaatataattcacaacatttccatgggtacagaaaaagacattcaatcaaattaaacgcttaataatgataaaacaaaactgccgtttctaagaatagtagggaaacttctttcagtgacaataatatccaccaaaagcctgcagtagacatcaggttcaatggtgaaacattagaaacagtctctttaaaatcagaaataagacaaggttgcctgccagcactgattcccttcagccctgtaataaaagatctagacaagccaaggaattaacgttataaaaattgggaaggaagaaataaaactgtcacttttcataaatgataagactgtctataaagacagctgtagacttgttaggagcaaaatctttacgtaaattagaatgagaatttccatccaggtttctatataagttcaatatacaaaatgtgacattttccctacgtatgggcaacaaatagaaaattcaatttaaaaaatattagttataatggcactgaaagtaataaggtatcaaggaatgaatctttcaaaaaatgtgcatgacctttccggggggaaattataaaacttaattgaaagatataaagaagcaatataccatgttaatggacaggaagactcaatatataaagatgtcacttctccccaagttcctctagaaattgaatacaattctaatcagaatcctcacacagtttttcttggaacttgacaagcttattatgaactttatatgaaagagcaaagtgtcagtggtaacgataacaattttgaaaacattcaagagtggatgatttgctctgctgggtataaagatctgatatagaacttcagtagttggctgggtgcagtggctcacgcctgtaagtcataccagcactttgggaggtcaaggcgggcagatcacctgaggtcaggagttcaagaccagcttggccaacatgtgaaaccctgtctctactaaaaatacaaaattagctacatgtggtggcaggcgcctgtaatctcagctatttggatgctgaggcaggagaatcacttgaacctgggaggtggaggatgcagtgagccgagatggtgccgtcgcactccagtctgggcaacaggagtgaaactccgtctcaaaaaaaaaaaaaaaaaagaactgcagtaattgaggcagtgttttaccggcttgagggtggaccaagagtccaatagatggagaggctaggaaaagactcatgcacttatagactcttgacatgtgatatgatttggatctgtgtccccatctaaatctcatgtcaaattgtaatccccaacagtggaagtagggcctggtgggaggtgattggatcatgggggcggagtttgcatgaatggtttagcaccatccttcttgggtactgtatagtgagtgagtttttgtgagatctggttgtttgaaagtgtgtggcacctctcacccccttggtcctgttcttgccatggaagatgtctgtttccactttgccttccaccacgaggcccccccagaagcagatgccaccatgcttcctgtgcggcctgtgatactgtgagccagttcaacctctttttcttagtaaattacccattcccagatatttctttatagcagtggaactgtgagatgcgagatggcttgaccacagcttactgggcaaaaagcaggcagagctactcaataaatggttctggaacaatcagtcatggagataatgatgttaaatacatatcacacaggccaggtgcggtggctcacgcctgtaatcccagcactctgggaggccgaggcgggcagatcaccagaggttgggagttcgagatcagcctggctaacatggtgaagccccatctctactaaatatacaaaattagctgggtgtggtggtgcgtgcctgtaatcccagctacttgggaggctgaggcaggagaaccgcttgagccccgtaggcagaggttgcagtgagctgggatcatgccactgcactccagcctgggtgacagagtgagactcagtctccaaaaataaaataaaatacaataataaaaaaatacatatcacacaaaaactaaaaacagtcaataatctcaccacaccctaaattccgtctgaagtgtgtaaagacctactcatatttattttcttttttctttcttgagacagggtctcactctgttgcccaggctggagtacagtggtatgatcatggctcactgcagcctcgacctcccaggctcaagcgacctgcccaccttagcctcctgagtagctaggactacaggcatgcaccaacacatctggctaatttttgtattttttgtagagatggggtttcaccatattacccaagatggtttcaaactcctgggctcaagtgatctatgtgccttcatctcccaaagtgctgggattgcaggcatgagccactgcacctgacaagacctgtttatgaaaagcaaaactttaaaagaaaatgaggatattcgtcttcatgaaattgggggaaggaaaggaatttttaagtaagattcactccaaaaaacacaagtcattatgatgcagggcaggtgagcctccaaattggggcttagctttggaaggttcttgggttctctcaggaaggaattccgtgctgagctgacggtggaagaaaacagctttatggaggtggcagtgttacagctgcgcgagtgcccctgcagagtagggctacctgacgggcagtgtactgagagcagcagctcaggggcaggtccaccgtcatatttatacccacttttagtcacatgcaaattaaggggtggggtatttagaactttctagaaaaagggtggtagtttccgggctgttgctatggaaaggggtggtaacgtccgggtgttgccatggcaatggtaaactgacatggcgctggtgggcatgtctcatgaagaggtgctttcgcctcgtccccatttctgctagtcctcagtctggtcttgagtcaaaccctgcctcctacctcaattaggagagaaagtggaaatttgactacatgcagataaaaattgtgtctattaaatgtcacaacatattaaaagacatcccacggactggaagaaagtatgaaatgcctctagcaattcaaatgaaaatcagaatatgcaaagagcttctccaaataaatgtaagagaaggataaatactgggcctggcacagtggctcacgcctgtaatcccagcactacctgggaggcagaagtgggtggatcacctgaggtcaggagtttgagaccagcctggccaacatggtgaaaccccatctctactaaaaatacaaaaattagccgggcatggtggcgtgtatctttaatcatcgctactcaagaggctgaggcagaagaatcgcttgaacctgggaggcggaggttgcagtgagccgagatcacgacattgcactccagcctgggcaacaagagtgaaactccatctcaaaaaataaaataataaaataaaataaataaaataaaatagataaatgctccaatagagaaatggagaaaagtgaagaaaaagcaatttatggaacaggaaacacaaggtccagtaatcacttacaatgatgcttaataccactgggaatcagttaatataaattaaaacctcagtgagatgccaattcacacccatctagctggcaaaagtatgaagtcttacaggccaagcatgggctgggagtagacgaggaggcccctggagatgggcgtagcactgtccgttgaagtgcaagatatgtgtgtgtatgctaaacctcacacaccagcccaggagcacacggatgttcacagcagaatcgtttgtagtgcaaacattgcaagccacttacaaatcctggcccgggagatgtaggctgcagtgagccatgattgcactccagcctgggcaacagagtgagaccctgtctcaaaaaaggaaaaacgaaataaatatgagtaggtctttacacactttggacagaatttagggtgtggcgatatattgactgtttttagtttttgtgtgatatgtatttaatgtcattatctgcatgaattggataaataacatttcaatacattcatatactggaatatttaccagaaaaataactaaactggaactctaagttgaacatttcccagcacactgctgggtgggactgtgcctcccaaattcgaaggcctgtggtgaggaggagggagctgactgaccctgagtggccccagaacaagaggtagcacctctatgaggacaatccaagggaaggatttgggctgaaaatgaggaagggttttctaacaggccaggctagccaggagtgaaagagactgccccttaagggaatgagctccctgtcattgaaggtatgtaagcagggactgggcagctgcatcatgggcagtgagccaagcattgtctatcaatggcacaagggtgggttgaatacagatggccttaggccccttctaagcatgcccagaggcctcgtggttctgtgattcagtgagtttgcaaagtgtagtcaaaagaggatgggactaaatgaataaccaaatgtgacacatccctgcggtgggacactactcactaataaaagggacagacacaccatgacacatgtaacaacaagatgaatctcgaaaatatgctgtgtgaaagggccttggatgagatgccacaccgtgtgatgccgtttatgtgaaatcctagaaaacgcaaagtaatctacagaggcaaaaagcagatcggagcttgtgtgtgtgagctgggcggtggctgggggcgtggggagggagaaacagggagaggtgggctgcaggggggtgcaaggaagcttttcaaagtgatggaagtgttctgtgatgttctgtatcttgggaggttccatgggtgcatatatctgtcaaaatgaatggaattatatgctttaaatggatcacttattgtattcaaattatacttccacatagatacttttttttttttgagacggagtctcgctcggtcgccaggctggagtgcagtggtgcgatctcagctcactgcaacctctgcctcccgggttcaagccattctcctgcctcagcctcctgagtagctgggactataggtgtacgccaccatgcccagctaatttttgtatttttagtagagacagggtttcaccacgttgaccagaacggtctccatctcttgaccgcgtgatctgcccgcctcggctccgaaagtgcatatggatacttttaaaaaaagaactaaaaggcgaggagggctggagcagaggtcagtgccgctgcatcatggacttggtcacgtagacttgggcctgactgctgtcgtccaagtggcttcactcctccatctggccatcctgccaaccctggcctgtccacacaatcccaggaccacctgcagatgggggacattcccagagagtggttccagggctcctgtgtcattctcggtgtgggttagagtgcttcagggatagctttctgttcttccatgttttgtattcactacagtaccaagcccagagctgggtattcaggtggtgtatcattgatgcatgcagaatgaaggagagaatcaatggcttaagctaaggagaatttttgcttgggctgccctggagaagtggctttcttgggagggagggcagttgcaattttaggaccgtcatggccatgtacagttgagtgggttgtgtactgcaaaaaaaaaaaaaaaaaaaaaaaaaaaaggccgggcgcggtggctcatgcctgtaatcccagcactttgggaggccaaggcgggtggatcacgaggtcaggagatcaagaccattctggccaacatggtgaaactctgtctctactaaaaatacaaaaaaattagctgggtgcggtggcacgcgcctgtagtcccagctactcgggaggttgaggcaggagaattgcttgaactcgggaggcggaggttgcagtgagccgagatcacgccactgcactccagaccggcgacagagcgagactctgtctcaaaacaaacaaacaaacaaacaaacaaaacaaaacaaaaaacaacaatctctgctctagtgggtgaacgaaggataaaactcagtatctacactgctttccaagtcaggtggctgcacccattggctgtgcattcctaaagaagcgcattattcttttctcttcccttttttaaacaaaaaaatgttttattctggaagaattttagatgtacaggaaaggtgcaaagatagcaggagtgttcacatacattttcacccagtttctctctatgctaacatcatttgtgtaaccacggtatatttgtcaaaactaagaaattactattcttaacaatactatcaaaaatttcagacttgatttggattttactactttttccactgatgttcttattttatttttattttattttattttatttttttgagacggagtttcactcttgttgcccaggctggagtgcaatggtgcgatctccactcactgcaacctctgcctcccgggttcaagcaattctctgcctcagcatcttgagtagctgggattacaggtgcccgccaccacgcctcgttaattttttgtatttttagtagtgacggggtttcaccatattggccaggctggtctcgaactcctgacctcaggcgatccacctgcctcggcctcccaaagtgctggtattacaggcatgagccaccacacccggcctgatgttcttttttttttaaagctaatttaatcgtttaaattgcttcaagaagctgcatgtatagatgaaacacttgtttttttttccccctttaagaactagaaatgaattcttttaaaaaatgtattaaaaatttttaatttgtaattgacacataataatcgtacatatttatggggtacaatgtgatgttccaatgcatgtatacaccgtataatgatcaatcaaatccaggtaattcccacatccatcacttttaatatttatcatttctttgttgcgacatttgaaaccttctcttccagctgtcttgaaatatgcacgagattgagatttgctgtagtcaccctactgtgtaacaggacaccagaacttactctttctgtcttactgaagctccacaaatgttctttttctgttccaggttctaatctggggtaccgcactgcatttaatacattattattattattatttaaattaacacagaggttgccccgtggactagcagtggatggaaaaagaaaggggcatagagaagtatccagaacaaagtcctcaggtggcctgtgagggaggaagccccagggtggtcacggggcacacctggcctctctgacccacagtctcagcacagcgtatgcaaagtgcagaggaaagacaccggtttgctggtagctttaacagttgacttgcccagcgcttgaggaagttgcatttccctttctgtaaaagtcaatgttgtgaacccagtaacttgtgtgaattgctctgaaaaggttcagcctccgggtgcctggtgggaatcctgcgctctgccagccagcaggccctggccctctgcaccctcctttggagttcctggcttgtcccgagtgacgagtccggggtgggtgaccagtggctcttcctctccccgcccctccgtcccttccccccggagctggaaaggtgtgtgggtggggagtgatagcaatgaacagtgaacttggtgccaactggggtggtcgaatattcacccgagtccacgtggagagccctcgtggcgaagggagcgccctgcaagctgcagaactcaggttttgtcccttcaaacagcagccggagccaatagctgcagcttggagaagagcttggagtcacctgagcctagggctggtttcaggctaggtggtcaaatgacttctcagaccctcagttttcgcatcagggaaatgggccacagttctagctccagggtgcctggtcccccagggcggcctcagaataggcttggctcctgtggggcactgcccgccacttcccctcaatgtgcccttctccatcagcggaccccaccttcccttcctgcctcatcgccccacatcctcccacccagggactcccacacaggcccttgcctgggggagcctctgggtcctggctcaagcaatctccccccacctggagttccctctttagggcgcacgtttcaagagccagctccaatgctagcttgcaggcccccagctctccatctcggtaaccctgaggtcctctctgtagattcccccgttgcctcaatcacttcctgtctctgttatgatctcccatgatgaagtcatgcctccctctctgcaaagggtataaactccagggaccagctgtctcttgcatcctgggatcaccagcacctggtactgtgcctggcacacagcaggcactcattaaatgctctgcttagaattgaagtgcactgaattcttggaaccctcaagttcttggagaacagcctctgggcccgccccgtggacaggaagtgagcctcccagcacagagggcccccaggtctcctgctggagcctccacgcagggggcctgtggggatggccagggctcagcccagcacctgagcgcccctcccaccagctgctctgccagaccgcatgctccgccccctgcaaacgaccgtggggagagcagcttgagtaagttccccttccgtttcctcctgccccaccaccgctgctcctcagcaggcgcctcaccagcctccacaccccttgcgcccgcagaaacgcgcctggccctgagctgtcaccaccgacactctccaggctccggacacgatgcaggccatcaagtgtgtggtggtgggagatgggtaggtacctggctggacttcctcacagcccccaactgggatgccctgagatccttccgccctggtgcccctggggaagcccctggccctgcagaactaggcgtccctggaaggcagcttggaggggacgcttccttctccgagggcccacagggagcacccgggggtgggctgaggggagcttcaccctcttcagccccaccccaccccagaagccatctcggtggagggtgcaggactatgggtgagagtgcccagggctcctcacctgcaccccaaaagctgggggcaggtctcccacggaggcaagcctcagtctttactctgtggatgcaggagggaagtgggaaacctgaaattcagcctttgtccccaggctgacctgggctgtcgtcactggcttggtgccgctgtgtggccttgggcaagtcacagcacctctctgaacctcagcttattcatctgggaggaggcctatgccctggggatgctgtggggtcgcttgagataagctgagtggctgtcttgcttgtagtatgtgccttctagcaccccctccactttctctcccctcccctcagcctaccgggttggggaggatgtgtgggggatgtgggtgaggagcagaagaggcaaggggacattgagagacagagagggaaggaggaggctaaaggatgggagggtgattgtggggtcggcaggggaggggcaggctgggctgagacccttctcagttgtcagatcccagtgacttcaggctgtcttgtcccctgggggcctcagtttcctcatctgtaaaatgacaggtccaggccaggtgcagtggctcatgcctgtagtcctagcattttgagaggccaagatgggaggattgcttgaggccaggagcttgagaccagcctaagcatcatagcgagaacctatgtctataaaaaaatttttttaagccaggagtggtggcatatgcgcctgcagtcccagctactggggaggctgaggtgggagaatcgcctgagcccgggagtttgaggctgcagtgagctataatggtgccactgcagtcggcctgggtgacagagcaagacgctgtctcttaaaaaaacacaaaataaaaggacaggtccaatttgtcaatctgtcatgcctgccagcagccacatcttagggtccagcctacaggctcaccctggggcatgttctagctggaagggggcctcctgtccagccttcccattctacagaggagcagcccaaggctttgagagactcagctctcctggcctgggccctgtggccccgactttggctgtgacccatctaggtgggggcgggcccatttgtccaccagcctcagctgattctgatgcatggctccttatctgccctcgcctgccccagccctgttcacttctgctttgtatctgatcggaggaggggcgggcggaagtcaagggttaacgttccagtcattcaaaattacctcggtggcaggcccaggggagggcgatggtaggaggagaggatgagctgtcttctctgagcaggaagtgacaaaaccacgcagggcaggggaaggcccagagctgtcccttggcctctgggcttcggctgagctacctgcacccgctcccagcctcgcatgctgagggtggaggaggcgcgcgttatcacttccttcctatgtaccagctctggggttaatctagccttctctatttatcctctcaccaaacctaataggtccattttacaggtgggaaaatgaaagttcagggaagctaagtaatttgcccaaagcctcacaggatttgaacccagaccactctgactcaaaccctgacctggtaactgctctgctccacgggggaggtgagagggaagagcagggtcaggtcttccctagcagccatcggctgctgccatgcatcaggccctgtgctcagtgctttgataggcctcgttggatttactcctcagcacactcctatgaggatgggctcatctctattttctagatggagaaactgaggcagaggcaggttaagtgacttgtccaagatcataccactggtaggtggtacagctgggatttgaagcccaggtcaggcgtcgggggcccctcggcattgcctgggtctgctgggcaccctctgtcccacatcactggcccctggagaagcctgtgggaaaagcggattgccagctctgcgcacacctgtggatcagaatctctggggctggaccctgaagtctccactttaacaaacatccacatgacttgcaggctctcgggtgtgagaacacagacagggggcatctcacatggggagacggaggcccagagggctaggctgggtggatgctgaggtctttgcagaggaccaggcagaaacctccccacgtctccggcagagcccatgaccgccgccctcttgcacttcctgtctttcagggccgtgggcaagacctgccttctcatcagctacaccaccaacgcctttcccggagagtacatccccaccgtgtgagttcctggggatatgtggggtggtgggaggaggggagagaccgtcaccaagtcgacccccctttcaggcacttcctgtgggccagaccctgtgtgggcacccacagcctccagcccagtggagctgcctgacagtccagccaagaaggcagcactggcgctgagaggtgctgggggctcccagaacccgggatggggtatggaggaaggggtagaagggaggaggggtggcctttaggctgggcctccaagcaaagggacgtggaggagaaggctggctcaggcaagagcaggagctgggagaggagcttctgcggaagcaggctgctggaggaggtgatccagagagcctgactccaaggaacagggacacctggggacaaggcatgctgaggggtggaacagagctgtctgcaggcctgggaggccctgcgctctattgcaggatgcggaggcagggctgtcatcggacgtggagggagcgtgttggtgtcagactcaggagggaaggatgactggggaggcaccagcccctccctggccagccctcaggggtccccatcactcctaggacatttccccgactccctagcatggcactcaaggctcctgatggccttcactcaacctcccacctggccttattacccattactttgcttcacactctgcctcctccggaccctactgttcgccacaagctccctgcacatttctaccccagggcctttgctcaagctgttctctctccccatagtgctttttctccccacatccacctgtctaaagcctccaggcgcagctccagtgccccctcctccgggaagcctttctgatctaccacgaaggggtctccactccccagagtgactttatctgatctctcccatgactatgagcctgtggagggcagggagccatggccagctctttgtgggtctcccattatctcagcacagtgtcttctacatggtatgacacatgcattaccttacacacaacacatgtgttttgagttgacctgacttggacatcgtggaaggaccacaggaagatcgatcatagccaccatctagcaaaggcctgccacatgctggcccctgcgcaagatgtcacacatgtgtgatctcatttgatccccctgggagatggctattagcatgcacaggacacccatggggaagctgagcctcacagccactaagaggcttgcctcccaggcttacacggtcctgtccagcttcagagccaaggtccatgcagaacctcgctggggccctcatttcttgatcttaatgaacccccctttcaggggcagggatcaggctctcctaggaagaggagggcaggcagaagggagaagagagcctggagccgagatgcttccaacccaccccagaggattcctcactacccaacccccaaccccagacttgggtgggctgggctctctctgctgctgtctctccccgggacactctgctcagctgccttagatgccctggcccaggctagaggaaggcaggcagccaggagagggcagggaaaccctagcagagagcctagaaagccgcttttgccccagctcggtcctgatgctggtgagtgcccctctctggtcctgtccttatatacaaaatgggaacaaggattcctgcccactcaccatcaactatcaaacgtttatcaggtgcctctaagtgccaagggagggctggctgcaaacctgagcagggagggagaattaggtgaggcagctcctgctcaaggccatggtcaccagcagtgtgttgtcactgcctctgtccctgggtctctggatgctggcttgagaccttgtcccgcctttgtgcatcttggctgagttgaaggacccacttgctgaaggaccttggaccaatcacttcccctctctgagcctcaatctccttttctataagaggtagaggcttggaagtcccaagctccttccccaggcacctcccttgtacgttgagatggatggctgaggctgctgaggccaggttatggccaggtgctctcagcagcctggaggtccctgatccctggtggcccctagtggactttgttgtcctggacaacatcacagaagctggagaaataggcccgaccagatctaccttcccaagtctctccgaaggattgggtgaaggtatcccagtagggccagctctatgcgtgtggccacctatccaattgcacagggccccatgctcagaagggtcctgcaccttgtttaatactctgatgtctacatcttgaaattcttaatcatttttgagcatgggccctgtacttccattttgcactgggtcttgcaagttctgtggtgaatcctgcctcacaccctcatatggcttcaggcacaaagtttctcagccccagacgagaccccagagcgggatcctgctactgccaatgcctgtgcccctgtgaagggagggtaaaatagtcacactgggcccttgacattggagggggaagagggagagaaggtgggttgggaaaaacaggcagccccaaatctctggcacctgagattaaggtggagagagcttctgggctgaggatggtaggtttgctgggggttggggaggcccctgctgcagatacaagatcagataagcctgagagctggctccccatgctgccagccatgaggggttaacagcaaagggatggacctgaaccttcggaactgacaccttcctgagcagccaatcagttgccaggactcgtggggctgcaccgtgattggctcttgccgcctgctctgttgtatagaccctatattggagccggcagggccctgtgagttctttgcatcaaatcccccgtttcgcagatggggagcctgagtctgctctgtggatggccccgtgctaggtgttggggatacagaaacatggcaggaagacagtgccctcgtgtgcctgtggcatagaggggcgcccccttacacctcacctcgttagaaccaagctcgacggaagccctggtgagcttttaaaactgaaagttaggctgggcgccgtggctcatgcctgtaatcccagcactttgggaggctgaggcaggcagatcgcttgagcccatgagttcgagaccagcctgggcaacatggagcagaaaccccatctctacaaaaaatacaaaaattagccgggcatggtggtgcatgcctgtagtcccagcgactcgggagactgaggtgggaggatcgcttgagcctaggagggtgcggctgcattgagctgtgattgtgctactgcactccagcctgggcaacaaagtgagaccctgtctcaaaaaataaaataaaataaaaagagcctcccaaaaaacaactgaaagttaacctggcctaaatctctcctgtggctcccttcacacttaaaactcatcttaatgcgcaaaccgtgaacaacagcccccgtctccccagcctcatttaccacaccccttacccacttcactccaagtacacagactgccttgatgatctctgcctcccccgaacctcttcactcccctttatgacacccagaaccctccctgcttcctgtcattcagttccctgcttaaacatcgcctccttgaccccctgtctacagcagccccccgtctccaacctgccctctccatcccaccaccctgcttggctgtcttcataggccccccgacagcccgacttcatcttgctgctcctttgctgccactcctcctcttggatggaagctccctgaggacggggcccttatctgcctcactccctgccatcgcgccagtttctagaacagagctgagcccattcctgttgctccgtcatgactgcctccccgaccccggggaggaaggcagggctcagctctgcatggaagaatgtgtgctgctaattgaggttgaatcatttggcacttaattttcactttcatttgaaatcctctcttcggtaaactggcgaatccagcctgggattccagtggacaggatgacatcagcctccctagctgtgtgcgccaggccccaccaggttctgcctggcctctcggcagccccatccctgctcctgccgctgtgtgtgtgggtgcctcatgatgtccagtggctcaagcctctgccttagctcaggcaccccttctgttgggtattctgttccctcctgctccacctctccctgccccgtgacacctccagctgccttcatctttcaaccaatagcacggtaagggcctcccctcctggctgatgtgccagtttccccctctgttcccctctggcccctccctaagacttctccaagagggtccctccctccctccctccttccctccctcccttcctccctcccttcctcccttccttccttccttcctgacggagtctcgctgtgtcaccaggctggagtgcagtggtgcgatctcggctcactgcaacctctgcctcccgggttcaagcgattctgctgcctcagcctcccaagtagctgggactacaggcatgcaccaccacacccagctaagttttgtatttttggtagagacagggtttcaccatgttggccaggatggtctcgatctcttgacctggtgatccacctgcctcagcctcccaaagtgctgggattacaggcgtgagccaccgtgcccagctgggaccttttctaaatgcaaatctgatctcatcacctctgcctggcttggccccttgctggttccccattgccctgagaaccaagacctgactggtccgtgcccctatgacatcaatcctttctcacccccaagtcactagccatgcgtgccctgtggtctctgggttccttgaatgcaccatccttcctccgtgggggtgggcttcggtggtggtcaggtgatacctgggtgctggggccccttccacctgccccattcccctcctccactccattctagggccaggcctcagagttctacaggcactagatgaaaacatggtctctgctctctccaactccatttccagccatgaaatagcagcgatgcttaccatgtgggcctttctgaattgggtaacaggatctagccttgctctgccacccactggctgggagatcttgggcaagtcccttcctctctgtaagcctcaatttcttcatccggaaaatggggtgagggttgcccatggtggtctgtgcataaggttcctctctggtcctggctgcctgtgggtctcttaagtaagggggaccctcaggggtgtcacaccattgacacattcctgcacctgtccctctggtcctctggggaggggccctgtggcaggggcatttggggacatggaaaatgagactgcttagcttctcagcatctcccagtggggtggcttgaacatcctctgtttttttggattctcctaatggctccaagaaataggtattttcccctccacattaaagagattgaggctcagagaagttaggtcactcacccagggtcacacagccaggatgtcctggcttcccaaggaactctgtgttcccgcccaacaagaaaggtccttgacctcttcaggcctcagtttcctcatctgtctaatgggggtaacttaagatccttttgtcttggatcacatgagacttcaagacctaacatacaaagaccctcagccccctgcctggcctcagagaaggtggctgttgcttctcaaggtcccagctctttccccatcaccgtggccctgagattccagggatgacccagaggagacaggtgaatcttgtggggcttcttggcactagcactgtggctggacattagaggagagagtgtccaagcatttcccaaaagtgtgtttctggtcaaaactggaaaaacaacacaggtgtggcttttcccatcatgcctcactgtgtctccctggacagcgccttcttcctgaaatcccacagcagtgtaggtggtacccagagtaggtgcacgccagcacctgctgtgcaccagaccgcgggctggccccagggtgcagcggcaaacaaatgaggcttagtgcctgccacctgggatgctgagttccccaaggagtgctggtttaggtggggtggtagccccgacatggctggaagtcaggaaaggcttcttggaggaggtgacattgagcaggggctggagggatgagtaaaagtcagccagcctggcagtggggaggaagagaagggagagaggaaggagagtgggaagtcaggggccactgtttgcaggcactttccagacaggcgggaacagggccgtttgaggaactgagaggtaaccaggaattctgtccagggctggacaggcaaagtgtattaaaaaggctgggctgcccactttttgggggtgtgggggactcctctcaggagaggtgtcttttgtgttactctgaagtgttagcgcttctgcagcctaacattgagtagcgttctctgaggacttcctggaggaggtggtttaattcccttccacctgcattcactgggtgacaggcctgagactgtggagaataagcaggcatcggcctggcccacacagaacccacagcccttgaaggggtggagactcaccaagtgcctgctcgtggtccaggcaaagtagtcacctgagagagggaaccatgggctctttacaggtagaggacgacgaagctccgccagagaggaggacttgtctgggcagggttttgaagcatgaatagaagttgggagtgaaatggggctggaagcgtattccagagggagatacagacaggatcaaaggcttggagggctgggcagcctggagggtgtgggggccagagaccaggttggtgagaacatatggacagctaaggtgggaaggacattctgggcaggggctttgtgtggaccagcacagggaggtgggcagtgtgagcctttcccgggaaacggcttggctggtgtgcgaggggaggagtaggaggagaagtcagaggagccggaggtctcagtggaccaggtcagggcctgtgtgggggaccacagcgggaaaagtgacagtgattccctaaccctcaggggcaggcggtgagggcattcccggaggcacagctgtggcctggggcagtgagcactggtcgtggtcactggtttctggtttcttacctagttgggtcactcactggctgtgtggccttgggcaagtcactgcatctctctgagccaagttttcccttccacagcgtgggtagccagcaccttcctcgcggggatgtgtgtagcaagaactggcttgcaaaacctcccctattccgagcttggagccctgggatggccctcccagcattcgttgggcttccccgtctctgatatttgtcaggcccctcaccccgtgtctggccttccgccagctgtgggggcaggatcaggcatgtactccttggtggccccagcgctggctctgcacccgatgcatagtaggtgcctagcaagtgcatctggaggctcgttcgatggccctgcagggctctctgggtctggcgggagacattgggagtcaaggtcagtgcctcacaccatctcctcggcagcatgtgtctttctaccgtttgccgtggcccttcccatggccagtgactaacagctttcacgcacactctggggtgggctgaaaggccccggaagcagccctctttccctggaagatgggagatgaatgacagcaccctagcttcctgccttctctggggacgccctgagcacggtccgttctgtctcccaggtggccccagcaggactgagagcagcagcagtccacagccatgacaactcaaccacctgccctgtgtcagctgctgtcccctcctttattcctccccactccccttctgcagcatcctggagtcacttcccgaataaacccctcacatcacctccttgtctcagggtttgcttctggggggacccagcctgagacgggatgaacattcattcgacaaaatattgcggctgggcgcagtggctcacgcctgtaatcctagcactttgagaggccgaggcgggcggatcacttaagttcaggggttcgagaccagcctggtcaacatggtgaaaccctgtttctactaaaaatacaaaaattagctgggcgtggtggtgcatgcctgtaatcccagctacttgggaggccgaggcaggagaatcacttgaacccagggggcagagtttgcagtgggccgagatggtgccactgcactccagcctgggcgacagagcgtgattccatttcaaaaaacaaacaaacaaacaaaaaacaacaaaaagcaaacattgagtggcagcatagggagagaggtaagtttattctcatcaagactgggaggaaaagttacacagcctcaattacctttccaaaggacaggtacgggtaggaaaaggattaagagacaatctttttttcttcttgttaacttgtattacatttttaaaaaatataatgaatcagtaatgaaacaaataaagaaacccaattgcaaatgctgtgtgactttgggccagtcgcagactgtctctaggtctcagcctccgaggaatgacatggagctggaccacaattcccaggttctggggtttgagattgaccttacctccgccttgcctgctccccacaggtttgacaactattcagccaatgtgatggtggacagcaagccagtgaacctggggctgtgggacactgctgggcaggaggactacgaccgtctccggccgctctcctatccacagacggtgtgctgctcccacctgccttgcagtcctgacctttgctgtctctgttccctctgcttgggatgcccttccagccagctcagcctgggaaaccctacctctccccttaaggcccagctcagggagtctgcctgccttgcatgtcccaggcagagaagggcttcctcttgcactccctcagccctgcattggttcccggtcctcaatgtgcccatcttcccaccccattgcctcctgggctctggcaccccctgtttccagtggtggggcaggtggattctgcacagggccccaggaggcagcccagcatggtgagccctgggagtgctgggggaggggagaggtggaggatgcctgcaggtggctgctgggtcctcgcccttcctccagggtatgcagggaggcggctaaggccggtaatcagatggtggatagtatatggattggagtatggactctagaatcccagatcctcccctcaccagagtgcacgttggcaaactctttaacctctggaagcctcactttccctgtctgaggaatggggctaccagcagtgcttgctgcagagtgacatgtgaggataaccacttcgcagaggccctggcctttagtgagcgtcctaacaaacagcagcctcgtggtagaggcgagaagggtatctctgctctgcccagatcctaagtccccagcattccctggggtgttccaccctcagggagccccaagctccacctctcggtggctgccatggtgggacacctctgggccctcctcactagcaaccctcgcttgctctgtccccaggacgtcttcctcatctgcttctccctcgtcagcccagcctcttatgagaacgtccgcgccaaggtgagctggacagggtgggccttgggggctctggggcaggtaaccctgagggacagagggaggaactggtgactctaggctggtccctggggcagcagaggtcgcatacagagagggtccccagtgtcaaccagggctggcagagggacttgagggggtaagattcagaggacctggggtggggggtgctgcgatagttagctatacccccactttccatggctgcattctcctcctccccacacaacctcatgtccgcctccgattgtcacataacctcatgtttgcttcttatgtctgcacaaaacctcgcctcctcctttcctacaatcatgcgccccctccttcctgcacaacgtcgtggcctcccctccctgtgccacctcacgtctctctctcctcaccgtcgtgcccacctctgatcttctggcaacttgctgcctctcctctccctacaccctcacactccctctgatccccgcacagcctcgcgccccctcttgacccatacaaccttgtgtccccccacccacctgcccagtggttcccagaagtgcggcaccactgccccagcacacccatcatcctggtgggcaccaagctggacctgcgggacgacaaggacaccatcgagaaactgaaggagaagaagctggctcccatcacctacccgcagggcctggcactggccaaggagattggtatgggcctcgggctcagaggggggatctggctgcgggggaggccctgacttggcctcgtggtgtgattgtaaacacgggctgcagggccaggctgtgcagtttgaactcagctgtgctgtgcacttgctgtgtgaccttgggcgagtcacgtagcctctctctgcctgtgtttccttatcagaaaagcatgggatagtgatagctcctgcctcctggggtggttgggggaattcagtaacttattccaggtggagctgccagggcagcacctgtgtgtgagaagcactctgtgttagtagtagtcgtcctagtagtatgagtagtatctattaatagatactgaaaataaggaggtgtgctttgagcagacagaagcagagattgagtgggggtgctgtggttgcttggaggacaagtggcaagtcaaacttgggtgttctgggaaggcttcctggaggaggtggcgctgcattagatctaaagggtgacacatttccttccaccaccttctctcctccctttccccactccctttggtttctcagctcgacccctctttgcctccaaatcactgggctggagaaatatagtaacttctcaaggtcacccagctagtaggtggcccagccagatttgaaggaaggacagcaaattattggctcactgctggggggtgcttctttgtagtggctcagggctgcctgcatcagggaggcgatgaccatgggtctggcttcatgcatggtacccaggcctgctggctgttcctgtccctgtccctggtaggtcccaatgtgtctgtagctcagggatccttgcccaaaagcccaaaaccaccagctgggtttggtcatatgagctgtgccctctgcctcaccacaggactctgcaggcccagggtttggcccccaaattgaatccactagacctcctcccgccccaccgccccagccccgccccacctccccctgccggaactgggagggccctggggactcacatctcttcacaggaagagaaaccgcagccaccacctccctccttctgtgactagcgtggtgacacagccatcttccccgggggcctcagactatggctcacaccctggctcccttcccctgtcctagggccacagctccccagcctgcaagtctttccttttaaatatcaaggattcatccctgccttctctttctgaccaaccagcacccctccaacccctgcccctggactccttctattcagggtgcagctctccagcctgtggcctggctgtcactgacctctcccttgtaaagcacatgctttgggatcatgtggagggtgctggaggcctggattctggtcctggctctgatactgattggctgtgtgaccttgggttagtggctgcccctctctgggcctcagtctccctctccacataagctgacctggacaatccccaaaggccctctctcctccataaggtggtgactcagagttcttgccttggcctctagccagtctttcctggctgaccctgcatggagctggggcaggggcagtgattttaactgtgcctcagaccagcttaggcctagggggagtcctggggggactggcagggatagtgagggaagcagcaactgcctctgcccacctggactccccagccctgggatgacaagttttgggggcagccctgagcccagctgataatcacagctgatgtggactgagcacttcctgggagccacttcattctcacagcagctatgacgaagagctcttgtcaccttcactttacagagaggaaacaggctcggggggacatgttgctggcttaaggccacccagccaggattctgacaggggtggactggctccctaagccacaaagctgagggccatctgtcctccctgcacctccactgcccccaccgccccctcaccctccttgccctctctgtagctcccctgccccctgcctcagcttgatgagccatcgcatggcaatgagtcctagacagatgggagactgaggcccggagagggggaactgactaaagtcctagagcagtgagaggccgagccaaagtgagccctggccccccagctcaggacccttgtcctgggtgagtgggtggctgggtgccagggaaaaggcagttggtggatgtgggggaagtggacgcagatgtggtcccttataaggagacagtggccaagtgcccagtgacacctcctcaacacagggggctgtggtgaccagactccgggctgagcccagggcaccctgctcttgccagccaagccccatgacaaccactgcccatgatccctggtgggcgtatatgcctccaggtagaggggagacgcccagcatgtgactcagagcgagtgacatcctctctgagcctcaggctcctcgtccctgccccacccttcctttctccccagcacctggcctcagtgggctcccctgttccaggggctgcccctcctgccatcccgacttctccccccagctctgtgccttcgggccttggcttccccactctgggcctgtttcctggtctgtgaaatgggaactcaccccggtgttgttggaagcacccagctcagtgcctggcacagggtaggtggtgaccagcgtccatccccttccatcctgccacagagaagcaagcgggctttggcggagggcccagagttcccctcccctcccttctccttcctcttggttctgacatcggcccccaggcctgcatagcatctcggcagaaggggttttgtggtttttcacttcagggaaactgtgcagcttgaaatggacatgggaagtcacacggactctttgcagaatgtcatggaacgccgtccctgggggtgggaactaggcctgcctttctcctcatctgtgccccgggctctagccctgaggggtcttcatgtgggagaaggctgggcctcccatggcaggacagaggagctctccaatgccactcctcccagaaggcccccagctgggcccaggttgagggaatacatccagcgtgtgagtttggatgagtcgcatactctccaggagcctcagtttccttgtctgtaagacagggacggtgctaaggaaggggctgatgatgttgggaagttcctggggagggggccctgagggcttcaggcctcctggggattatttgcaaccctgggagaatcctggagggatgggcaagacaattttctagaaggtgaggctcccagagatttggtcactgatgcttgagccctttccttcacagaaaagcatcaaaattcccgccctccttccacggactaagggctatgtgtccaagaaagacacagacctgccctggaggccttagtctctcactgagttcacgctcgctattacagacatgaggaaactgaggcacggtgacgttaaactccttgctcctggtgacacagcctccaggtgaccccactgggactggatggcggcccccagagcctggtgttcagttgtatggcttgggagggggtgtacggcatggaggggtgtatggcgtgggagggggtgtatggggtgggaggggttgtatggcataggaggggtgtatggcgtgggaggggtgtatggtgtgggaggcgtgggaggggtatatggcgtgggaggcatgggaaggggtgtatggcgtgggagggggtgtatggcgtgggaggggtgtatggcatgggaggcgtgggagggatgtatggcgtgggagggggtgtatggcgtgggagggnnnnnnnnnnnnnnnnnnnnggcgtgggaggggtgtatggcgtgggagggtgtatggcgtgggaggggtatatggcgtgggaggggtgtatggcgtgggaggggtgtatggcgtgggaggcgtgggaggggtgtatggcatgggagggtgtatggcgtgggaggggtgtatggcgtgggaggagtgtatggcgtgggaggggtgtatggcgtgggagggagggtgtatggcgtgggaggggtgtatggcgtgggaagggtgtatggcacgggagggtgtatggcgtgggaggggtgtatggcgtgggaggggtgtatggcgtggaaggggttgtatggcataggagacatgttggcccagaaccccccccgccacttaggccttggctctcctgtccatctccccaaccagactcggtgaaatacctggagtgctcagctctcacccagagaggcctgaaaaccgtgttcgacgaggccatccgggccgtgctgtgccctcagcccacgcggcagcagaagcgcgcctgcagcctcctctaggggtaagagtcccccactctagtgcccaactcccatacacagcaggccctggctgagcagtggcctttggttcactgtgagtggcatttaggccaggacagaaagaaggtgggtatggaggttgcctcagtttccgcagcctacttgtcatctgcctgggccagtctcactctctggagctcatcttccagaggcaaggcccaaggtatgaatgaatgcctggtaaccccccacccccgggccagggagtgggtgtcacggagccccactctgcccattcctgcaggaggtgatggaaaagatgccttggtccctggccctaggagagcccagtcgagccagggagatcctgcacccacatatgtgggtggaggtgggagagcctgagctatgatccccagggggcagatggtggggtcagtgagttggaggcagcccacaaggcctcctggaggtgtgggaccagaaggacagagaggactggtgaggtggggagagcagcattggcagtcctggtgggagtcaaaccttgagcaaagacctggaggtgggaatgagctgtgagccaggaaggcgagagctgtggattctgcatgtccccaaattctctttccctgcttatcttccttccaggttgcaccccagcgctcccacctagatgggtctgatcctccaggatccccacccaaagcctgatggcaccccggctggccatgctgtcccctccctgtggcgtttcttagcagatggctgcagagcttcgttgatggtcttttctgtactggaggcctcctgaggccaggaacgtgcaaatttgcaggtgctgcatcccaagcccctcatgctcctgccttcctgagggccagaggggagccccaggacccattaagccacccccgtgttcctgccgtcagtgccaactgccgcatgtggaagcatctacccgttcactccagtcccaccccacgcctgactcccctctggaaactgcaggccagatggttgctgccacaacttgtgtaccttcagggatggggctcttactccctcctgaggccagctgctctaatatcgatggtcctgcttgccagagagttcctctacccagcaaaaatgagtgtctcagaagtgtgctcctctggcctcagttctcctcttttggaacaacataaaacaaatttaattttctacgcctctggggatatctgctcagccaatggaaaatctgggttcaaccagcccctgccatttcttaagactttctgctgcactcacaggatcctgagctgcacttacctgtgagagtcttcaaacttttaaaccttgccagtcaggacttttgctattgcaaatagaaaacccaactcaacctgcttaagcagaaaataaatttattgattcaagtttggagatatcgtgatttcaggtgcagcttgatcaagggattcaaatgatgtcatcgaggcttgtttagctctgggctctgccttctgctggctggttcattctcaggcaggcgacttagggcttcatcctcccaagttcaagttcagggttcatccttccaagttcaagttcagggcctcatccttccaagttcaagttcagccaaaaagagcaaatgtctatcccaggcaaagttctaactaagatttactgtgattggaccagcttaggtcctgggcccccttttaaccaatcatatttgtcagagtggtgcagtgctgtgctctgactggccaggcatggaccatatgccatgctggaacagaactgtggcaaccccagcgaaagtgtgtgtactgggggggagggtgagttccaaagtgggctgagagcctggtgggaatttgggaatttgggcgagaaaccctcaacctccactactggaggtcatgggaaagtgttcatttcagcagtgacatgaaacaatgctggaccccgaaggtgataagcaaaggggagtttctttaaaagagaggcggggttgttgtgaggatttaagaagttccgacatgggcacaacagtgcctgcacagtcagtcccacctcaggacttgctaagttctgtggaggtgccagacctccccctcctgcggacaattactctcctctatctcaacttctcactcattcatcaaacacacatttattgagcacctcttctgtgcctggcactgttctaggtgccagggatccagcagtgctcagaagtccctgccctcaggaggctgacactctagagaggctaagagatctaagaggctgcccctgacaacccagaagaccccaatttccagcccatgaaatgcttgagtttccacattgtgctttcccagagctcccagccaaccccactatccccattagtccccatgttctgaggcaggaccccctccagctcactcacctcctgggagccccccttaaaagggattaggtgcagaggggaaacccctttgcttttcttagtttcagctcagacaaagtcatgatgttttcaaagttacttctcttctgaaacagaaaggaaatactaaaccccacccatccatggcaccatacagatgcaggcggccaggaccccactccctagtatgttcgatgtctaagatccctgaggcaccccctgaggttggccagagtctgagggagcctctttctgctccctcctcttcacagagccttgggataaactccagagcctccgcaacaaaccatggccctgaaggtctggccatcctctgcctcccactcttattgcactcgtgcctctaccatcagactggactgtcatttcttccactccacattcatgcttctttcattccaggcctttgaacatactggacccctttcctttgctcctggaacttccctgcagggcaaaggtgggcccggatctccttccatgtgtgttcagcccgttaggtcgaccccagtagagacaatctttgcttctatacgataataatgtcagtaaataacttcctttactcattgtcttggctcccatgcacatattatctcatttaatgttctaatagccttccaagataggtactcttagccacggtttgcagaagaggagatgaggatgcgggagggcacaggtttggctcaaattgacaaggcagacactgtcctttcccaccctctccctctgttcccaccctccttgctaacagaatcctagttttgtgcatagcagcaccgtacctaacaccgacaaaatacttgtttttccagctggttttgtcgctggggttttcaggccacatagttctggccgagaagccgatgtgaatgaaagtcagcgggagagatggcttctgtgaaagttgttttcttccttaaaaaaatgacaggcccaggccgggcgaggtggctcacgcctgtaatcccagcactttgggaggccgaggcgggcggatcacgaggtcaggagatcgagatcatcctggctaacacggtgaaaccccgtctctactaaaaaatacaaaaaaatagccgggtgtggtggtgggcgcctgtagtcccagctacgcgggaggctgaggcaggagaattgtgtgaacccgggaggcggagcttgcagtgagccgagattgcgccactgcactccagcctgggtgacagagcaagactcaaaacaaaaaaaaaaaaaaaaaaatgacaggtgggatgtctggagctgcagcagccgtcttgtgagctcgaagccacaaacatgaagatacaaggccccgtgctgagaggggatgagcagaaagataaaaagagcgtgagttcctggcagcagcagtgggcagctgagccaatgctaacagctgccttgttatgggaactgaagaaaatgaaaccacccaattgttaatgtcactgttggtcacaccttttgttacggtaagctgacagcatttgtcactgaagcggtaggactcctagcgcagtgctcttcccactgtataactgttcccagcagccactccaagtggggtgagccacttgtttctgctctgcaaattggctgaggatggaggcccctcatataggaaagagaaagcttatgggaagtcagtgagaacctgttttgaaacaggaagacctgccggttgtgggcaggagctgacaccatggtttgctctttcatgtgacaacaacccctcccaagtgcccacctagtgccaggcctgggctggcagcaggttccatgcctcacttcgccccttcttgcaatgaaatcatggcctggtggttgaggaaagtgcctgccagacaaggccacttcatctggtgctttctattctagagactggctgttccttgtcccttcttcaaagcggaggcctggggtcccccatactcctccgatcctttcaccctggcattcactggccaccaagcttggacaattcagcctctgtctattaaatccaccccttgtccccacggctgctccctaacctaacccctgccatgtctcccctggacagtagccacagcctcctcactggcctcctgtcttccctctctctgcctctactccatttgccaccaggtggcctggggattttcctcgtttacaaacaactgtgcagtcaaaaatgctgatagaaccacagacttattcaatcatcgaatccttcagcaaatagttattgagaccgtgtgtcaagcccaaggcttgggggtgggtcaagcatgagcccgctctcaggagctcacaggccagtggggaggctgtccagccagcagagagccccaggaaatggcccttctgcttggatgtctcctgagcatttcaaactcacacgccccgcccagccttcatcactcagtaaatgcatccaggctctcaaatcaaaaacctgggagtcctccttgacaccttctccctcaccttccacttccaacccatcaccgacaatctcctcagtgccccccttctctgcattgtcatggtttctaatgtccaaaccagcactgtatcctccctgtggtagcctcctgtcatagtcagcaattggtacaataatgctgtgtaacaaaccaaactgccttgaaatccagaggcaagaagcagcaggcctgtattctcacactcactagttgtaggtggacagtgggtctgctgacttaggagggtttggctggtgacttggcttcgggctggggatgggtggtctcggtcctggctgtgggtgtgtgtgggtcggctccacctgtctctcatcctccttagaccagcattccctggggcatgtccttctcattgtggatcacaggagcatgagaagccaagccaaaccatgaggtgtttaaggcctctgctcatgcttcacatggccgagcccaacaccaccaatggggcagggacaggaactcttcccagacttggaggaaaggaaatatttgctgagcaccaactgagcaccaatcctaatgctcacacctcctgactggccttcttgttttcactcttgcccttggccatggtttatctccacggagtggccagagtgatcgcgttaaactaccaatcagatcagaccactcccttgtataacaccgtccagtggtatctctggacatttggcacgaaacctcctccctcacctacaaggcctataggatgttgtcagtttctacctccagatctcacttggcactatcttccctttccttgcaaagctccagccacaagggctgtgatctggtttggctgtgtcccaacacaaatctcctcttgaattgtagttcccataatcccaagggaggaacccagtgggaggtaattgaatcccataatccaggtgggaggaacccagtgggaggtaattgaatcccataatccaggtgggaggaacccagtgggaggtaattgaaccatgggggagggggacgattacctccatgctgttctcgtgatagtacgtgagttctcacaagatctgatggttttataagggttttccccttttgcttggcacttcttcctgccatcatgtgaagaaggatgcgtttgcttccccttctgccataattgtaagtttcctgaggattccccagccatgctaaactgtgaggcaattaaacctctttcctttataaattacccagccttgggtatgtctttacttttattttttattttgttttattttttgagatagagtcttgctctgttgcccaggctggaatgtaatggcatgatctcagctcactgcaacctccacctcccaggttcaagcaattctcctgcctcaacctcctgagtagctgggactacaggcatgtgccaccacacccaggtagtttttgtatttttagtagagacggggttttgtcatgttggccaggctgggggtatgtctttattagcagtgtgagaacagactaatgcaggctgctcccaggattttcactgtgtgccaggccccttctaccttgggacccttgctcaagccgctccttccacacatagcacctactctcccagatcttcctccacaatcaccccacactcaatctcgatcacctcctcctcctgcttctctcttggtgcctctgttgaagaacagtcttcatcactgtttataattgtttattaaataggtgtatttattcaaaaagtgcttcccgtctagactgtaagctcaaacacacagaaggacctgcgtgttttgttttacactaaggccctagtgagtcctggccacctaatccatgcagaatgaatgttatttgtacaaatgagtaagtgggtgaaagaatggactttaatgaaaatagagagactgaaccatgccagcgacccagctgagcccagcctccaaccaccccagccaggtgccagccatgtacaagagctgacctggatgtgccggcctagctgagtctccaggtgactcgcagtcagccaccatcaaagaaaaagaatggcctgaatgagcccagccaacccacagaatcatgagggataataacatggctattgtaagccactacattttggggtggtttgtgacacaggtactgatactgaaaccttgactttttggagtctagactcttcgttatctgctcctccgatctctgacctctcctctctacccaccattcctaccacgctccagagagatactgacatttggggacatctgactccatccagctctcacatgatatgggaggcagagcaggacaggtcccggagagggagaggcagatccaggatatccctagaaggcttccggagaggacctcaaggaaggtaaaatgagcagttttttgcagaatccaaaattcaatcaatacagttcccacctattaactatgtgcttcacaccaagctgtggcaggagctggaggtgcagagaggggtgaggcacagccccttgctcaccagcagctcagaagccagtgggagagacagacgtgtaaatagacatccaccatgtggcttgatccacagatcacagaaatatattcaatacagaaaggaagagactctcgtctcaaggcgctagggtagagatgtttccacccccgcctcctcgctgaaaagcagccacgacaagaaggagaacaagaaacagaaacacaaactcccaccttcaaagaagccaggagacacctgtaaccccaaaccacaatgtatgagcagcaagagcagatggagggtggtaaatgattgaacagagctgaggaaggcaaacctaagtgcctgctgctacatggtggggtggagtaggggctttggagacagaaaagatgcaaatcacctggtcttgcagaaccctggggaggcttagaattagggaacccagacatcatggatggtgaggcaggaggctgaaaacaggggttgtgtggaagtctgcttaggaggagtgagatcccccagcaccaccccaggtcttctcttttccattacgtggtcaggcacccacccctccctaaccccagcaaggagtattcagccagagttctctggacccagagacattcgctacagggcagagtgggggtgaggcaccacaatgcttttggagatgtcaattcgatgatgccttgcaaataatcactcctccactcctaccctccctacccatcactcctaccatgctccagagagagattgacacaccctctatgggaggggcgtgtttcccctctcccctgatgctgggcttggccatgtgacttgctgtggctactgggatgacaacctccacctcctgggttcaagcgattctcctgcctcagcctcctgagtagctgggattacaggcatgcgccaccacgccaggctaattttgtatttttagtagagatggggtttctccacgttggtcaggctggtctcgaactcccaccccaggtgatcctcctgccttagcttcccaaagtgctgggattacaggtgtgagccaccatgcccgggcttaatgcctcattctgaaacaggagtggctaacacaggatgactggttgaagaaggctctaatgatagcattgccccaaatgataaatgaaagagacccaatcaaataagtagaagaaaaggaatatcagtaagcaataaagatgatgcagtgagcagaagaaaattttgacaaaaccatcattgccatccttgaagagataaggaaacatatatccacaaatgagtacagaatgccatagcaaagagcaggcagaaatcaggagagagctggttgggctcagtagctcattcctgtaatcccagcaatttgggaggccgaggtggatggattgcttgaggccaggagtttgagactagcctgaccaacatggtgaaaccctgtctctactaaaattacaaaaattagctgggtgtggtggcatgtgcctgtaatcccagctactcaggaggctgaggcagaagaatcacttgaacccaggaggcggaggttgcaatgagctgagattgtgccactgcactccagcctgggtgacagagtgagagagcgagactgtctgtctcaaaaaacacaaacaaacaaacaaaaaaataaaataaaaaacaggagagagctcttggaaatgaaaaataggttgatttaaaaaaagagggactggaagagaaaaacagatttttttaaacctcccaggaagtagaacaaaattataaagatgagcaacaagaagaataaagatttcatccaggagacccaatattcaaatataataggagttacagaaggaaataacagaaaaatgtgtctcagaactgaagaacacaaatcttcagattaaaaggctacttggtgcccccgaagacaaatgaaaaaagaatcaaatcttgttataaaattttcagaaatttaaggataaagcaaagatcctagaagattccagaataataataataaaaaaattagcttaagttacacaatggattgggattaagaattgtgctggaagctggagacaccgacagacgccttccatcagctgagtcagagtcattctcaatctcaaattctatacctagcctacctatcaacatgtgtgagaggggaattcactattttgaaacatgcacaccttctctgaaagttactgggagctatgctacatcaaaatgagagaggaggccaggcgcggtggctcacgcctgtaatcccagcactttgggaggctgaggcaggtggatcacttgagcccaggagttcaagaccagccttggcaacatggcaaaaccccatctctaccgaaaatacaaaaactatctgggtgtggtggcatgcacctgtagtcccagctactcaagaggctgaggtgagaagatcgcttgggcctgggaggcagaggtggcagtgagctgagattgaaccactgcactccagcttgggtgacagagcaagaccctgtctcaaaaacaaaacaaaacaaaacaaaaaaaccccaaggcccccataaaatgagagagtaaaacatcaaaaaggaagacatggaatctaaggaactggattcatacaggaaaaagctgaagggaatccccaaacaacaatggagagagaatctcgggatgtcagctgcgcacaggcccaaggggcagctggcccagataagaggagctcgtcagtctccaggacgaaatcgtccctgaggctggactctggaaactccactgtgtggtttttacgaagctataggaacgtgtggaaatgcttagtccaagaaatcgaagatatttttaaaaaccaaaaaacgaagcaattatgaactcctggctgagcaggaaataatatttacattgcattaatcatgggaacactggatatgcatttaaccgaaactcatattgagaagatggggagaaggggtgagagtgcgtaagaaatgtaaacttctcctgtactgtaagaggagtcagtagataatgggtaaaattgagggattaagacataaaaaaatcaatatgatatttagcgagaaagagcttaactgagggagcaattgccgagcgggtgggattacctgtgggatgggggggtgggagggatgggggaggactgctgttttttgctgttacaaaccttttcagcgctacagtagtccacttagcgcagtttcagttacctgtggtcaaccacagtctaaaaatattaatagattttgaaagaaaaagagacagagaggtcaccatcatataacttctgttatgatatattgttatattgttttattgtatattgtattattaattattgctgttcgtctcttaactgtgcctaatttataagttaaacattatctttctccaccatcgtggtgtgtggttgactccgtttctcgccacagcttctcacaagactttcaggatcaagtgattcctgcacaagaaacaaaagcaaaattgtcccattccccagtggatctgtatgaaaactggtaataacatcaggtacagctccaaaaggagatattggaaagaaccaagctgggtctataaggaattgagcatgagatgctacacatattcatgttgtatcaaggttgtgatcatattaccatagcaagctgaaaatgtcaccactatctggacagctggacatgtttgattgggaaggtactttttctctttgttcatatgctctgcactagtaggctgggttcagtaatacataggtgagatcttttatttaaaaaaaagttatcagcctgtaatccctgctactcgggaggctgaggcaggagaatcgcttgaacctgggaggcggaggttgcagtgagccaagatcgcaccactgcattccagcctgggcaacagcgcgagactccgtctcaaaaaaaagaaaaaaattatcaggctgggcgaggtggctcatgcctacaatgccagtactttgagaagctgaggtgggaggattgcttgag

SEQ ID NO: 1568 - DNA, 833 bp, Homo sapiens
aacaagggtcaccaccgacactctccaggctccggacacgatgcaggccatcaagtgtgtggtggtgggagatggggccgtgggcaagacctgccttctcatcagctacaccaccaacgcctttcccggagagtacatccccaccgtgtttgacaactattcagccaatgtgatggtggacagcaagccagtgaacctggggctgtgggacactgctgggcaggaggactacgaccgtctccggccgctctcctatccacagacggacgtcttcctcatctgcttctccctcgtcagcccagcctcttatgagaacgtccgcgccaagtggttcccagaagtgcggcaccactgccccagcacacccatcatcctggtgggcaccaagctggacctgcgggacgacaaggacaccatcgagaaactgaaggagaagaagctggctcccatcacctacccgcagggcctggcactggccaaggagattgactcggtgaaatacctggagtgctcagccctcacccagagaggcctgaaaaccgtgttcgacgaggccatccgggccgtgctgtgccctcagcccacgcggcagcagaagcgcgcctgcagcctcctctaggggttgcaccccagcgctcccacctagatgggtctgatccgccgccgccccaggcccgcgggctgctgacagagatacgcgccgtggtgcgcacggagcccttcacgggacgctacagcctgtgccgggccgggagctgggcagggggaaattagcagtggtgagaaaatgtataaagatagattctgggaaagaatttgctgcaaagttcatg

SEQ ID NO: 1569 - DNA, 579 bp, Homo sapiens
atgcaggccatcaagtgtgtggtggtgggagatggggccgtgggcaagacctgccttctcatcagctacaccaccaacgcctttcccggagagtacatccccaccgtgtttgacaactattcagccaatgtgatggtggacagcaagccagtgaacctggggctgtgggacactgctgggcaggaggactacgaccgtctccggccgctctcctatccacagacggacgtcttcctcatctgcttctccctcgtcagcccagcctcttatgagaacgtccgcgccaagtggttcccagaagtgcggcaccactgccccagcacacccatcatcctggtgggcaccaagctggacctgcgggacgacaaggacaccatcgagaaactgaaggagaagaagctggctcccatcacctacccgcagggcctggcactggccaaggagattgactcggtgaaatacctggagtgctcagccctcacccagagaggcctgaaaaccgtgttcgacgaggccatccgggccgtgctgtgccctcagcccacgcggcagcagaagcgcgcctgcagcctcctctag

SEQ ID NO: 1570 - DNA, 96597 bp, Mus musculus
  misc_feature (419)..(438): n = a, g, c, or t.
  misc_feature (8061)..(8267): n = a, g, c, or t.
  misc_feature (17660)..(17679): n = a, g, c, or t.
  misc_feature (40373)..(40392): n = a, g, c, or t.
ttaataaaccattggcagtgatttgagtttgttgttaaatatggttgtgttctgatttgccacgggaaggtggtcattggtttttaagagcgtatgatgctggtggaaattcatggagctttaatcactgtctcattaacagggtgtagtccgcttttcatgtttcttcatgtgttacagcttttccagaatgcacagaaccttatgtgcaattaaagtaattagggaagagcagtttttcctctttagcaaagggatcagatttcaaactgccctgctaatttggttaatatgtacttcttttagaaagtaccaaattctgataaattctttgatttttatctcctgagaacatgcctttatttctatcctgacaacagcataaaatctcattatcaaaacaagaataggagaagtannnnnnnnnnnnnnnnnnnncccaagtcttaacattttctccttcccaaatacttagggcatatgaattattttatttagtaactgaaaagtgtgagtcaacagagtgaggggaaggtgcttttatttttctaacaagacaaatgaacacaggaaaactattctgcaaatgtattatacctactgtattagtttaaccggaaagtgcaagcaagctgcttcctgaagagcctgctccagatacctcagtgactgaagtaaaacccatatggtgtatgtgtttaggcttacagtgggtttgcggattctgttgtgctttgataactctttgtgtcgcttatgggagttgttagaaatatgacctttgttcagtctctaatgaaggaggagaaacaaggcatgttctacatttatagaaatcatgtataatgaaaacatttactttaatcatatgacatgatagtgcctgaaaatcttcatatgtaatgtttttgtaggtaccttacactgcttatatactattaacaagaagcaaacattttgtccatccccacgattgtcgatggactgtttattcaagattctaaaattgacaaataattataaaattcaagaattgtacatacttactttacctatttcttttctgagcaaggtggtactttactttgaattagcaagagctggaaactgatgttataaatgacccatgggctggctgacgtaagtggagcaatactgaaccgattttggaggtatagaaaaatgtagattatttttacagcaaaaggcatttcatacttctctacatatccccatcagagagcatcgcagtggggattgaggtatagtgtcttctcaagttactagggaaatttcaacagtaagagtatgctttattgttgagcaaaagctctggtaaatgctttcttggaagcagtgacttgttcaagttcagacttaatacatgaacatgccttatggtccaaggatttatgttagtaaagtgatgcaaacataagaacaatcttcctatgagcacttgcagtctcgctgagaagtcaaaacctgacattgatttaggtcactactcacaaagaaggggcactgagtgaaggaatttatagctcttagcacgtaattatgttggcctgtttcatttgacataaatccttataacacatataataaaattaattcagattgtatctattttatattagaataacaacatttgttgctatttagcatcttgggtctaggtaaattgttaatttcgttgaagccagtctctatttacagtacattgaagcaccacagtgagagtgagttactggtgagtctttgttttctgacatttcttactgaaagcaatcgtatgtgagcttatgacttaaaaaagctctaatttgtataataatctaatatggaataactaatatatgaaatctagattgctattaagatcaaatctatttatcagaagaaatatttttaggattgaaatgatgaattttgcagcagccatgtggcttgtttttatgattttggaacatgaaatattttggtgaaaaatacttcattgatttttatgggaagaagaaaatatttgtgtgtggtatttccttatgagagcagtactaattcatttcttagaatatttccaaataatatatacagataatatatacaaataaattacacagatgattatacagtatacacttttatatgtcatggtttcattgattatattctaatgaaaaatacattttaattataaacaatgcttttatacttttctcataataataactgagcaacatatatagggtaattttcaatagacatagtcctgaaacttttttctaacctagcttaccgtgctagaatttaaaaccaatgtatgaaattgaagagctcgctgttgaaaatcacagagtaggaacccaaatctagttgatagtagtgagaccaattgttacaatttcagagatctcataaaatacagggcagagtaagactggtgcttacagaggtaaaattatattttgggtaggttttaaactatatatgccatttcttcacatgtcatttttataatttatgccacttgagtctgctaaaatgaaatatgcatatttaattatgtacattgtagggctagtcaaagggaagccagagcatcttagtgaagggtctcaaccgcaggtatcactgaagtactaagaactctggaaatcttactcccctgttgatcaacttcatgcttttgaattgtgaagtgacatcattgccactcatctgtagcatcttttaaaacctttacatagaactttcaccaacttcataaaggagcttggtgatgctattcacaaaaagagaagttgaatattaaattttacatttgctgctagttactatgttgaataaacgatttctcctttgagcaggccttatagtcatagtccacgatcagagtatcactggggcctaacagcatcaccaccaggcttccaggcttgattagcagtttggacaggctcatttcacaaggatgaactctggctttttcagtgtttttttttttttcccctgaaaattccagggaggtgattttcccgatttcttgtggaagacttaatagcattaacttcattgttgcctgtgttctggtttctatttatcactttgaaatagtaaatgttacaggcagatcagatatggtaagcgaagctagcaagataatgtctatctaatacatgagtaaagggctgggatctcctcaggaggaacagtaaaatagcatgcagttctctctcctgtcttcttggataacagagggaactgcttcagcgctggctaagtgtcataggaaactgcaaaggaattatactttatattaaagcaaatcttttcacttcacaatcagggaggcatttaaatggggttctattgcctcctattctcttgccagttggtattgctttcacttaattataaagatgaaatcaccagtgtttcaggctgtggaactggagtccatacaatgtaacttgttgaatgcattttgagactagtatctgtgtgtgcttatctgtatctgcatctgtatctatcatccatgtctggctgtctctatctctgtctatcgctatcttctctgtgttccttattcatatgtttatctatctactatctgcctaccacctatgtacagtctggaagcagagattatttgtttcctttggtccagtggagtttcagtactgattatagagaaaaatagcctgtgctcatgggatttctatgccaagactgaaacagtcaatgagataaatgtttctacttctctacttcttctttccgttatttcttctggttgatatatgatgtgatatcatgtacttctcttacaaaaagttcgtactgctctgaggaggggaaaaggttggtcacttttgataaaggtgaaccaatggactgtttggctacaaagctagtgactagtatatgaagtacagccatcattatgataactatcttctcttgatgttaatattttaaaacttattttcttatagacataaattcaacattcacttttttaacataacttttacttttttacagtctagtcattcccccatcctggtcctccctcccacagttcctcatcccattccttctctcccctgtctttaagaggatgttcccaccaccctaacctcctgccaggcctccccactacctgggacctcaagtttctggtgggttatgcacatctcccactgaggtcagaccaggcagtcctctgctctctatatatgttgggcctggggtggggtgggggactcaggccagctggtgtacccacttttaaatcattgcatgcatttaaatatgtattttgtttaaaattttctaatttgaatacagttctgtcattctactctttaacaatggtgtattaagtaacctgtactccttcattatctgtcctgctatagctatttgactgtttagggaacctgtgaacgaatcattattttaaaagcttgtattgacaaacctcaggttctttgtgcgagttagtaagtacagacttttcttggcatcagcatttctgtaatgtgttagaccaggaggccgcattgacagtctctgatagccaagagggtgtgtgattgtaggttagcctttttttttagcagttcttcataacttcagtcatttgcatgtcaccatgattttattgccaacacattagcttggtcttagtcttctaattttttttttaattaaagattgatgtctgtgtaagtcatcacatgacatattacaggctgtacaagctggtgtcagcactctgggcacctattatgcatctccatgccatgtccaggcacaccctgacaagtactgagttcagcagctctgctctaagaagagtgacccttctgaaggttatcaacctttcataccacagcctatcacaaagcacagttgtgactttaagctgggacagtatggctgcagagctctgcagaagcacttagtattattttcaccctgaaatctgttaatatttgggataaatgctgagaaaattattgtgtgaggaatcagtcttgttgatattggcaaccaagaaaaaatgctttggacaaggtcttcctttttgttacctccaaacttacacagtgaaataattcatattttctatttagactaaaactatctaataaatcaaaattgtaatgagaccccacattttaattcctcaatacataacatatcttaatatcaaagtatcagaaaaacatctgtcagatgtcttattgattaccttgggatataattggagttacttacttaagtttgtcttatagcttaaagggctagtaagtgggtagcctaagacattaaggtccttcctaaaggctgtttagttcactgaaagagaattctgcctcatacctggcaggcacatgtttcctgcacactgtgatgcatgccctccctagtcagtgtccagtgccgtcagcttactagaacagaagcaaagaacaactggtaatgcttcctcatgattttctttccctttgtcattttcaacacatttttcttttttttttttttttaagatttatttatttattgtaagtacactgtagctgtcctcagacactccagaagagggagtcagatctcattacggatggttgtgagccaccatgtggttgctgggatttgaactcctgaccttcagaagagcagtcgggtgctcttacccactgagccatctcaccagccccctcaacacatttttctttgtttttcttttattttctctctctttttttgtaatttttactttcttgattatttcatgttgtttcctttttacttcatagaatgtacacatgatttgtgacatcactttaggtgaaattggtttttgtggcagaatttatttggctatagggcatgccatatgattcaaggaaatgcagtggttggaaattgatcagcgagtcacagagaatttgtcctataaatatcagaaagtttgaatcttgttcaaaaatctttaaatttccaaacaagcattttgtttttaaggtaactttatttgcttatagtatattgaaatagtcagaaacatcacagaggcaatttacctgttattaatcatcttagaagtagattaatttcacatgataattattaaaaaaaacccttagtttcagagataaatgttgtgaaaaattcttataatttgtatatcactcatacatacagttttcttttcctctcctctcctctcctctcctctcctctcctctcctctcctctcctctcctctcctctcctctcctctctctttttcttctttgttcctcctcatcctcctcgtcctccttgtcctcctcctccttctccttctctgtctccttgtttatgatacagttttcattatatagctccaactggcttggaattcactctgtagcttaacctggcctcagactcttggaagtcttcttactttagtcccctaagtctgagggcgcatacactgttaaatattatctcagattctctctgcttttagggccagacactgttactagtcaaagttacattctgagaattcaatgttgcaaatcctttgcagtattacctcaagcagagcaatttcatgaaattaattaccaaatgtgtacagattgatgtccattctccctattcactctcttacccgcctaatcataaacatgctgattatcatctctgcctatgttcatagtgatcaatttacagacatgtttataattttctagttgtaacttttgaataacatctcttatatggaatgaaaataaaatagacaaaagtatgagctacaggcaaaattttaattaatatatgcttcatatatctggttttttatcaatatgaattaaatcacacatatgttaaacatataataatatctgttgtgttttaagatctagggtttaggagaaattgataatataccttgctgtcagggagatggtaattttaggcagaaggacctaaagtgagaaacatatttatgggatggaattgtggtgtgttgttgctcatggttggtccagctttacagagaagatggtatctgaatagcaattaaaaacaagaatggatttgccaggttgcatggcttcagggtattcagccagattgagtgatagtgtgtatgtagtatgctcctggggttccagtagtctgttttgggcagaatctatgatagttcatctctgtaaacatagggatatgggatcagaagctaaagaatgatgtgtgttggttcattcatggagaaaggcctctttacagtggcctcttcaacacttgtgaggactgagaaccaactgctgtttgatagagaatgggcgcctctaggtctagaaaaggaaaggggtcttgagaaggaaccagtcaaggtggacgcttgtagacgtttcctgctggggataactgccacagaagatacagacagacaagcaggaagtccagggggaactcctacccaagggtgacgtttgaacaaaggaataaatgtgatatatgagaccgccaaccagtgagagtgagggaatcatggaagaggagagaaatgaggtagagaagacttggaggatgctgtgtaagagagggaaccatttaatgcttgcctagagactgctgggcaaaggagggcttgcatgaccctgggatttgtagtatgtatttgattccagtcacatgtgattacatgggtatatggatgtccgtgtgtatgttacttttgtgtcctcagtaatctgagtcctgctgtagtaaacaatcatttatacacctatgcttttgggacagctttctcgcgtttgttgttgttgttttgtttatttgtttatttttgtctgttttttgtttgtttgtttgtttatcactgttctcaggatactgagatgatgtatgttgtttctgcccctggaaacgtggtttagtggctccaatgtgtaaggaaataaacatgcaggacagggatggagatgtggaggcaatgcaaaaatggtgatattagtgtgtaagcgaacagagatgtgtcannnnnnnnnnnnnnnnnnnnnnnnnnnnnnnnnnnnnnnnnnnnnnnnnnnnnnnnnnnnnnnnnnnnnnnnnnnnnnnnnnnnnnnnnnnnnnnnnnnnnnnnnnnnnnnnnnnnnnnnnnnnnnnnnnnnnnnnnnnnnnnnnnnnnnnnnnnnnnnnnnnnnnnnnnnnnnnnnnnnnnnnnnnnnnnnnnnnnnnnnnnnnnnccttttttttaaaaaaaaaaaaaagagagagagactaatcgctgtgtgttggtggtggtttgtacaagttagaagccttactttcctcacagcgttcaaaaggaaaacaaaccaaaaacatacatgcttttattttttgtaaccagttaattttttttgagaaacatttttttcacttgattgaaagagaaagtgagctatttagcagtgaaactgccctgttctaaagagtgggctcctgagttaagagaaggcagctgcctcagcccctaccctccagcatagtgtggggctgaggccctgaagtgcatcagactgcccaaatcaaattgctcacttaataattaatgttcctgcaatggaatcgctttctccctggaggttggctttcagatttaccagacatctgacaacactgcaccccttattctcgacacaagacctcagcttctgctttaagaaacatctgaataaaggatgcttttgttcatccctcgcctgcctgtgatagagtgataaagtgtctgatggctgaatggaatagttttacagtgtgagtgctgctgtcagcagaggggcagggcttgggttttaggaggaagtgaattggataggtcaggagaatgtaccatttgtaaacacccctttccttttttattcacgtgtcaggacagccacggcaggctgctgagtgtccacccctgcacagaaccagagggaaagcagctcggacttgagctgtagtttttaaacattgctcttgattactcgggagtgattgtcaagtccttggacttgcgttagaagctgtttggaaactaacatggtttagtccactaactgcatgttgggtaaattcaaaacccacatgctcgtcctcttgcagtggaataagtcacatctgatggacattttctgtgcttatagcatagtaatgaacgtctgacaggcgcgacctttcataagacaacccacactattggctttctgcccagaatattgctgcaacactatctgtgattggttatctctctatcatgcattgcttcacaaggggaaacggccccctttttaataaatctacgatggctggctgcaatatgcctcactgtaagtatttgtgtgtgtgtgtgtgtgtgtgagagagagagagagaaagagagagagagggagagagagagagaaggagagagagagaagcagaaagagaggagagagagagagagaatatgaagctgactttgagttgcttagtctgttatcacatggcaaggttgtgctgctataggacatcagtgaatgctacttagtaaatcttaacctatctcttttctctacaggttggtactaagaagtgcctttcctgacgtctctgctgcttggaaccgcttctagagcagcctctgcttttgccttgcttgctgccagctagactgacgacagcacatccgccctccacctctagcccagacaccccatttctacttctaatcaggagaaaagctctgagtatctgccattgccctaggctgctttagtttagaagaaaagtttgctgaaaaagtaagataccttctgccaggaaatcaaggaggaaaaaaaaaaatcattttctcgattttgctctaaactgctgcatctgtctatgccaaactaatcaataccgattgcaccaccaaactccatcgcaaatcagctgtgaggagattccctgtcagacaactttgctgaaagcagcttggaaattcggtgtcaaagggtctgccacgttttcatgcttgcattttgggctccaaattggcactgggaaggggttactgagcacacggctgagtccaggcctcctctaaacacccatctacttacagtcctggtattcctctcaaaaccaaaacctctttgaattaacagtttcatgctgtgaatttctagcggaggtctttccctttatattgaagtcacacttttccatgtgccgttaaatcggggacgggggaagcagcctttcggacattttcacagttatctcacactctgagttttatcagttcctattttgtttagtttttgtcttttgttttggttgctgattttttttctatttttctttttcttttctttttgttttttccttttttttttttttttttttttttggagaggggttgggtttgttggtttcattaaacatttaactacctgtaaaatataaacatggctgttagtgtcacaccaattcgggacacaaaatggctaacactggaagtatgtagagagtttcaaagggggacttgctcacgaccagacacggaatgtaaatttgcacatccttcgaaaagctgccaagttgaaaatggacgagtaatcgcctgctttgattcactgaaagtgagtaaatgttacctccttttaaggatatgcaatgattgattaaggggtatgggtacatggtactctaaatttggaattatgggttgttttgttaacactttagttactcagaatgttctggctcctgaggctggcctggggctctcaactagatctcatagaatcaaacagagccaaactttgttataaataactttgtcaggcctttaactccgaactccatgcctcccctcccctccctttcttttcttttcttttttttttttttttcctaaagcagaattgttacacgttgatgtagttgtgacttagtgatagcaagtcagagtctttgttcagcaatggtaaatgtttacattcaagactttcatatataataaggccaagattgaatgaatatatgttgtatgtctttgttggtaaactttgtcaagctgttataaatgaatggcaaattctgtgtcagctgatcataggtaacatttttactcttttttttttttttttttttttttaatgagatgattttaatggctaaagccatgtcctttttgggaaaacatgactagaagtgagagttttgtttcggttgctctggtatcttatccaaagcatatactatattagatgtggactttgtaaataggcacaaactcctgtgtcctgttgttcattgggattttcatattgaggcaatgcagatgttcattttctgtgagattcttgccagttgttacttatagtgttctgtcagaaatgttaaaagttagccttgtgtgtgtgataagaagaaatggtttatttatgttagaatttttgacattcaaaaaactgtcattggacttgtaagccctgtatcaggtttcaagtgggtcttgtaaagatagcacacatgtctttgttttgatacaaggtcaaggctagaaatgtgttctggggtgtcttcaacctgcttgatttaatcagattaatttttgaatactaaatgcctacagctaattctttgactcttccaagatgggtcaccatcatatggaagtctgtgaagaagtctcagagacccatcatgtttaaaaccaaaccatacagtaatccaagtgctttcttacatcacgtcagggtgagttagaagttaaccgtttcagctcactttgtgatgctcgatctggtaaagtttttgccaaatgtttaagatttgattttcagaacaggatatgaggaggtatgtgttagtaaccacagacctctgttaagatggcatgctatataggcagagtcctagttgaggtgaataaggggaaattaccactttctctcagcttggccttaagggatgcctttattataaaggtgttgatacctttgtgaacattaatcctgaattaatgctcaccaattcaggtgtaatgagagaaggatccataacaggaggagcaaaggactaattgcttttgtcgggaaacagctgtgtccataagtaactcctttttgacccaattcctagtaaatccagtttataatcctatagataattggtggtaaactcctagctcagaaatgaaggacattaaatttggccgtgacattgaatggctttacagaagacctgccggcacagggtttggaaacattgtgaaacattagtattcagttgctatttttccagctccaaatatttttttagttaccgttcacttgtggtcagagaacagttcccctttgaggaaagcaatcgtcctgcttacagacacccagtgtccctaacgaggttcaacccccacatcaaggactttaaaacaaacaaacaaagaaaaccacaagaaaaaaaacccaataacaaatgaattatattaagttttaaaaattatttgtgaaatgaatttactataccagcaaatcacagtaaacttcatccttttgttttttactaagaaaagctggaatttttagtttcaatatttggcaaaacatttgtgtgtttgtgtgtgtgtgtgtgtgtgtgtgtgtgtagagggaaaattcaacacaaatttatttgcgatagagcttcatacccagacaatacctccttagatgttagtgaaataactgttaagaatcagtcaacagagtttctatgtgcagttaagtatttgttggacttctgcctattaggtagtcctatggtgttcagttttgtggctaaaatagatccagtacacatctcaaagcacttaaagtatctgcctgactcatgcttgaagttctgaagtttgggagcattctgagacttggcagctagcaaccaacagatcatctccattgtttcagtaaatgaaaggtattttaaaaacttataatatcctgacttcttcaatgaaatgtgctttctgcattactttttatttctgctccagcctcttttgagttcttgagccatgagatggaagtagcttgtgtaatctactatttttagaaagttaggaaagcaaaccaaatactctcagagaggaccctgtgaaatggctgtacccttcagccatgctgtttcaggctttggctgtgctcccaggtgacttaggtttatagctgacttctggttagaagagaaatcctctctctctctctctctctctctctctctctctctctctctctctctctctcactctctctctctctcaacacacacacacatacacacacacacacacacacacagaacacaagttgagcagaaaaaaaactatttatctaaaagaaacccataacattcctgtaattttaaatgaaagataggataaagcagtccaagtttataataaatgtgctgcaaaaatggactgtgataagtaggaatatatgtgtgtgtgttaggcctttccaaatgcaaatactgaaaacaaaagaggagtaataggtcaagtgtataaattaaatagcatttaagcactttattaacttagtttaaattcattgtagtctaagagtatattctagccattacttttaagtgctgataacttacaggtctgggggctgtaggcacttctcagaacaattgatcaagtgcatttgattctgttctgaagaagattttttttctcttatggcttatgaatagtactccaaaagaggaggcaaacgattaaaagagaagactccaacactgcaagctgccaataaaatgatgccatgtttcagaaatggtaattccagcaatctgactgtcatgatctcttcacagttctgagtttgtgggaatggagtagatgggatacatttttatgtgacgccaaatgtattacagtctcaaaaataagtgttcactatatcatcagtagaaataaacctctggtgttaacatcaggattacatggcatgactgacttgaagaagtgcccccgaagtgatggcagttaatttcagaatatcttccatgattgtcacagtctatttcccccagagaaatggttagtctcattgttgttcttacaaaggcaccatcgtggtcctttcatcatgtgtttaaagcagttttagcagataaacctgcagaatgaagcacaggagattggcaagtcctggataatctaaattctagtgtccccaccctcagtgacctttgatgagcatttgctgccttgtcttgcacacacacacatacgatgctacagttttgaaggatattaacctcctgtattctgaaacttgtgcagacatgagtgtgtctttagcaacaggttgacacagcagagttttttctacaaaagaaacagcttgtagagcagcctgggtggtttgcatgttcctgttgtatccagtaagcagaaagttcacaactctgtcaagttcttcctgggcctgtgaggcaaaaatcatcaattctgacagcaatatttccttaacaaaatgctcagcagctatagctgcctcagcagtactaataatagctttagacacatgctgttcacattcttaaattcttaaactttccttaaatagggacttttattaatttttcttttattttttgattataacatattatattattttccctttcattttctcccttggaaccctcccatatacttcttgcattccttcaagtccatggccctgtttttccttacatgttacatgcaaatgtggatgtgcctgtgtgtgtgagcatttacacacacacacacacacacacacacacacactcacacacacactcacacacactcacacgcacacacactaatatttttattttttccttaaatacattagtgccaccagctcagtctgtataatgtaatttgcatgtacgttttaagggctgacattttggtattggttaaccaattggtgtgctctttctcagagaagacagtctctcctactctgagcattcctctgctgcctgtggctttttatgtagggtccaggcctccgggtatttccactttgctctgtccactatggcactatggcatggtgattgttgtccatggtcagcttgtatttaagggctcatattaattcctgacattactaggggatgcagtctcatagcaacgttcctgatctggcttttaacaatctttctaacccctcggcttcagggttccctgacctttaggtgcagggctcttttgtagatagatccgtttcatctggattccacaactctgctttatgtttgtttggttttggttgtggtttaaaaagacagtcttttaagtgactgaatgtttttatactgtcaggcaaacaaaattcaagacataaagcctgttaaggtatagattcatgctatgttgcattcttttgtaagattttaatatatttctcctttttctcatttagtcttgcttcactgtgttagcatggtcaactaaaaaacgatctaaacccaaggcagcttggagtgtaaacaggttcaaagtttacctgtgtgttggacatctaaaactacttaaagtttaagtagctttaagtctctgtgatatgtagggtaaatgtactgctgaacatggttcatacaagcttccaagtccagaatgcttctcagccccaaaggacacccaggccagtagcctgggaggcctgttttgttgttctctttgctaagggtaagtagaaggtttgagcttatcatctttgccagtgcatcgcctttcatgctgagcagtgtctctgcttccctccagacctagacaaagccttttattttctctaaagaggttctaatgaggaaattacccctactccacccttttaaactttagcagacacacattctgtgctcttagataagggaataattttccatgttattacttaggtcagaatttctgagagtcagtagcaatgggtaactaaataggtgacctttgactgttctgctgatagagattagtgtgcagagactccaggaaaagtgactggcaaggctgggttgagaagacttcgttgtacggtgcattgtatgttagagcggtaatgtttcgtgagttccactgaagtggtgacactaaacagattaactctagtaagcatgtagctcaacactcatttacaccatgctggcccactaaagagttttgtaactaacacctatcatgtaaggtaatcactaaatacacttctactgatcagctcctttctggtattaatatttgtgattattttaaatttcgatttatgcttgatttattagaagaaaagttttttttttcttaatttttttctttacacaagtctatgctttgagagtttagtgagagtttccaagctgtagaacccattctatactatacctttactggcagactaaccgggtatttttgggcctggtccttgtcacacatacttctttctcatcctggtgactgcccacacaatgtcatttcaccttccacctcacctgacaactgcccttaattctgatttaggggatagttaaacaacccgtacagttctggagttgttggctctgatctttctttatgattcccagagatgtacagggcccaaataattttgtatggcaccggattttgttgttcctctaatttttatttgtacttccttcacaaatacattttttttacttctttagtttagaataaagcgagtgaatagttactaaattgctctgtgttgatcattgttttcattttatgataacctaagcctatacaacaactctgataatagtatcaaaattgacagacagggaagtacagaggagccaggcgctgctcaactgtaagctatggacctgatgcctggtagtctaatttcagtttctgtactcaatcacaccattccaaatgctgcttttaatttacatatccctgtgctgaggaatcaaccaagaagtcatacaccattggttgagcatagctaaatgatgattcccagcacattgaaggcatagggccagtaagagtaaatacatataattgtgttatgttttgagttaactggtaggccatgaagctaatccaaggtagcaggaagattgtggtggtgttagacacaaagattatgagtctgtcctaacatataagaaaatgagcttaagtttactacctcagacaataaatcaatgtgtcagctagatagctgcctccatgtctagaaaggggggctgaagaggtggctcagtgcttaagaatactgggctgcccttccagagaagccaggcttagtttccaggtcccatacagtgttttatagcttgctgtaactccagttccagagaattctgtgcctttttctaaaccatggttaccagccgtacatgtggtacttatacatggatgtaggcaaaatacccatgcataaaaataatatcaatatgggagaagaaaaatggcccaatgtcttcattgtttagaacatagttaaaacatcaggcccactctgagaagccaaacaactataaggttcttgagctatgctttaaaaccctggctacgaattaaaccaggaagactccacaaatatactgtgagctccatnnnnnnnnnnnnnnnnnnnnccagatttgggttgtgcttgtttcctgcagaggtcttcaagagcagagttgacagcagtgtccacattttgtgggcatcacctccaaggtaggaaggctttcattgtcaaattgtcttctaagaagcccgctgggctgggctgcatgaactgttgtagcttcatgaaggtagtcctggtgaaatacgtggcagaaatacagagtgtcaagctcagaattttattttgattttttcttgccattttataacagtaatggttaacgggtcagacatgaagaacaaatctatttaaaagctaagaaagtataaggatttaatatttaaagaggatagcaagcatattctgtcttggactttggcaaagcagatgtgagaaatgctgtcctcatggtgctgattgtttctaagggatcctgtgttaggagcgatgaggtggagattaggagggaactttcaacagtaacaggaaggtcagcgtgagagcaacttgaggaagggggagagggatgtctttagtgtctaagctttactctccctcacaactactgactcaaaccacagatgggaacagaccagagagtaccaaaaagaaagaagtcccaagtcccaggcttaggcctatgtcttggatgaccttgctcagaggggaaactccactttaacctgtagtctcaggttcagggctagaagaatacttctgctatctgagtttatctactgatgcatatgttgtgttttgtgtcagtatgagtttgaggcttgaccatcaggttcccaaaccttgttgcttcaaaggccctaggactccagtatgcttttagagttatctctctgcctccaatacagagacttatgctgatatctaggtccaggctgtttgtacttgaggcaggaagcatctgcggttaatagttgacagtaaattacacaaaataaaacatggaaaatttaagttagcaaagctggggaatttttctatcattttcaatttctctacagatacggacataattagtgtttaggatcgcttgtgatggataaattacatctgtaattcattcttgccatgttactgcattcagagaataatttgctttcagaaatcattgctcatataatattctaaaatcgttcttagactgaaaacaagtttagtagcatgtccctatcgagtaagctcttatatccatcagtttcagactagaaagaggtattggagaaaagcagccaaatgccttcctggtggatgatggggtttcttaaaagattattctccttcaggggaggcaaccacaaagaaagatggagaaagaagaaccacgaaaaaggaaatacttgaagaattaatttttaaatgaagaatcctattaaggaagatttgtgttctgaatgcaatatccccacattatctcctgtttctccatggctatgtgatgactaatgaaatctaagtctagccatgagagaagattatcgtcatggtcttatttattgggcttttttctctgaagaacttttattactagatattgcttcccatgaattttagcacagttaaaaaaccaaaaggagatgtccttgaaagaactcagatatatttacaagtaacaatcagaataagcaaatctccaaacaccactaaatctcaaaactagaacaaacaaaccccccaaacaaccctttagcctagcccctgatgagctataaatcatcattcatatttaagaaaaatcatttatattgccaagttttacagtgggatctattaaaatagttcctgtaaaactcaaaatcaatgcttgaagattaacttaatattacactatcgaataaaaaggcttcaatgggcagaacagtgaacgcagaacggccttagtagctactgtcttctgtcattcctgccaaggatgaataatgacagagaagagattttcatgagaaatatctattttaagaaccagagggttggggggtgggttcagtgggtcacagcactagctggacgagtgtgaagaccagaatccaaatgccttacttggggaagagagaagcagatcctagaagccagctggttccgtgagcagcactgtgtaaaggcctcaaggtggagtttagcacccttgtcacctgcatggccaccagctctaaccccagatatctgctgctcacacgtcctctgtgcagcagcacatgttgtgcttttgactgttcacttgatgtactaggtatttgtgacatcttcatggaagtgtaaaacacacactatttggcctctctggttgttggtagatgagtggctattttaagatcataaaaataataaaaatttgattttattctgaatttgttttgaaacactggaaattttctgtataggagaagccaaatactcggcatgtttttattggaatggtcactgctgactttcatatgacaggagagttagctaagctcctcatcacagtctgccattttgtgacataaattgagacacattgacttttggacaacacatttagaaattgtgaagtttcctctgctgatttgttcaccagctccctattgtatagattgggaaagttcagagcagttaagttacttctccaagcttgctcagtgagaggcagcttcccggggcttaacacaggcaatctgccttcacagcttactcttttagcctatctcctgcgaaacttgtttaaaaactattaatactgagaaatcttatagcatgaccctgtccatacagcctgcatttaattaccaaagagtttttctatgaaaatgttgaacaagtatcgattccgttacagcagctggctgaatttaagatgagggtactttaaaaaacaaactctttcacatgctttcttaacaataccatccctgaataattgctagcaaggtattctctttcaaaatttgaaacatgccctttgtagcctgcagccttatatagtatagatctctggtcaggttacatctgcatagtttcacaccttgcagacaacaaaggaggtagaaaatcagaaaacagtttgttctagaaattgaagaagagacacactggagttccaacctggcagtgatatgaaaagggcattagataaggaggcctctcagttcatcactgtccttatatctttgggttaaagtggaatgtctctttttattcactgatacgtaagcccatgcagctgttgatatcattttgtatgaggctgcaggttcagcttattttgtagttttcctaggaactataatattagaagcaaaatatgtacttcaaaacctttgttaaatcttccatgtattgatgttagaatttagacgaaacaactgaaatctttgtttcccaaaacatcttcctgccatgtgttatatttatgtatttatgaccctaaaaggatatttcagaaattatctaggactaaaatttttattctttgcatatcgtcaatatttactcactatactaattatgccaaagtaattttcatgtgatataaataattttattaagtattttaaaacaatatatatatttctttaagatttttgtaccacagttagacataatgaaaatgactattaataaaagaattgattccatttttatacaagatgtggaataaagagtatgttgtgctaaaaactttgggtttcagaatatgaaataaattcttatgcttcttagatatttaatgaacactgtgtaaccctgacctcatattgaggagatattgatcaagtattagtgttcttggtgtacagtataggatgacacacgagtcttctcagagcagttcatttccacagtatgagctcgtgagacaagagcccctaccccagaggatcagcaactcatgtctgttagccagtttcagcaaatagccatttagaaatgtttctgtttaaagtggaaagctgcataggtttgtggattctgatatgccaaactgacttttctctagagctccagagattacagagaaaagtgtgtagtgttctttgtccttagatttcatttttctggcttgtctgtttcctttattaatttgctgtagattgagttttgcttgccttgttccctttggtgttttctgagtgtctagtttggacttcattctgtttttcttggagtgatttttttcctgaaaactctattattgcaaataaatattgatgccaagagcgatgagcaagtggccaccagtggtccacacttagatgcttcagctgcctctagaatcctagtcaaatttggatcttcataatgatcacacaaagccatatgctaggcgtaatgtaagttagaaacaaaacaaacaacaaacctattttctatggcaccgacaaggccttgtaaatagatcagacagtagatccagccagggcttttattgcagaggagttcctgtgacttcagactctttattgtcttatgcattttttttctcacttataacatgaatctgatgcttcagtaagaggattcaataaaatatattacaaacatcactaaatgtatggatatactctacacaagaggcattcatactgttctggtctgaatgttggtagtcagtcgaaattatgatttccctctgtatgaggagcctcgccttaggttagaataaataaatgtgactgttttgcatattacactgtcagtagattactgtgcattgtttcattgtgaaatctaaaccattctctatgacataggtataaatgttacacagtagcttatttacctacccttccttaacaggagacaaccccaactgagcatgtgcacaacttcatgctaacgagtcagtattagcacaataaatttcatctgttcctaaaatccatttaataaaggtagttatctatgagtggaaaatagttatagtcatctgttctgattttaatcctatttaatacaaatgcctctttagttctgtgctgttctacaagaaataattcatattttacatttcaaatgcaatatgtggatttcatattaaaagactcatgtgtttgaaagattttatttttaattgtgtgtgtgtgtgtttatgcatttgcatatacacatgtgtgaatacaggtgttcatagagaccagaggtattagatctctggagatggagtttcagatgaccatgagccttgtagtctaggtgctagaagcactacttgggtcctttaaaacaatggggtggactcttaaccactaagtcatctccctataatccacaaatgttaatgtaagatatatatttatccaacaaagttcctgcacaaacagcatcaacttcaagtcttcctttttgtattttattatcttcttcctttgatctttttaatgtgtatatctcaaactatagattcagttaggatttcattagattccaaagggtttctgatagcataaagtataaaccttagatctgtctacactccttcctttatggtttaaaagtaatatccaactattctgattgttccaacctcattttttctcttgtacttgtaattaacagggcagtgctgttaggtattaatataacccaaggtattaacctaattcataagtgtaagatgtgacttgggtaagagaagaataaatgcttttatttttattttttgtgagcaagggaacagccttatttgtaaaagcttcagtgacatcctaagtatgaggtatgtgctgccttcttagttattggttattgcccatgctagagtgttgcgtattgattttgtgtgtggcaatgagttaggtttatgatctaatgttaaaggaggttcaagtatgtgttcagtggatttgcttgtagacttctaattgaataggctatttggggtatttaccgcctagagagactattagggaaaaaagcagatacctctgagggcaggaaaaataaaatttattttcaaatctctaggagttgcttgaagtggcagaaccagacctgccaggaattctgtaatcgctttgtagtgagttagctgatgcctaagatttgaaatttcatttacatgtttcttataaaaattaatggtttaagcaccacaaaatgcttagttttatcttgagaaaatctcacttgtctttcagagtggtttcatggtaaaactgtattataggatctgtaacaggaaggaaactgagctgcacagtgtgttgatatttggggtgtagtagagatagaaaactaagctaaggattaagttggggattagatgagatagtttgtttacttacaggattatttcctgtttcataattttttataaaatggaacagatagggctaatatttacttatcttctttgatattcgtaaactgattttccaaacttctttctttttctctttgtgcatgtgtctgtctgctgtgtgtgtaggtgcacatgcacattgtgcaaacccacacatatggaggccagttgtatatctgatgtgccactcaggtgctctccagtttatttgctgagggatggtctgtcactgaacctagaactttctgatttggtttccacatctagcagacattgctcatctatgtctcctgagtgcacgtgaaataaagacacatagatacctattcccctcaacagagcctcctccatagctcccaaacattagataattctcacccccttctatacacacacacatatatgtatacacacacacacacacacacatatatatatatatatgtatatatatatatgtatttatatatatgtgtatatacatacacatacacacacacacctaccttagactgccactctggtcactcttgtctgctaatgaacgcaattttttattctaacaactcacttggctccaattcatggaaaagttttttcaacccttcagctccaaggtataaggcaggccagtgttaaagaaccattttcagaagccaagtttctctagataacatcagtagtaaatgtgcatatggttatgcttacactccccctcttgtttgctctctctgaataaaggcatgctttgttaatcctaagtgacattatggtcccagttttctttgatgtttttgaaattaatttgctttggttgaactgaagcagaacacttgcctaacagtaacacgtgccagggcattctgacccacagccttttgctgtccctgacttgtttgacaactgtataaattttgaaaatgtgaccaaattttagaatgcgtattaaatatttacctcagttgtcctcattgggattttagcagtagacttgtgatagtgtgtattaaaggtagagagactaggagagatgctgtgcaccagacaacttctaaatgccttggagagtcaccttccaaggaagccatgtttataatgagttgaaaaagtacttcttttagtaactattccagagatcagcagattagcattggggttaaaaggcaagtctgaaactacatgcactttgagctcaatattaacagtaaaatgtatttatctcgaaaactttcccgaaagcaccctgtttaatgcatttaaaattgatgaataggtcatgaaacccagcaggtaattctgtaataccattctttgccagtattatttgggtcgtcatgttggaactatggagattttacttcgtgaagtgtgtgttacattctagtaacataaataaaaccatatcagcataagcagaaagataaagtgttttagctgtacagagttattgtaaatttctttcactgtctggttcaatactgcatttgaattaaaataggtcttgatcgatggaacgtcgtttgcttatgggtttagagatcttgttctcagtagtttgaaagacgcattgtccagcagaggctattcacctacactagtgctttgcgtgagcttgatgcatttagaccccaagttgatcgttactgcttaggtctgtgaatggaagagctgcaatctcagttctaagctgtgacccactattaagccaatttgaggaatagcaataaatcaatacggactcatagaaaatacagagattgcagcgagctgtcaaattataaaggctgttagctttttgtaattattgtgcttttctgtattgggtcagggtgtaaaatgtcttatatagcctaccctatttttattttactagaaaagatactagtaacattttggagtaatgtggaaggaaaagtagatttcactggctgcatgaagcccttatcagagtaactaatagaaacaattcattgagtagtcagatgttcaaataattaaagtgtgaaataaaacaaaaacaaaacaccttaagattgaaaaccttgaaggtagagaagaatctaagcttttttggtttatgtttaaggtttgctattctttgtacttagattattcgtgtggtttttaatggtttttcttagtgcctagagatgagtttttcctttgccactttcagcattaaactcaagtgaaccacagactgctgcaagtattaattagaagaagcttaaggaatgaggccatgtggcacaccccttttacatattaccgtaacaaggagtggaaagggacaggcttaattatgttcataaagttgtcaaggtcaccaggaccttgaaacacaggtacttgccaagtcaaataaaaaacctgatgatactgtcttcattttatgagaataacatcatcaatacttacagctccaattcactcttaggcccagtctagctgagaattttttaaataatctgataccttgtgtgttagtagtgtcaaaatccatactatgttttttttctccaacaacaaattctccaaacaaatttatgcttacatatagatacatacatatctatttatctgtctattcatctttgtatctatcgttatctatacatgtgcacattataagtttttaatatcagctgtgatatctagaatgttaaattctacatgatcagtagattcttaaagaatgccattttgatttcatcaaactgtaacctgcttgaataacctcctcctaaaagccctgacattgtgatagctaccaatcgagaatccttcatagtgtgggtatttctttcttccacattccttagatattatgtattatagagtaggctatattgtgttgaattttatagtcagtctacctatttttcctcataagctctaaaggccttgaagtttaccagactctcttgataaccttgtatctgtggttcctggaatatccttgataattcattgaattgaaagcaatattatttcctaatcatggccaataatttttagctgatcaaaaatgattttaaattcagttttagggaaatcattgttctgcagttgtcaatctctcctctaaggagcatagctgctgttgtggaagaggtttcacccatagcttacatatatagttctctgcaagggttcatgtacctctgattcgctctggcagagtagaggatcctttttattctgtgagtgaatttctggatcaggcccctttggggggggggggtgcatgctattgtttatgttatcttgctcttgtacagtcctacctctttggctgcctgtctctgtagatcgatacattgctcattgcagtggcatgatttagttatttgggtaaaaatattagcacccacacatgaatgtgtgttggaggaactgtggggctttcatacagcacaatgtttagcctctgacagctgtgcatggagaaatggtcacattattaggattcactttcacaacataggaacactatgttgagaataatgtgaacacctttaatagttttgttacattatatgattaacatctagaatccagactacagttatatcactgttgccttcagtacagaataaataacactaaaaaggggatatcattctttgcagagtttcacatatctatgctatgcataaaattctccatattataataatataaaaatgttttatcttctaagtccagatattttatagtttccatttttctttttacatttgaagttgaaggaagaacccaaagacatagactctgctaggtgcttactggctcctattcttaacctgctcacagccctttagagaggtgtgatgctagaagtcatgctgtgtatgtcatgagagtttctagagagaaaaaccctccagatgagtgctggtgccagcacttctgcactcaagcatctgactctggagcatctacagttatccactttgaaaagggatcatcaagatggattaaaaatttagcacttgaggcttattaagggttagagtggaataattatttatgtagctggcgatactgcagtcctcacgagaacactgtgatatgctgggcacttcctgcctcttgtcaaggcctctcacagtttttatctccctaagaataagtcttgctgttccttggttgttcatgcttcctgctttcttactgtgtatatgatcagaggagataaatcttactgaaatcctatgaacatacagctttgtaagccatcgttccttgctgtgcagcagttgtctacctcagatcaatgaacctttgttctcttggtgctcaaaggagatgagtgtggactaggccttcagactacatccatttcagttgttgctaattatggagccaggcttgttttttttctaatcttgaaagttggaaaataaaaggccaagaggcagtggtggatcttggaatgccactcttcatcaggctgtgagatattatatattgtgactgcagttttgtgttttggcaaggtagcatattaactctaacagaaaatttagtcaaatctagttttaaattcttgaggatttttgttctttcctttaaaaatcttgacctatcagtttcttcctaagaggccctcttagtccctaatctgcagtttcttcatttacatttttgaaaatccaggtagtattgctacactctagaaatattttaaacattttaaaatataatttttgaaatatagtcatatagctgccccctcttcttcctatctccagacctgctcatatgtctcactccctgtgtaaattcatggcctccttttcttttactgtcattaatgtgtctttgtatataagtgtgttcctaaatacataaacatgacatatgtagtctgtataatagtaccttttacttgtgtgtatatacattcaggtctgcttagaacagaagaaataatctacccgagagaaggtaccaattggttatgtaatactaaatggtcagccctgaaaacaatatcagtaatttaaaaatggagtggtacttttattgtgttattttactgtataaaattcggcaaaagagagacacggcaaaactttctgttcttccactaactatctctgtgaggtttttaactcagtcctgtctggaaacttataaaagcaaaggatatgccatagtcacctgtaaaatatcctacccaagtgactagcacaggatggctgcaaatagataccctttgacttgtgttggatgtcaagctgggtagagtatacaacattatgaaaataagttaactctctcctcatgcccaagctttcctccatttgtatgattaaaataaccagttaatcccatcacaacaggtaggtcatatattatatattgaagaaataatgatttggaagacagtgtccaagctatgaaaacagtcatgaacataaaatgctaaaaatattttaattgaacatatttaagtaagttggagtagcacagtgacaaaaatcatatatgtataatctgttctcagtctgtactgttggactgaaaaatacattgatttgactaatgagattgtctgaatcattttacaagctagacagcaatattatggattgatttttgtctttaatcagatttgtgagtttttcttcctaatgcagaatactgaaaacatgacctttcccttaccatttataagcattaggagtgtaaatcaataattaaattgaccccataaaatattttgggtaatacaattgggacttttaaaaaatgtagcatgtaatagacaatcaatgcatctcagaagcacctttcatataagtgtgataagtgtatcagtgtaatgaatcacatttgctctcagcgtccagttaagcagtggattctggtagatcagctgtgggcttctgaaaaccagatttagtcacaagtcagcaacagatttaccatacgccaaatggggaacatgccagtctcactttcactttagctttctgatcactggttggttttctttagtatcatattcagttaaagtgtgtgtgtgtgtgtgtgtgtgtgtgtgtgtgtgtgtgtgtgtgtgtgtgtgtttgtgtgtgtgtgtgatttacacaggtcagcctctaacaaacattttatattccatttggatgctgtatctagtataacaattcttgcttcctgttttcccctaatgccctttgcctctgtcctgtaaaatgcctaaaattataaattcaactaactgcttctatatagcgtttctattttctttactctttgcatactagaaaatgaatccaaagttgagtttacttctaatgccatttggttttgtgagataatccttcttacaaggtcctgtatacttgttatttcatcatagcaaaaggtataacttcaattatccccactaaggatactgaaatctgtcatttcttcttgactcttgggaaaagaccaagggttggttggacccaatgtttttacttcattgttgatcatgttctagaaccatgatattttttaaggattacaaaggtttaacttttgatcatgcagttcctcctatgttactactagaaaatttctaaacaaatgctcttcttcagttttatgagacactatgcgatgtaatttgtattacattggggacatgcatgagttttatcaacatttaaatcaaatatcttctaatataagatctaaacaaatttacacataccttcaaattattctaggttatgatgcttcttagtgggtaatgggctatcttgctaaccacaggactggaccacagacctggagcctgaaatgaagcagcagaagtgctcgtgcctggcatcccaggcacagccgaacccagagctggcgggtcaggcttgcagcttatgctagccagctggagtctaggctccatcaaattattctaatatatttcaagacttttcttttgggaaaaatctttgaattgcttctcctgatcttttttatgataatatattttggtgacaatgcatttccatgatatcaggagtcgtctgacacttcgtttctgtttagcacagatctgttcctgagaatttgactctctctctctctttttttttccccatttgggtttgttttgtgttcatgatgcaaatgaaaaacataagacaaatgaaaaaaaagtccatatgtaaatctggttttccttattctaatatttggtttcatatattaaaatcagtatttttagctgacttcaaattccttgactttattatttaatatcatgacagtcagagaattgggggttggtgagtaactcccactgacccagagaaacagaaatgactatttggggcctaacatgttacagtaaaggaagtttcatttaaactaataactttgaagaagtaaaattagagtcaagagtactggaaatcccccctcagactaatgcaaatgggaagagcccacgaggcttccatgtagtgatatctgagcttcagctggcttctagccttaggaaataatgaagaaatgttagtggttttgttatctcttataatgtgtattttgtacatataaagagaagtctggggttcttaagataattgttggatagtaaacacatagtgtgctatggaaatctgggcttagcatttatgattctgttttgttagaaatgtagttgcctaagaacttcatttattattactgttttaggtgattcatctgtagttgattataccaaggtgatcttgtgcctactagagagctagtttgtagggtcagctctcttctccaatgttcagtagactagacaatggcaaattctggcactaggcttgttcaacaagcccttcctccagcctggctgtctcagcagccccggggatgttctgtcgattttagcatgtattaaacagtgatagcatttttgatgtcttctatcgtccagaaatagttcctttacttatggttaggtactataatccagctgaggttaaaatgaaagataatttcttggcataaaatatattttgcaataggaacatagacaatatagaagcatcacattgatttttttaatcatatgtagatatgtttatgatactacagagagatatcaggaagagatattttaaatcaaatggtatttgtatccttggctggcttaccttttctggacattttaaaagagggaaaacacagaaagctaggtgaggtctctggtaacaccaaggattggctgaatttaaagttaaagatctacaaatagatatttatgtccttcaaatactaattgcagttttacctggaggaaatattttcatatgaatagcacataagttcatgacaaagttcactaagtcataagtaatgacagtttcaaactgtggaaatggaaggctagtcccaaagagacaggagttccaaaaacaactggcaaaagtaaatgttatacaacacagaaaaataccaggagaagagctgatagactacaacaggaagactagtcacttgtggatggaaaaggtgggggtggggcaaagagaagaggagctcaagcagggtgttgtctaatatgcacatcccaaccccctgggagctgcactagcaaaaccaggtaatgccacaacaccaaagacacaaatataaagttttcaaaatcagtgactggattgaaagcaggaaaatgttaggcttgagtttacagaagctgacactaaaaggctggtggtggtggtcctcagcagagctgagcctcttagctcaggctgctaggttggttggccagggaaagaaagccttgcttgtccttcaccacacgctgaggctccgttcagatatatattgcatgtaaatagaagtgctctgggtgtctcatttgtgtgtgctctttgaaataacttttgcttatagagaacatttatccacaacttaagaagtataggtatccaaatattccagtagctatttctgtgagcttttaaaagtactagtagtcattacctgtatattttataaaaacggttctctataactggaaagtagacctctctctctctctctctctctctcaacctctctctctctctctctctctctctctctctctctctctctctccctccctccctctctctctctctctgtgtgtgtgtgtacgttttattgaaattctattaattttccattcatagtaaaaggaatagggatattccagaaactggttttattgagtctcctcacttgtcaaatgtgaataataagatgcctgactcaaaaacaggcaacaagaatagaatgacctggatgcagtaatataaaaatcatatgacatgctatgtttttattagtatactctttagccaagtatggcccaactgacttaaatgacgtatttctagcttacaaggaaggtgggtattagcaggaacactcttccttataccacttggtgaggtcatttgttgtgttacatatatatcaatatttagcagacatatgatttgaacttgttcatctcttagtaattcttataaattatgtcaaatatttttaatattaaggacacaatctgctctatttggaaaaatatacctttgtcagttaaaagtaaaaacaagtgatgcatattcaaataagatagaaaattcacttaatttagagactttagatttcatcttgttctgtatagctttatggaatatataattttgtatcattgtgctcagggaactgcagaatgcagagagccattctgatcttttttttaaccaattacaatacttctgttgttcatgagcccaaaattttctgagataaattctaacctctaacaacataaccaggtaatacaaacactgaaagtacactgaaacaaccaactcttcctgactcccctgccccatgcataatagaaagggaaatgtttgttttctaaactgtacagacaaatgctatctccgacaccgaaagtcttcccttttcctggtgtggacacagtaagtcatcctgagtcacttgaggactttatttaaagcatagaattgtgaggacagatgactcaggggtctatgtggtgtggctagactttctcactgtcaggttaccggttcccacacaactcactccctattaaatattgggggaatactttgttttcacgatgggagtgcattaaaatctcatctgttctgactagtgtgccctttacttgttataattgttattaatacatttgtttccatatgaagcctattcaaagaattaagcagagggaatgggcccagtcatagctcatgaatataagaggggcttagcttatttgtacacagatactggcttttctcttcttcttttttcttttgtgtgtgtgtgagtgaaatatttacataactagttacttgagcttgaatcttaacactttcactgccccagcatcagaaatgactatatggcgattgaacaagttctggatatgctgaaaaaccataatttatatgtttgtatgacagcataaataactgatgggttctcctagttatcactcactaatgccaagataataagataatttgtttagggggttggatatgaatctcaaaagtcattggcaacctgggcctcatcatgagatatgtcttacaaataaatcctttaatctatcttatgcaaaaaaaaaatctatgcagttactttatttcccttactgacaatatggaagaatatactctttagcatatttttatttgttaaattcagtgttataagtagaggctcgaacagatttaaatctgttattagcatgaataaatcaagctcattttatgtgatatcagcaccactatccagggttactgcagagaactctccacctccttctattttgattttagaaataattgagaataaataaactcttacatggtatgccatttgaagggagtccatgtaggcaccaaaataagttgttggtaaatgctgcccaggggctgcatttcataaagcttatggctaaattataaccgagggaaagttcatcaaaagaatatcctcctaaagtttccatagattctcctccttagttttgcctaaccaagcagtagctgccccaaaatagcatgagtcaggctcacagccagtgaaagaaacaggttggcttctgtattatttttgccttagcattaaggacctgtctacatgatttgaactgtctggtctgacagtcttatgtcctcagcagctcatttaaggaaggttacttcagctgctgaatcttcagggaagtcctgggtcaaagttggtttcagctcatatgtcatgggatgacccttaaatttcttaagttccatctgaactcataattatggtctgagccttgtatttaatgaactgcatgggcagagctgggaatgtgtaagtgtgactgctgcaatggtggttcttctgcagaaggggcactgctggtaacaatgctttagtcctgtggggccgtcgaagtcagggtctattttgaaaaatgtgacaactagatatgttcttcacatcctaacatctgacaggcataaaacatgtgagagaaatttgtccctctgtgtagacttattcctaggtccttttcccaccacagttcaggctagtcatggtatttatcactcccgctctgaagagctccagtactcagttttcaagagtctacagaggatggaaaaacagtgttgcaggtgcattccaaagtctacatttttcctgcttttcaaggattatgacattaggtgacacttcttacatgtagcattcaccttgctgtgttgatgtaaaacacccaagaaacatgccaatagtcttagttcacaactttgtagtttcaccaataaggccaattttctactatgcagaaaattcatgcattagtgttcataattctctaataagtctgtggtagaaatatgttaatctttttcatttcctcttgaagttcttaaattcctaagaaataaatctaggtatcttttctatttctaggattgaatttctagcaaatcatctagataccttgctagcagtgctcccacgtgccattgtccaatcatattctggtgaaaggaaatgatcagtaacatcagaatggaaatacagtatgggaacagaggagcattgctcattttgtaaatgttgcaagaactgatatctcctcatgtcgtcggagtgttgtacagattatgaaaacagtaacccttgagaactttctatgctaggaaggcagataagagtagattttaaaattgagcaaaatctcagggtagcaattaatttacatggtaagtctctttcagtgacaggctttagggcagttaatttgcttactaggaatgagaaggaaataaattatgaaagggctagtgcagttgccatgagataaaccttagagagcagttttctgtatagaattggaaactgagtatctcatggtaacagtgtttatatcacttgcttggagagcagatttaggtatgatcacaggacgacacctgtcttggcacttggtgtaggataagtgaaaacacatgggtagtctgtgtgagtgtggaatcaacaagaatgtttgggctagcatcttactgggtgtggatctgacagaactcaagctactgctgccacccactgctcctgataccggggaatggaagcatggctgaccagcagacccctaactctcagtgccatagcagttacatgagaggtgttggttaagggatccatcttggatccttttcatggcaccttggcaagcaaaaactgtattatccattgaagatgaagcatggagttgtctgatagacactggtgagtgaatgaggcaaactggaagctaattaactaagctaaagtgaggcaggctagttgtgcagaattccatgggaagaaggcttctgagactgtgtactttgggagcacgttccacactttagtgtcctcatccgtagccagcttatgtttcatgagcactgctggcatttactcacacataacgttgattcccaaactgatgcacagttcagcaaatggggtatagatttccatagactgctttagtctctacatcttctgtcctttacttgagtcacagttatactttcatagatgaaagtaattatttttttcatttctaattgtactcctgctttattcatactagttgagttcacattttaaatgaaattaattgatgtgcatgatttttgccagaaatgttatttttagacagagataattttgtaagcaaattagtatgatatatgcttgtatgaatcagatagttgtacaggctgtaccttactattgtatttatgcattcatactctgaatgagctagtattttctatcttcaaaatagtttattttttatataaaattatatttaccataattcatctcagatactaataaagtacccattacctgtgtgttcatttcattaattggaaaaaatactaatttataaggctacagactatagactgcaagttttcctagcataatcatcctgtattgataatgtttaagatatggtctttaaaaatctgtaataattacatttgagaacttaaatagtaaaggatctatcaagtgacatagaaaacatgctgaaattcttgttggccctttaggctttatgagttggctcccccaccccatcattagcattctctgcctccttatggtattatgtaggtgatgctgggatatagtttttgatgaatttgttaggagtatttaatgcttaacatttattcaaacatctcatatgctaacttatttactagcacattttatttacacaaaacaactactttttgtttctactgaatgacatacatgtagtcttaaaagatttataaataaatacattaactttcccattttagatcaccatttgcttcaacaagttcttgttatcactttatttagatgggattgaaaaatataggtgcagtaatgcaagtaaaattgatctgttgaatttaatctcaaggaccacattatggaagcgattgccctccctcctccagacataagggtccaaccactgttttttaagccttcctcagtgatacaatgtctggaaatgataagaccacattcaaatcagaatttaagtgtactgaagcaggcttgctacagggaaacatagaggctttgcacagtatctctgtgtacaaaagatacttgctctacaatcttggagatccacactcatctccagaagtcataaacaagtggaaggacagatttcatatataagtcctttgccttccttgtatatgccatgtgctcccacatgccatgtacacgcactcgtgtgtgcaaacacacacacacacacacacacgataacaattttctaaaaatggaaattgagattacttatcctactcccctttataaaaatctggatttctcccagattaaaatatttgttgcttaaagagaattgactaatttgtgttgttagttttattttactttataacaatagctggtgtttgttgacttatctgaaatagatagacttaccctccctcaactaatgaggttcatttcatttattcttaactgtgtatattagaaataaggaaggaaattaccatttgttttaaaaagagtattttaaatactcattaaattacatgggttttaatgtaccaactaaaggaaacattattagattttaattgctctgaatttgaagttgatattgaagtgaagagttactcacacggacctgctattatgtaatagggtcttttcacacctgtgtccaaatgtctaaaacaagtctaaaatactctgtatagttaacttgcttctaattttaaaaacgtcaggatggctaagttatctcagtcgttttcatttgctgtacgttagatagagttagcagcttctcagtgcttatgcttggttcccaagttgcaaacagagtcaccctgagctctgtctccgcatgatctagctctcgcagttcatagtaagcggctcagcgtaagttcctcccggctgtgggagataagagccatgaggactaggtatcaggttctctgcaccttcctgggaagagctgcgttgtgaggcccaggcagtcagcagaggcgtgtgcattagagcttctccctagtgaactggcacacttgattcccctctggtttttcctcctttcttagttccatctcttgcccttctccagcttgtacactcctggaacacctgcctcttttctatcaaattctttccttcatcaaactccccattcaccctcatctggctctggctgcaagtgatgtacttgatgaaatatgtgttgcacaattagaaagtaattatttttctcaagaagatttttaaaaagaaactaattgagtttaatctctgttctgtgtctattttctcttccaattccagacagctttggctttttacctcttgctgtggaccagcttcctgggattttttttttttacatttgtacattaatttaatattaaggttgcaatgacagagtatcgtaatctcatacaacttttgaaatgttaacattagtccaacaggcatgctataacatgtgtccctcacttttctttctagaactagatctccaccccttcatccatgttttggctttctgtgggatgcgtgaatggctgcccccttgtattttgttgcacttctccattgcttcttgtgttctggtggggaccttggtgattcttctcaattgctacctgagctctgtgctggttgctgctcatctcccagggtcttgtgctggctggtcatgtctctacctccttggcactgccccttggcagaagcgtggtcccttgttggctgcgtctaaacccttgtgagggtggggaatattcctccccctgctgctacgattgagctctgtgctgggtaccacagagtcctctacacttgctttcagttgctaaggcatcccgagctttggctgtggctcagtggtcctgctatccaaaccctaaaactttcctagcctcgacactcagtggtagcagcaggtgttgggatttctccaacttctaaggccttgggaggaagagagtggctgttgacacagacctcaaggattttcagagtacaccaggaaacttctccagaagatatgtaaaggtaagattctgatttctctaggaagcagtttcagaagcatagaaaacaaaacctctaagcatgggttaatgtaaatggattttcatagaggataccgagaactatgataacatagacaaaacttgtcctgcattgggcctctacttactgcaaatacttcttggaggtggggtggttctgggtgaactttacatttctattctatttttacccctattaaataattggcattnnnnnnnnnnnnnnnnnnnnaaataattggcattggagagtattttcaagtaattgtactcaatgatttgaattggaattttgaagcattttgtttctccatgttacaatcatcactgtatatttagtaagattgtttttgaggtttaaaatattaaaggataatgtagcaatcctttattttataaaggtacctgtatttgagatagcttgccattaatatctaataccaaaaacttattaaatgagtgtttccttacattctgcccaggaagcagaagtggagctctgtcatccgggtagtgctagagcacacacttgtgccttgttggcattcctgcagcatgttagagccctggaacaatgcaacatcctctaacctcttaggcctttctttctctccctttctctcttcccttccctcttttattattgttattattattattattttaaaaagaaggtcttgtagtacagctaacacccacccttctgaaatttactcttacagtccagccagccccagcacttcgtgatcttctgtctctcagtctgcagggctgggatcacaagtgggatacagtgtgggcctgtttacagtgttcctcatggaaaatgcacctgggactgggtaaagaatctggattaggtgctagtgttctctgtttctgagttgtgggagggcagcagtacaaaccatgtatgcagaagcacaaagcctagcacaaagccagctcctaactcgtttctaacttactcttcactgtgcacttcacaggcactaacccatgagctgattttctgatttcagccttatcatcaattcatagcatctttttaccttctttgattttttttgaagtatgaacttaatatcttaaccaatgctctatcattgaaattaaggctcttgtttagaaaaccaacctaaatttagtactaaaattaaaacatatacttaccaataactttacaaactgaaaatatattgaatagtatttatttctgttctgtcctatgttatattccctttagactgcaaagaataactaaatagagtgttttgaagtttttatagtgagttaaaatgcatatttggtttcttatgcaaaaatacaaaggtggcattttattgttcttattcttaatggttatgaatgcaactcatttagtcattaaataaaacaaaaagacttgatatgaagtccaaggctaggagtttgctttatgattaaatgtgccttgagtccaccccgcttacatttctccagaaatcttattgttccttaggatgagaaatcagatgaatataagaatgtgaactcttaaaaataacgaaaacttgcaaattaattatgaatgataatgattgcagaaggagcctagttttcctgttcatagtgttcatagtaagcctgtggtgcatggccctgctctcagaataaggcccagttagagtttctgcataactcaggtcagcttgaaacttgtgcttgtctgtcccatgtttcctcttcctttgtgcagcagaaacctccaaacagaggggaataggcagaatatttacagtagatgcttaattaagcaaatataaagttcttattatttagtttatgttatgtaataagaaagtcaaagtgtgcaaccttcactagacatgcccatgtagaaaaggaagaaaggacagacctgcgtttcatcagagcaactcaatggaaagatgaatatagggctctgaccagctgctgacatttttgtttatttataaagttttaaggctcaaaagcaaagcatttctatgtattatccatcgtgtgtggaactaaaagcttattggttagttttacagaattaaaataatcttttagttaattttcatattttataaattgcctaccttagaatcacatacattttttttcttgaaaacttgagatagggatgagagggagaagcgagggctggggtggaggggtaatgggagatcattttatatctgtaagacattttcagatggaattcgtcaatataacagaaaggtactcaagatactatttttattgcaccatggggaagacgaaactgaggctttatgaagttgagcctaccatgctcttcactccagggctcactgacgccagaaagtgtagctgcagaagctgttggcaggatcattgatctttgaacattctgagcatctagtgcccccttctctcctcatccttggaatagcacagtgccatcaaggaaaatcaacacagcccccatctaggtcattctaggctcttattctgtatctggctttgtgaccttgggatatttacttacagtctttttcagctgtagtctcactctctctaatatgtgaataacattatctccttgtcagagtttttatgaagatttaatttaatgaaacagcttgtgccagtacttagcacagtggctagcataggaaaatggcgattgtgtggatgttactatgtaattttcccaaggtcacactgttagaaaaggattgagtcacaactgaaacacaagtctctctgaataaaatagtaaataaaacgggaaaagatacaagtacatgcacacccagtatgctgcagaaacttcaaaagaaaggtcatacttccaactaataaaagatattaaatgatacgtatgcaaaccacaggctcaaataactactggcttttattaacagttgacctagatataaacacctctttaaaagcatagtgtctttatgagattgacaggtctggttagtgaaaaccgtttacagatggataggtcttccattctctaagaaccaaaaagttgttatgtcatgacatagactgtcagtgggaagggaggaaaatgtcaaggaatgaacgcaaataactggagaggggacagaagttctttttcattttgcctgatgtttgtttgtaacactggagtgcccccggtagcgagaggaatgccagttgcacagatgatagaatattcttatgatctttattctctgaagcagagcagaaactagcagtgtctgctcgtcctgaagagagactcatcaaagctgaaatgtcaggatttggctttgaatgcgatggattcaagaggtgtatttgtttttttttcagtgaaattcttgctgctctttgacatcctttactagacttggaaaagcttgaggccaggaatgtttatatatttatcgatttataatcttaacacggtgtctaggaaagaaatggacattcaacatatgcttaattacatcaaaggaaatgtattgcagaacagagtaagaagactaacgttagggtctaatggcaccaaagggattagaaagcaaggactcaagactcagtctaaatgcaggggcaaattagggcaggcgcttcagcgtggggagctctgtgtttgtattttttggtgcctggctaaggatgtagaagaactaaaacctgcagtcagctgttagtgcaggagtaaaatgttcagcatcactcatgagcacacagtgcaattggagaatagagaggtaaagggactgacctatactttgtttatgtttttcatgccgaaaagtatttctggccttagaactcaatttggtgcccagagtatggagggaaaaactattagaaatataccattggtgtatatcttcattaagaaattctgaaaatatggtttaaatgtacaatattgtaaattgtaacttgcaacacataaagtaatagagttatgtcgatgacagagaaaaagtataattctaaaaagctgaaatacttaatagggaattattggaatagcattgatatttgttttgtaataaaactctcactgatctttttatgtttattcacagatatagtaagggaaaggcatctcttatcctttatggaaacaagaaaacttaaaagaacaaaggaaattgcttcattttaaaccgaacactttgtgttgatacaactaaaacctcaagtcaaaaactgaggctcctttgggctgctccccttcccaggaggctgtaatcacacccttcactttctgtttaggatttgtggccacacaccagtgcataagggccagcatcattcactgacaccattcacaggagggtttccgttgcatataagaggcacttgagtgtttaggctccatgcagtcagtccttggatccaaatcctagcgagtgtgtgctgtcacccgaaaagagcatatttagaaaatatcagatgagagtaaaaatcaaaccacatgagcaaatgttccaggaacatttgtatcttaatttgaaaaagaccatatgttgcagcagtacttcagtaagattaagatagtgctgaactttccagaatatcatcagaacaaacttaaattgactgcacatttcaaaatattttgctatacaaacatacatggatgtgaaggtaaacaaagaactgagtgtgaatgaagcaaacttagaactaacacatgcaccttattttatgaatgtgggtgttatctgggccgttattattgatgcaaatgtggctgtatttaggcctttccattttgcttttggttgtctctgtttgaattaaatagtttcaatgtggtggcaaggctgtcttacttcacttaacccatggtgagttttctttctaactttgtttcttatttttatttacttgcttttagtttttgttggcagtttgctatttgtgttttaacttggctataatttagaaatattattgaagtagtacatattaactaataaaaatcataaaatcttaaagtctttcacatgtgaaaacctcttagatatatagaatgcaagctcccccctcctaattctttgtcaaagaatgtgttcatggcagtttaatttgctttattctgctttgttataaatataagatagcatggtataaataaaatcagtgaggcctcttactaaggggaattttgtcatgagaagaaaaagaattttgtcatgagaaggagaaggtcaacatattctaaagtgaatataaacatttagagtatataagatataaattacagaacttttatgccatttataacagttagaaatgtttagccttgtggttaagaatatcagttccacggccagagaagcctggaaaccctggatttaccatgtaatggttgtgccgccttgggaagttacttgattgtgttacgttagggaacaccagattttcagtctttgcaatgggtataatcctacacgataggattctctgaggattaaatagaagtttgaatcacatcaaaccatgactagaatactccaaatactgactaagaggttgttttcttctaacttcttttttaataagagagaactgagggaagtgagtctgagatgaaaaaaaaatgaacataataaaagctcaacctgtctagaagtcagacctgtacagtagcatgagttcatcatcacgggggagagagacagaaatcaggccaagtctgtgacagcgcttgctgttgtttcaatagtgcttcttggaaaaggttatcattcccccactgaacttactcaaggtcagccctgcaagcttacatcacacagatggcctttatattttggtgaccttataaccctgaatcttcagatacttcacctatcacaagccagatgcattaattttggaacattccttatttattttctccacattgtcctcagttttctggtgaagggttcttttatagatttttttttgttgtttttcatttgctattgtcatttggcataagcatggtgactatcacacttactacatatataggactaccactatttttcatggagtaacttgagtgttagtttcttattcgacctcttaatggctaatttcaggttaggaaaacatggttctgcagtaatattttgaagtttgcctaggctatttggagccaacattaatgtgtatttcaaaaaatgtagattggccagaaaggagttcagagattcttgactgaaaacactgacatagtgtaagtgtccccgtctgctgtgttctctgaggccataacagaaagctctcgggacaacttggtgcagtgggtgtggaacatgggtcatccagcctccacacatgatccatccaaacttgagaacataggcttttatttttgattttcaaagtctgatgttgaaagattgagcttgtttcgtatatatcagtataactttgcaattattctatcatgtttgcaaatgcttcatagaattcaactaataaaaaacactgttaactttactcatgttctgttaagattgtatcatagacacagatcccttgaaaagggcatcacagcccagaggtagttaacttagaaccattctagaacaaaaattattttaaaaatatttttactgaggacaaagaaacatttaaaataaacaataaaaatttgaagctgggcttagtggcagtactgtaatcccaactatgtgtgaggttgaggtaggaaattcaaagcctgcattggtctacagagcagattctccagcctgatcaacttagccaaaagccttgtatcaaagttaaaaataaaatattttttaagtgttgaggttagacaatgattgtttagtatattcaaaccctagatatgatacctacaacccctacagacacatataacaacaaaaaaagaaagaagataataacccagagacttgattattttaaaactaacattatctttgtaaaaataatattttatagttccttacgttgtattgaaattatccttctaataatatttaaattataaattttccattttaatcctacattgcatttaggtttcatattttcaatagtttttttttctgctagtagttcatatatgctgattcatttgaaggcaggttagtttctactgaaggttttttaatatatttggagtttttgaaggaatccaagagctttagagtgaaggagactggaagtcaggtaggaagacaggaagctaagcccagacttggagtgagttctccagctttctaagggagtttgggttcttcagagtgctgccttaatgactgtgtcttctggggctcgcccattcttcttacccaagctgcttagagctaatgatctaccccatacagcttgtaaagaactcctgctcttctagaagccatgcagagtgagtggaggtttagaagcaggttcaagccagtttttcccctcagctttaccatttcttatgagaaataaaatggaaaagataattatttttagaatttgcaatgtaaattttccacctgtttagaataaggagaagacttccaatgctgttttccattgagctaaatcatatatgtttttaaaagaagacaggtgatatttaaaatttggtcctaaggaatttcacagacagagccatctgccccaatgaagaaaatgtatttttagccaacactagagaatgtaggatgtagtttcctaaaattgctggatacgccaaatgtctgttaatgaataaatgaataagcaagtaaaaatttatctgggtggacaaatgaataactaaatttattagttgtgtgttcatatgcttctttattatttttaggaaaagaactcagcttcaagtgctgcaaaatttattgaaaaatgttcaatggaattcctcgtttctgtgtggccattgctagtttctgccccagggccagggatgtttgattgatggtgcttctgtaggtggaattatcctgcatgtgtagaggttttagagtaggacaagaaaacacagatcctaagcaagggggctattttgaggaaaggaaatactagttcgagtgatcacagcctaagaataacccatagaagtggattaataagatcacactggttgaaaaggtattaatgtgctgtgtcctgtttcatttggtgttggtggcaattgttagtaaaggaataccaagagcaatactttttaagcacaggtcgagattacagattaagtattgctgtttagagagttgggcttattgagcatcttaggacgttgttgaaataagactgactgcagaaaggaaccaaggttgaatgttgaagaagagattctgctgagtgtgtattagaggcttagcataggtatggttatttgaaatggagcatatagctatagagctctgacaactcttgaaacacctaaataacattttttcactgcttaccatgcaggtatttcaagctgttgcccttacttagcttggtatagagttaagttttagccaatgtaaggtactggtgttgtcttgattcatagctgaataaaatacttagtattgaaaaagaacacagaaatcattttagtaactagagtgactgaaagttcatttctgattactctaaagtagtaatttaatgtgacatttcactataatatgaaaaaaataaaaaaaagatgctttgttgtttcttacgcatcctaataactattcagttcctatttttcatagtcataaaatcacacagttcactcatgtgttatgtcagcaaagtagacactgctttgaaaatagtagcccttgtaaagtaggtgcaggacatgttttgtattatattaatgttgcttctttttcaatatggtggtaagaaaaaggatcaggtaataataacccgaagggtttgaatgctgataattaggcttggaacattgtctttgttactattagaaatattcataaaaattattgagaatttaatacacgaatacagtatttataacattttcctccttctccttcctccaatttttctcatctctctttcacgtctcaaattcatgacctcttatttttaaattataattggtgtgtgtgtgtgtgtgtatttctggctgacctcttgacctcttgggtcctcacccctagagaagactgagtctcacctcctcagtaacttaattccctgtaggtctttcagggttggagccttagaaggtttcccctgtttgcattgcatatgaatttggtggtggcagctcttagataccgtttaggaatagaagtgaatgtcagctgcaaacatagcactacggagacagctgttgagaacagtgggaccatacttgctgaagaacagtggaaccacagctgttaaaggaaagtggaaccacaactgttgaagaaaagtggaattacagatgtttcttccccactgagtaaggtcgcaggcatcagtggagagccaaagcatgaaaagtccctaactagacaatgtgggtgaagttggggctaatcagaatatggagttgtggaatttgaatttgaagataaaccagacactgacttagagaaaccaggaaagagattctgggcaataagattgtttttcttacattatcaattcaaatctttggggtctgtgtccttgtctgtgtgatctactgcctctgtccaaactttgttaatggattgctttaaatctctttacctctttgtttgctttatgtagccccaccttgacataatgttgtgagacagagggcctgacctgtccatacacacactggctgaacctctccattcatgggttctaatggatttcagacaccatgagtgggagttgactaccaggagatgagcgtgcagggctgttccacaaccacaatgtaaggcttcgaggctacttacctaagcaaaactttgtagcagtttccaaaacaaatccttaattcctagtgaataagacccattattatatcagacatttattgtcattgtcttcagcctgtactcaggaaggcacagaccttcactagaatagttaaatttatatgttaggctaccttgtggtgaaagttaaaaaattaaagttgtgtttgctgtaatgtttttttttcccaagaattaaaaacttgttaatatttcattataatttagtttcacaattgagatatatttctgaaatcttaagaactcctttgttaatgtttatttatatatttatgttatagtaatgtttaacattatactcttatgtgtaaaaacacaggggaggagtctaagatggttggcttaaaggtacactgctggtatttgagcatgctttgctttcacacacattattatagatgacagttgtactaactgtagttcagggctacataaaatggtatttgaaatgatatttaagaaatatataggtgatgcagcacacaaagcatccacactggccttccatatggaaaagcctccttgcaggttattcttgttatatattgaaccccattttgagctttagaagtctgtgtttgataccctctagcattattctgagcttcttcatctctactgatacgtttcttgttgttttttttagtttaggaaaaagtttctaggcatagactgtctactattttcacttttttgattcaacattatatttaaagtgaaaagtatcacgattgtaatttctaaattatgtaaattacaggtttttaattttagacacttgattttatttccttgcaaaccctttgttctatttctcttcaaagtagtaaaggaggaaagatggaaagagaagacaaaatagttagcatgagtaaagaaagctgactatattcacatacacgtgttgctactgattttaatcacttaaaatactgattgatcttcagtgtcctgtcactgcacaaatataattcctttcagatgcccctgagaggtcagaagaacaaaaggccctttcctgccctgggcagtgagacattttataaagtaaaacacatctttgccctggcttacctctctcagtctttcaaccactctcttgactgttctccggcctccctggagtgttaaaaggtgtttctcttacattcctgcttccacattctcttttatctcttcataaaaccttttctgaatgaggacctgcatcacagtcagctcttctgagagcctctgctgctccgttgctcggacactgagcgatgtttccacatcacatcatcccacattggttcctagtgtaagtacttacctgagatgcaggtcggactgacactttgtggtgcgggaatttccttattctggaatagctgcttagtgttgacattaaaatatattttatggttctttgggatatacatgggcagaaatgttctgggctatgtcagtaagtctgtgtaagtcagctttgtgagtgacaacttacaacaaagtggaaatgtaagccttgtagtcaagcacagacttcacctgtgaatgtcagatagaaatgtttcctgttagcgtgtcagatacagcaagctgtagtcagtgagcaggtctcatcctaacatcagcgcttgactccaaacagtgcatgtctttgagctgtcaggtgtgcactccattgtcaggggcctcctagatctgaatgtgtcgtacctccattgaacatgcaatgttgagaatggctgaggccttgacagagttgggagaagaacagtggcttctatttatctctgctcagaagtgaagcccccatttctccttaggttgtctgagctagaattatcctgtgccaacttaatgcagcagagactgggagaggatgtgttttgcatgcagagatatagaggaaatgccaagaacttgatataggcactgcatttggtttctcctcttttccagttttcattaaaagggttcatgattgcaaggggatgttatgaagcaaatgctatgtggccatctcaagtaagaaatattaattctctggaaatttattgaattcttgttataattttgacatgttaagcactgcagagtgtatagattctagcattttgggctagtagcaatttgaaaattgaaatgtaacaaaatacagggtttaccttgcaaattcccccaacagtatgtactgtatcagtttgagcagtggttctcaacctatggtttctgaccctcaaagaccatgggaaaacacagatacttacattactattcatagcagaagggatattacaaatacaaaatagcaacgaaaataattttatggtaggtgggcaccatagcatgaggaactgaattaaagagtcacggcatttggaagggtgagaggcagtgagttagagtttgaggccatactctgttaggaacgaacaggaaaagcagagaggctgttccttagtttgagtggaggaggtcaatgcattgctgtctagataggagctaatggaggatgggagatggagacaagattactgatgcatgcataatcagaagccagctgagcaggctctcttgcggtctgtcctgtgtgagactgtaataatcaatgtgttcaacttcctgttcttagggctgtattgcagagatggctgtgctctgtgttaaaacattatatatttaagtttgtggatcatagagattcatgacagcaatataagacctttccatgacttatttgtatatttgggttttccttattctttaaaattatagggcaaatacctttttttttttttttttgcaacagaattttcttgattgaagcaatgtggatacaagtgaaattataaagggacaaaaaaagaggtgtgtgtgtgtgtgtgtgtgtgtgtgtgtgtgtgtgtctgctccactgcccaggagacagaatggcatcttgtgcctgtttctgtatggaggtcagaggtctaggatcaattcagcatttattccatgagcctcagcccaccgtacttattttctaaatatcattctgtcctaaattacaaaccttgctttgctatccttctacgctgctagtagatgtgattatagtgagccccaaggcgaggcacattaggatctggagtaatggtagctattgtcggggatgctatttgtgaccaatttttagaagtccgtgattatagtcaagtccacccctactcattaattatagattccttgattagccacttcacatcttggagctggtttacttacctctagaataaagtagcatctgccttaattactttcaatgactgttgtgacatatatagaaaagaaaataatagtgtgttgtgtcaccaaacagttgctgctttctcagtactacattctcactcctaagaggttctcatgagcaagaagttcagccagacggttgtctgggaaggcactgtgatggtttcacttatgactaaagttctaggagtatgtgtatatgtgtgtgtgtgggggggtctataataggaagaaagtatggaggtataacaagaggaaaggcatgtagacaacagtgtccaaggaatggaagcttagtggtaggtcatccagttttctcacctccccttcccttcctccagaagctgttcccacagaactgtggctggagaccactgaatgagggagtgaagtgcctgactatggagatttaagcttcagtgagaggagaaaagatgattgtatcctagctgcacagagttggatataggttggagatctggtgttacaatttagccaagcagagagagggggaaagtcacattgaagtgtgaaacctggggactgagtggtctgtggggcagaaaacagaggtgggagtaaaggcagaagctcaggacctgataattattctttttaaggtgagaaccaattgagatggttgtaggagtgttaacgacttttcctttgattcataatgattaaacatttttaaattccttcctggttatagattgaataataaaaaaagcacaactatgtcttttctatcaaaggatctgggtttttgaaaactaataaaattatagaagtgccatttgctaaaatcacactaattagtgtatttgactaatttcctttgaaaagaaaacaacgtgactcattgaaaagctagatttacctctcataaacaatgactaaagtcaccctggagattaaaacttcaaatacccgaactaagacatcttaagctgctacacctgttctgtcatttgcccgaaactacgtgtataagcaagaaagggggtttgctttccggtctttgctgaccttacagagactatatatattttgacctagtcacttgggcaggacaaatcacattgcaaatgtcaagaggcatccaagcctttttccttgccaaagatggttcaagtaaatttcgataaataaataaatacaatgtaactttctcacatttttcagtcagtttgactttgtcacttattgtcacttcggttcctgattgctgtgtggggatagatgcagtggtacattgcttagcattttccccttggaggggagagaacggagctttgtccagtcagctgattactgcggggtgaatggctcacgttgttattgatttcatactacttccatagggaaggcactggacctggagttggccaggggtgcctagtaagctatggagccctgtggactggtcctggcataccgcaggaaggacaaacatcctaggaggatattggagctaaggtgtggctttaggtattttcaaaggtattgctgcagtggttctcaaccttcctaatgctgggatcctttggtacagtttttatgttgtgacctccagacataaaattatctcataactctgattttgctgctgttaggaattgtcatgtaactatcagataggtatgatgtctgaaatgagacccctgtgaaagtgttgtttggctactaaaggggtcacgattcacaggttgagaacctcgggttattggctgtgatcactgtgttccagtggaaagtttctcagttactgaccatgattttaatcgcttgaggagagtctagactctgagtaaaccctccctggcttctagtacctaactgccatttctgcagttagactgatttcttaatataaacgtctgagaatagttcttttcctcggttcatcttagaatccattccttgcgaggcttctctaattaggtgcttctgtctcccagacctcagtagggattcctcttcggcgtgtctccatgtggttcccactatgttctgttaatccttcattttctcatttattattttaactactggctattttttcctaaatgttaccttgggaagttttaaacctgttcagaaatgatgtgtgtgtgtgtgtgtgtgtgtgtgtatggcattcatgtaagtttactaattgttaacattttgccactatttttttttactttagtgtgcatgtgtattatgtgtaggtatatgtgtgtggtgtgttcatgccatgccctgcgtgtgagattagaggacgattgcaggagtcatttctcttgttttcaccgtgtagacttgaactcaggttgcaaggcttggcaccaagcaccctccagttgacacagctcacgagccacattttgataatttgtgtgtgtgtgtgtgtgtgtgtgtgtgtgtgtctttgaaagaacaaagcaatacactcccatttcttttgttagttaactttacccagatgctgctatgtttgacttagttatacttcacaacttttgaaggtttcctcttgattcatttatttgtcaaacaattagagctataattatcaggtcctgacgctaagctgtgaagtaaacagcctgactacaagaaggggaggggggcagagacagagacaatgctgggttacctttgaatgcagttagaggagcccatatgttcttctctgtcattcatccattcactgatttcctttcttccgtcacccacctttatcatttacgttgtaacaggctctttatgtgctgctaagagtccttgactcttaagagcataatctgtgtccaagagcagaatggatatttacttatgcggggtactatagaaagggagacaagatttgtccctccgtgtttccgacagcgatttgtagtaaggaggaatgaactaagcagataaggaaaacaccattgtatttgaagccaaagaagcatgaaacatacagaatatcctaaggaaccagggaagctttatgcagagcagcatttgctggggagctgtcttcagtcaaggaaaagccgcagcttggcaggtggtgtggcagagatctcccacgctcagcctaagtgtataaagcggccctgactgagcctaagggtgatgtagagcagatctgtatttccacaaccttaccctcaaaacaccgagcaaagggctgatcttgccgtttttaattcttggagattaagcctgtttagtagcagccaacgctggtattacctagtttcgttactttaacaacttatgcccttttacccattcctgaggagctgttggtaactgatagctgctgcaggagggcaagccattcttcattgagcctgtgacctctgctgggtctccagttttccagcacaggacctcacaccatgcacatattggccatactaattagatggaactagtgggtgttgttgttaattttctgttgttttgttttgtttttaataagaaagcatgaacttggagagaggggtaatgagaagctgagaggatatggaaggaatgggagggaataaatgaggactgtgggtgcatatggtagtgtttattctcagagagtaaaaacaacaacaacaacaacaaaaaccccacaaagttagtttcacacctacagtaagaaggcataatgaacagtttacagttgctgcatttcgcagggacatagcattgccctgggtttctccgtctcagctctgtcagtgttgtgttcataatgagcatttgtcctaggtccattccttgctttgtagagtgcttggcagcatccctgggtggcctcttcccactgcatgtcaatatgccagcagtagtttcctcaaacctccagctgtgaaaccaaacatgtaaagatgtccttgattaaaagctaggcacttaattaaaaaaataagaagaaagtaggttacttaccttcctgtggacttactgcatttgttaatttcattgtgttgcttttatcatagtgtgtgtgtgtgtgtgtgtgtgtgtgtgtgtgtgtgccatgcgcacatgtgcatgtctctgtggatatgtgtgtttatgcatgtgtggatgtgtgttgttcatgtatgtgtacttgtgagcagatgacattgtctaataagtgttatgaagtttttaacagttttaaagttaaagtatcatgctggaacacaatatcatggaaaccaaattaagaatgtgatgctctgtaacagctctacatgttcacagaacagcagcagaaaccagtaagagcgaggtcaagaaatagtcctggccactcacgtgtaccataccgggatcagacatttcttttaaaattgcagttttatttaaaacaatatttttgtctatattttgaaaattattaataggaccaatgggatctgcagatagcatcgggggatatgaattgaagttcttatgcagaccttgcatactcagagcccgttctttattctaaagtgttgacttattaaactcctggattcagaagacctctcagatcagtgcttcttagccttcctaatgctgtgactctttaacccaggtcctgtgttgtcctgactctcaaccagtaaaccattccattgctacctcttaactgtaactctagccaggtgttaagctgttttacatcctttatctcttcttccccttcttctctcttcctccttcctgtctaggccccaatttgaaccaaactctaggcccaagcacaccaggcagcgctctaacactgagtcacacctgacccagcagtactcattatttgatgatcactcaaggatggcctactccggttcttgtgataagaaaatgtcagtatttgcccttttgtttctgaaccagtttaaacatgtgataaattgatcacacagctaatggcccaggaaatacaagttatatagacacggtaaccatgttctatccaaacctttttattccttttttctaaaatgggtataagacaagtagtttttttaatcacaggatatagttttaatatttctttttttttccatgtataattctccaaaccgaattcctccttccttttccttctccatctaagccactgcttctcaacctgtatggtgtgagtcctttgggtcctgtataacagatatttacattacaacagaagagaagcaaaattacagttaagtggcaatgaaatcattttatggttgaggggtggtggttaccacaacatgagaaactgtattaaaagctctcagaattaggaatgttaagaacttgtgtgaggagtatagccgccaatgtagtattctggcttagcattgcctaatctatttatgatgatgatgatgataatgatcgtgatgatgatgtaagattctgtaatacaaggcacacaataacaatgcacacaatgcagctctagtgtgccttaggagaactttatgtctttattatctcagcgattccttgcaagggcactgtacagccctcctgacagctgttatatccctgcagtttcacaggtggagtgaagggagattagggaggagaggctccttagaagctgggcagcagaaacccaccctgtcagaacacaggaggaagctgtgacaaacctgccatcccagctgctggagtgtccttcccagctgaggatgcttaaaggacatttgatttgaagatcggaatccacacacacttaaggcatttggtttgaatacttttcctgtaagcttgttttctgaactcagtccttcgaacgtagctctgcacgacatgtttttaaactggctgcactgggttttggcgaaaatcctttgacctgagaggacagagggtgagtcagagccggtggtgggctgcagaagaatcgagagcaagcctgtcctagcagggaaaggagtccagtttccagtccttggtccttccttttgtgggctgtaataactgggagctgtgtgtgtgtggaggtgaatggacaatggctcctgctgttgttttaccacgtgtcatccattttatgccttgactgagaagctgctaggtgacttaactgctcctctgtgggttttgcattcagcacctaaggacagaatggcttggttggcgctgtcactctcttgattcagggatgtttaggccctttcatttccaaattttgatacctcacattgcatatatgagcctttaaatcgagtttatcttttctgacagacagagaagtaactgaaccatgtatccatggtaacttggcacatcctcagtgaagttctcttgttcttgggttcttttgtttttcaaaaactatgaattctgaaaatggaaaggagaaaccttttgctaacttcacttttcatcttaaaatctgtttgtggacaagtaatatagctgtgacatgggtaggaatggcattctgatattttaactgtgtgtgtctgttaagcatattttctttttattttgttacagtttttaatttttttgactttttgtattaatatgctgaaacttatgcaaaaatataaactagtacctgccacagtactcggtatctaggttcaagagtttccaatagctcttcattgcattttgagtcagcgtgacacacagcgtattgcggatcatttgattcacaaatacttcggtgaatgtatagatgactaagatttcttccaaacttggcggaaaaacactatcattgtacattcctgtacacataatgtataaatgtcaactatacattagcacgtcatcttttgaaagcttataatggcttaaaattttcaatatattcataagtcactttattaatcagatttttgatcaacctgaatgacattgtgtgtgtgtgtttgtaagtagtattgaattcagaatggaaactttcaaaggcataaaaccagtctgtgtcatgacaaacatgtaaaaattggcaaaactacacaagccttcaattcttgatcaacaaactgagataattgtctcgtactaataaaaatctttcattaagtcttaagagctatcacacacacacacacacacacacacacacacacagagagagagagagagagagagagagacagagagagagagagagagagagagagaatgacttcagtgattacagtgaagctaagaggcaggaggatctgagttcgaggccaacctggtttacatagtttcaggacagccagggctacacagagaaatcctatctcgaaaaacaaaaacaaataaacaaacaaaaatgctaaataggctgttaatcatagcaatctcagccagaatttttcctgccacttgattccagagttacaatattctaaccttgaatttaaataccatcagatgtgtctgattccaagacagtatgtctctgatttcaatggcttttagagcaggtagacagctttcactgagtgggttttacaagttgatctttataccacttaattttactcaattttaatcccttttaattttgctatgtgagtcatcttgcttagtccttcagattataatgcagtagccttaccacctaataagaaggcagatacatttccatacctgaattaaactcatgcctcacttatttttaagtggtctgttggagaatgaataaagacatttttattcattgttaaattctggaaatgaatcagtttgacgatgggggcttttctacattataacagatacagagtgcagtttaaatacataggcacaccagagaagcaaatagtgcatccaattaggaagctgagccttgaatgtcacagacatcttttgttattgtttagtcactaagaaaatgagaggcatcagactaattgcttcctgctgtcagttattttgaatggtgaataaagacagccacttctttacattgccttcatttgctcagctcattactgatgctgtaatagaccactgttgggaaggaatagtttgccaaatattagattattttatgtggtaaagagaataaattgatacagtattcataattcagagatggaattaaagatgtattatatgcttactcaagatgaccaaagctgtaattccaaagtaaaagtgcgttagacactgtttatatgtggtctgctaagtgatttgattaacttagggaaaatgttgatttttccagggaaaagaaaacttatgtttccattctaaaaatgggtttccaagttaaaaaaaaaaagtaatgttaaaattaagactcggtgaatattgcaaatgaccataaaacagtgtggacagcttttcctgtctttggactcaggactgttctatgctttcttcttttggttcagcagtagcctgttgaagctcatgctaagtgctgagtcattgctagtgtaaatgttgtcactttgtccttcacacatagactttgtcaggatgaacatctcctttatcttttttatttagaaacatttcatttaaaataactataaattataattaaaagttaatacccgaagaccatacacactctcatttctattttgaattgctgtttggcgttgcaggttgtgtttttaaaattgcaatgaaagacctcactttgtgagatgatttggatggcaaagggaattttttcatttacatctttttttttttttcttttcaataatggtcactggcagtggtccaatgcagacaaaatgcctggagcctcctcagcagagccgtcaacacccttcctgcagtcagtgtcagcctccagcatctctgcagtcgttcatcagcactgtggcaaatcactgctgtagctccatcccatggcgtgtctgacatgtcctggcattttctttctgtgccagacaacccaaacttagggtatcaagatggaactgaaggaagtagactggaaaatgggcacattgtgattctcagggaagtgaaatggattcgtaactcatgaataaaatagggaaattttactaaccacgtaaaagttttcagtgtggacctgagcatgcaaaagcagttagaggagaacttagcatgcttatgcctttaacagtggatagggccatacgcctacctcctgcccacagctcccctttcagaatagggactgggatgtcagagcaactgttttgtctgtgaaccaagacaagtggcatccattgtgagataaaaaataagagtacttctaagatgaagacatgtgcattgcaaggtggtggagttctgaagcctcctttaagaactgctcttgatactctgtggtattatgtcttccttgtataaagcattgacactaaaagactcctcttgtcaaccagtgtataatatctgcacaatagagtgcagagggctgacgtgaattccctgaaatcataatgtgctgcagtcagtagatcatcagtcagaccagaagagcaccgctgattacccactgaattatgcatacaaatatttgcaacatcctgagtaattaactcataaaaataaacaattaccataatggagattgagtgaatttccatatattttccactcctaaaaatactatccagctggttaatactattatatttcttaaagagaaatatttagatacagtttttgccacatgtattttccatggctttagaaaaatctcagaatttcaaacgtaaggatttcctgaggaagattagtttctattaaatttttctggtatatacaaaacttaggtatttgactctgatatctgagaaaaatacttccacattttgtattgagataaattaaattgtattttatctctatggtgcttatcttttgcctaatacagtgatatcattctgtatctgtagttaagctgctgtaaatgaccattttcgttataagtgctaatgatactttttttggacacctgatagctaactctgcttcaggagcaaacggagatgtttacactggactcacttgctgactcatggctgctggagcagttccaattgtgagatagttacgtagacaatcctctgtcctatatttgatctcgcttaaaggggagccaaactctttggaatataaaaggatgttttgttatatagtcctgtgttttcaggaataaaagcccctgtaaggatccagaggctacaagtcacaaggccacacccacctgctgctggcagatggtctgaggggtgctcctatattgtcttagggaactctggtccttgtgcctggagtttgcaccccatctctttatatatcccctcttctcacttcttgtttcctcttccccttctctgtttcttcctctgtccttacagtgtgattcaaagcaggatttgtggttggtgattcgcatgcatagtttctgttctttaaaataaaactcaagtccccaggagtaggggtcatgaagccttagaagtgaagctgtcccaagtcattgaaacatcaacgtagttagaagcaattaataaagaatataactgtttttcaaaaaggtattcattatttgtaggatattataccttatatataaaattgtgctctagtataatgttcatttcactggattattagcctggccttttgtgcttatgtgcacctttgagtcagggccgatttaaactatctactccttgttttctgtatgggacacagagacttgtactagggataacacagagaattagtatctgggacccatggagtggtgatagagtccagttcagccctgccatgtccacatagccatagagcattggcaatttagtttgttttcaattgaagtctgccttccttttggctgttatttgtggatagaaattatgccccctgagaactgtgaagtcttcagtgagctaatgtgtgtgcagcatgaaagccatactcagcacgttctgtgattgtaaatatatgtagtaagtatctgtcccaaatcaagttgttgataaattggaaacctgtgttgtagcacacatctttgtatttagagatcaaatgcatgactctaaatccttggcatttcctcatttagatttatctagcacttgcacaccctaaatgtttctgtgatcagatctgtcatattaatcagctggttattgcataaaatgtacagctgtcaaagataggcacaaaagcaaatcacaagaatatctcatctgtgttttttctatcaaaatgatgctgtattatatatgttttagatagatagatagatagatagatactgtagtatatatagtgtatatagtatatcaatatactgttcttccaattctaaggcatcactttttttgatagttaaatttatatttgactacagcatactacaacctgtctgcattgctagtcctattctgaattcacttacatgttcagtagtatatacttgacttttatgtaataactagacagttacttttaagattcttcagttgtatttatgtctttggtttttatttgttattttgtttgcttgtttgtttgtttgctatggaaaataatttctttaaatctttcccatgatttttttataacaattcaaataatatcaggaaattcttcttgacatgctatgttaagccattactaagagttataatacatgtacaacagagtgaacactcttagcatctacctttctaattgtaaaatgtttatgctacttgtttaacatgtaatgaataatttcaaattaggttgaaaacaatggaaattaagtataaaagcttgtgatataaagtgatgctgacattctggatagcatttgatcattctgtggaagaatatagaacagtaacaatgggaactgaagcagcagttactatagttagctctctgttgccagagcatctattcctacagggtttcagctaggcagtgaacatttatactgagcaattacttattgtagcatgtgtcttgcaatagatgtttcctatgcagacacagcaacttttctgagtagttccaaacttaaagccattttagcttttttcaaattgttgttttgattttagtttatattttttggcaaggtgttgtttgttttcctgaaagcttttcaaattgcttagaattaccattattaaatttattagaacatggattttctaaatggcatttacatttaataattactgcaactaggcactgaagaatattgactctggttggggaaccctccagataatcattgatgagcaagtgtaagcccctaagaaggggctgggagagatttggtgctttgcctctttgctcctcacccagggcactgggaacttgaataagtaagatttaaatacctttatggattatatcaagtcttttttctgggtgttaccgtgttttcacatgatatgttctagttcaagtttcacacgtttttctgttttaaatctcctcttagttatttttattcatgtgtatggaacattgtgtaagtctcaacttactatttttcccctgtaaaatactggtatgccttaatttatcattatgtagaaatactggataaatcaactatttgagtgcacattcccaagtaaattttgtatatgtgtttggctcggcttctaatagcaagttcttagactttaattttagaggctatactgtagtcaaaattgagggttgcttgcatcacgttaacttcgcttgtttttgaaaaattctaatggcaatgtatgtatctgttccaaaaactagagtctttgaagcccatttgtattatataaaggggaagtctgaattccagctacatcccaatttgtttgtaaaaagcttgggttgagagcagaccatgtgtctttggagcattgctgttacctgggaaggagcaggtcagggacctctctgtttcatggggatccgtgcacttaaggtggggattgtaaagcccagggtttcttttcacaaggtggatgaaaacttttgttatttcttgtcaagaggttgttgaatcagtctctgttcttctgacatcctaatctgcttcagtgcaggaagcagggtttctagggacttccgtggtatgtttgttaattgaccactttaagtaacgaagtagttagtgtaacttagccctaccttactttctacaaggaaagtatatttaggcatgtttagtgagcagaagtgatgataaccaagtcagcaagcctgtgcaccaagtccttcatctttcaccctacttggcaatcagggcctccttccattttctctctctgatatcagacaaatggtgggagaggaaaggaagctagctttccactcatctgatccattgctaaattaaatatgttcaagaagttataaaaccaaaggaaactttttctttgccaaaatcctaataaactatacaaaaacatatattgtacatccagtagttgttgcttgtttgatgtcaggtcatgtagcatcaaaggggacaaaagctagagaaagcacattgtgctgggtagaataatgagagataaaatggagctagggtttctctgcctctagatcttcaagtaatctgaagtatggaaaagaaaaggaaatgttaaaaatctaacacggatgaggctcgttttaactttacggcgcttcccatgtgttacacgttgtcttccatggcaggaagctcacaggccgcgtctgttctgatatttctccttgctgcatcagtgctcgagcaagggctagtcttcccctggtgtttccttatctcttaaagtcagctttccttatctttgagcattgtgttcagttccattttattgctggtttgtgcgttctggacaaggaaacaggactttccctcaaggatcattccatacttacaaggtgtcctcacaactctaagttgcctcattctagaggactgcttctcagttacatggcaaggacgcactgactcacagcctagagctgcttggtggctgccctggacaaaagaagcaaaggttcctagaaggtagccctagccttcggatttggcaccagtgtctgcactgttccccatagctcctcagttacccatgcagattcttgtctctgctcttgatatcagtgagccctgattaccaacagattgtaaaagggggtagaatttagtaccaaccgatacctgggattcttcaaagtacaccaagtcccttgtgaagacacagctgtggttaaaaggtgctaagggtctgccaaattatctaatgccacatgtcttatgtcttaggagtgacaccatatgtaaacgcttgcttcagaactgttagtaagtcctgtgcagagccagatattattctgaaaatagaagaaatctgtaaagtttgcccacagagaagtactgtttcatgagtaggggatacattgtattgcactagctgagctcctctgaaggatccattgttaccagatcaacagaggtttctcatctctctggaagagctgctgccttggaacaaacagccaagcaacgcctccaagcttgtttataccaagcttgtttacagtcctcctaaagacagctctttggtgcacgttgctgtacagagaattgcatgtgttctgggatacaggtatatcatgaagagtttgaagccttatacttataaagctgttgacaatttccagttgttttttgaggtggtgtgtaatagtgtggtctgaattccacatgcatgagttaaattaagcaagttagcgtgtccatcctctcagtgttgttcactacccagtgactatgcaccatgtctctgtctagcatttttgtcatggtctgtgctagtaaaatagtaataaaaaagacagagtagtccaccatatcccatcctggggatgtccatggtcatctggcctgttctatgttgtttaatgccttgagtcatcagtcaggaacatagagtgatacactcaaaatatttttaacatgtggtatttagaatgtttagaatgtcaaagaatactctgtagtgatctttccctggaggcagggtggttctaaaggactactctctggacacttttataaagtgctttggaagaaaagagctcaatttcatgggaaaatatcataccacacactgcagtggtatattagtcgattaacctccaagaaatgcaaggaacagtacattgctcatttttttggttgttttcctatgaataagagaatgtgtttgatgctccctcagggagctacacctttttctgtgatcgtgtttttttttttttttttcacgttttatgtccaagtgtaaatgatggaagagatagcataacctgttcatatttgtcttagaatatattaaattcagtttctatggcaacgttttttaattggcaaattctattctgctagtactctccagcctatttttcttgggtatatggaattgtcagaaatgcttcacatagtaaaagttagacttaactgtgctctttgacaggaaacatgttcatgggccagggttgatttcatttgttaattttctgtactgtgttttcgtggttggttgctgtggcaattatgtgtctttctcgacacccttcctgtgtcaagaagccagtgaggattggtatttttgtctgagcttacaagtaggtgacagcctttcttaactgaaaaggaagaaaggaaggaaggagggaaggaaggacaaaagagagaaagaaggaaggaaggagagagagagagagaaagggagagagagaaagaaagcaagcaagcaagcaagaaagaaagaaagaaaacagtgtttgaaaatcccccaaatccatttaagcagggttctgggtgattcttgactgtaacagaataagctagactgatatatcagaaacacagttttctttgctcatcgtacacatactgtctcttgaatcagtgtggtgcacaatgttgaagcaggtactgggtaagttggatttggctactgcagtgttataaaaatagattaggtaaacagacacagcaggcccatgcggcttgggttctgactcctccccagacttagtataactttaataggctgtagttctaaagagaactatgaatctctagggtgatttcaatattatataacgaaggaggagctgttttatagcaaggaatcaggtgttatgtcttgtaaaataatttcagagaggtttatctgaaagcttcagtttttaagctattccaggcgacggtggacgtctttattttttgcctttgctatttttagagccctgcagtagcataaccctgcaccgcacacaaagcagtacggcagttggtgttggatgcagaattgctattagatgaaagctaacaaagcaaatccttggaaagaaggagcctgtctgcggtaaagactttcagtatgaaagttgtaatgtaaaaattagaatgctcaaggataaaataactacttccctctaagaagccatgcctgtttagtagagagtaattgtagccactcactttagctactctgcaccactgcagatgttctgaaaaggtgttcctttctgaattggtccatggcatttttggatttttttttcccttttatcagaagtcgtaggaaacttttatagctgagtatttcaatcaggtttcattttactcttctaatccacatgctttctgaataattatagcaccagtatgtgtataaatattcatattttataggttgataggacttatgcattatctccagtagtctaagaaaaataaaatgtgttatcaactaataaactgttgaatcatctgaaaagcccattgtacagaggaattcagaaagtagtggagatgaggtgggctataacatctgtggagtgaagtgtgctcagagccacaagctttgagcatcattctgtggtcagtagaattcttttagattatttataaatctatactttagctgtctggttttaaatatttaaaagaataccaaagattcatgacataattaaccgtgttgctgcttaagaggaaaattaaagctctctgagttggccttgcacacctccttgtctgtctgcctcagtgtgtctttgtttgttcaggtagacagcaaccctgatgaagtggaggggatttgtccatttaggaatgtttagagatctgggggatacactacaccgaattatcaaggttcttttcataaccagactatacaaacagcacttgagaaattagtgcagaaaggtttgtagcatcattctgtcatcagtagaattctgatctttggatttttaaccctcaccaaccctgtctaatagctcagagcagcaacatagccagcctccttctgtattctccagcagttcccgtgctgagagcagatctctcgttttgggaattgtcagatttcctgctgttacatctttatccaagccagtctgactttgagcattactgcttgcaagtactgttagggagaggaggaaaatcaatgtctccaaaatgggcagggttatagctccagacgcagcaggctagacagctgtacatctggaccctttactgatggtttcgtcaggtacacatgaagtacatctgctgacctacagttctgtgacagataaattagctgaattattaaagagctttcttaatcaccaaacatgttctaattgaatgatgaaggatgaaggtgagcaggcaatgagtttcaaagggtctagaaacaggtgtgtggtataaaatgtaatggtatactttttcttgttgctagcctaatttagttgcatttgttttcccatattgataggaaatgtatttttcatatttttagatcttgaatggcgctcagtctctacacacaccctattatgccatgagacactgatgccattcctctgtacacacaagccctggtgcacatatgcacatgcatataagctcacctgtaacatttaggtatttagggtgaaatcaagtgtttggaaatgaaatgctgtttctctttttatattagggaaacatagccaaccatcagtaacaatcttatcagattggactcctttgtgaaagagttttaggacaggaccaaaatatccttgtctagacctcttcagagtagaatagaaaaccgtactttgtataaagttccggttgaggcagaacagcctgaaggtttccagactgagactgaaagcatccaacaaatgcagataaacctgcctaccataaacactgccacatctcctggcattctcccactgctgcatgctgaaccaagggctgcccacaaaatttcactgaaatgtacccttgttgccttagtagatagataatatagttattaccattttgttcatgaggacactgaggggcaaaggactaagtaataagtacaacagagtcacaggtaggaaagtgcaggattagtttttaaatttatgttcctatttttgcttctttgaaccccactattagaatttatccccatatcagttttaaggaatcaaaatgaagaagagcggtccgtgtttaaaaaataatgtcttcatggaagtgtgtgctgggttactgtttcagatttgttcagtattcaaagctactgttgaattcctgcctttctcctacatttccatttcttttttccaacttctcataccaatgagcattcctccctttgaccttgtcatttgcattagaacacttgcttctttggaccttagactatcatcaagggatcataacttttcatctagctccagaagtctaggagagctgaccaccttgaaggactcacttattcgctgcctttagctcttgtcgatattgttttgcttttatagcatactgttaagcatgggccaggcatgagcaccatgacagtctccaagaaaacacccttacacacttcagggcgttacagagtatatgtgagagccagaaaagcaaattgaccaatgaggtgttggcatcgtaattggaagcaatgagaaatagcacacagttgcacgaggcgagctgaatgtctgtcccttcccacccccacctcataggctcatagtagagcacattttgaaaattctgaggaattcattccaattctattttggtaggcaaggaaaatttagaaaattggtaataaagtattgccagtctctactgtcatctcaatgaatcacaaactttagcttcttttactgagcatggatacaaacacagaatcattgagtcccataattttgttttttaaaagtgtatctgttcgtaatggagagaattgaaatttatacgtggcaggggtagcaaagtcatttctctttatagtatcaggttttaggaagctccattctcccaaaatatggcgctcattctctctaccaaaggagccatttcctgtcaatgtcaagggacaaatggccaatgggtgttgactgttgaccaaccaaaaccagtgctggcctttaggctctttcagtatagcagcacaactattcatggctcttttcagcgcttctgatcctacctcctgctttaaactccaactcctgggcttccctctttcagcttccctctctccctctctgttcctcttgtggtctggactctttcagatgcctttggctgtgtccttcttcgtatctacaattaaagtctttccatcaacaacacttcggagtagtcaagtctttagtttataaatctagtgcctaaaccctcagtttatacatctggtcctgaaagctctgggtgggagcacaaatggatccctccctttcaaggggtcttgcctttcctaagcaaacgaagctgcagacttgactctcctaagatacgcatgtatctgttttgtttttatttatttaattctagagtcttcctcttccttgcttcttcctttcaccttctgtacttctgctgtggtattcggggcagctctctggctcctggagcctgcttccccctcctgggtgcccttcacaaataaaggctctctctccctccacctcctcagtcctcttctattgagtaaatttaactgcagcactatctgctttgtctctgttgacttgctggagcttactattactataaaaccattcttctcagcctcctgggcccctgtcatatagaaaatggatgcctctcctctgtgactggagatatctctctctctgacaaatctctcagtgcatttgagcatgccccagattgaagctcttgttgcacagaacacttatcctctccctcacgcctttctccttcactgcatgttctcggctccctccgagcttcctcctctctgctagaagctgcctgcgtggtctctctccatagcttgctagaacccgttgtttcttcctttaccttccctgacctctgtgatacagacatcctctggggtggagttcctgtttgcagccctgtccctcctgtctgtcagcttcctcctaattagaaccctccctctggtggagttcctgatttttcctttttctcttttcctctttggagccagagactgtatgaagccatgatgtctggctgaaaaaggtgaccttagtttagtgcagtagcgccaaatcaatttgcaaattcccacatattgtaaaacatttgccatcatacaagcaaatattcgacaaaagtctcttatctctaagctttttctactttccactctagaaaatcttttatctctatgctttttgctctttgctctcaaaaattattttaaaactattatataaactctgtaaaatttggaacaaaagttagcttaaaatttgcaaccaaaagctaatacgttaaaaaaaaaaacaaaaaacaaaaaacaagactatacctaggtaatcttaattttctctgtgatactatatgtgtagctcggattcaacatgtttagggaaaacacacacacacatacatatgtatgtatatgtgtgtgtatatatatgtatgcatattgaatatatgaatatgtatgtatatatattcaactcttgttaagtaaaatagatgtttctaaatagtagccaccatgtgactgcaccaccatcttctttaagatgaccacgtgctataaaccagctaaggcagcacccataaaacattttagacctcttgaaccccaagattgtctttgtgtctccttttcacacaaaggaaacagctgcaggtcttaaagacattttggattaggatgactctttatatgataatggaaagagttaaaatttatacatggcagtaatagcaaaatgactgttcttcactttactcgagacattagaaacagtaactctaggctaaggaccttaaggtgagccttaaacaatgctctgctttaggagagaaagagagaaaaagggggtctggagagaaagagttgggggctatgtgacttattttatgaaataaaatttcacgcatctttctaagataaaaaatttagaatgcaattgaaaaattagagtaatattaaagggatagaaagtttaaccatatgagcccttgtacatatttacactttatttcaagtgctgtttgaaaactctaaagaggggtggggatgaatggaaatcttctgaaattcagcatacttctcctacctctgcccatgaataaacaactgtcctagaatttgtatctttgcaaccacaaaagggcagaacacctaatgttagtcattagtttttgagtaataaacgtctgatttaacttttcttaaccactttctattttagtatgccctggcaaattacgtaagagccataattgggtgagctctaatgtctgggcaaggaactcacttgagaagaagagagatctgttacaaaagcagcagctcgggacatctcagtgtcctgccagcactatggtatccctatgaaaaacagctgctccagcttggtacagtaatgtaagaaaagcttctagaagatgcaaacatattcctcagggtccacacttctgtcagggacttttttatgtcatatttaagaagagagtggctacagttttcttttttaatagggtattacaaatgattttgaagttttgatttgtgcaggtgcaggcctgtcggactattcaccaaagagtagtcctggtaatttcttatattaataattagaggggttttttcctgctgtttattgtgtcaggatggctttgtgtgttcccttggcctgcttcacttgatcagtttaagcagctgttttgccttaggtcattaggtagtaaataaccacacaaactgctattaactcttggatttgtttaatgagtgcagtctttttatacccttaggccatcttgcctggcctaggttcctgacatctgaacaggcagctacaaagacaccaagcacaggagtaatctttgcttatattcaggtcccttcctgacactttagttcagcctgcaatactccatcttaactctctgacctggctactctgcacaaagccttctccctagcctgatggttttattcttaagtcagctgactcctctgaaagctctacacagtgttcttaagtctattttactgtgaaggcctcctggctctttggattttgggaaagtcagtgtgttaaaagaaaatatagttgcagaatgagtaccagacagatttgaaaactaaatgttttcattctttctgatcttgggcaggttatttactgtcggtttgacttttttgttgctgtgtgttttgtttttgtttatgcaatcatgcatttaatcctgggtgagttttggttctaattttctattttatgaaataatattggactccacctgtgtcatcttgaccccatccctctcttgccctcttcctttcttctttccacttccatttttctttctttcattcctccatccttttgtgttccattccccccactgcctaccttttgtgtattagatgttcattagatatgagaaaataacaaatttctcagaaagtttgaaaaatatatattgtattgatgcatgtgttcatttaagtttgcaaagtagctcaagaaagcagggtagggggaaatggtctttatgcatcaaaaacgactttagttaaagatcccgtggaaatatacatatatatgattcacttttagtttatttattgagtaattttcttgcatagacatgtgcatcacagccctagggagcaagagtcagacagcctgtagctgcagttgtggatgtggggagctgaacccaggtcttctacaagaggaaaaattgctcttaatccctgagccattccacccctcccccaacccttccaaaagatcagttttttaaaaggtcatggaatggaacatgttttaagtgtaatattgaaatcgtaacactagaagtagtatggtgagctgtcaggctaatacaacagtgataatagctaggtgttcttttgaaacccaagatatggcagtattatgtaagtaaatacacgtctaaattgaacatttcactacagtttttgtttgtttgtttcattttcgagacagggtttctttgtgtagccttgactgtcctggaactctgtatatcaggctggcctcacttacagaaattagattgcctctgcttttataatattgggattcaatgcataagaaaccattgtccagcccttaaaaaaatctttaagaaaaagtgggataagtaaattgtattttgccattttttgatacctctttcttaatgattgagtagagttgttttaaagatgaatgttaaagctataatgatttctatacttttatttaaaatttaaggcataaatgtgtgaacataaataaacaggttcaatggtgatatataaccaggcatcggatatagctggacgaactcttaacaaagacttaaaaacatcttggaggagatgatatttaaccaagtctttaactttactgaagatttagccaaggagtggcagggggaatggatgcagagcagattatgtctgggtatacatgtatgcagagatatcttgtgcaaacatggtttaatgtggcctgtagacagtgtgtgtgtgtgcatgtgctagccttccaatcagatatgcatccacttttctaaataatgttatagatttaatgtattcgtaataattttaagagatacaaatatatagtatagaaatatatctgttcattttctgtctcccaaatagcaaaagcaagttttacctgaaaaataatcagtaaacacaaactaaaaattcttttaatccctcaaataggccacctgaatccattggtgggatatatgattagaggcagcacctctaatgttataacgtacattgtcatgggcttgtgggacatttaacggttggaacctcatttcttcagttgcaatataagattaatcagaagtatctcacagaattgtcatgaagataacagtaggtcttatgagaataaggagacaccgtactttcaaatggaatgtagacactgtactttcagatgtacttattaaatgaaagttacaagggcattttattcatttgttttccaaggaatgttgcattgatcttaagacttcatttctgtttccttgaaaatttatgtcaatgtacttttatgaacatttattgaaactaagaaaaattttagctaaacttccataagatgtaattgagctgaaaaaaaaaatcagtattagctagcagttaacataagaattaccagagatgtgaatgactacctaagttgtgtaggatttattattaatataatttgtcatctgtatcatgactatgccttctgaggacattttgaccaacagaatccttaaactcaggtgcatccagtggtaacatagccacttccataaatttcttttagatttttttacttcctaagaacaaagtgttctgaaataatttctcatcatatagctgttcctgatatttgtatgggatcttatgtctaaaggagatacaggcagcagatctgtcttgaaacccattgtgaaaaactctcttatttctcccattcagaaaatctaataaacaccttcaaaacaaaaaatggcagttacttgaaagattgtaatgattcttcaagaccctggcagaagttagtcttaaaagaactctgcaggatatattcagcgcaagccaatgacagacttcacaagtatctgaaacacagtcaagagcttgataaatcagaatttctgggagcagaggataggtgttgctgtaattttacagtttttacttaaagggccatgagagggaaccattaggttggatcttgattatatattacctagagtaggcaaaatgtctctgaactcatatttgttctacaaacattcgtgaagatgtgcatgtcaatgagactgttaatcctatagtcattgaaaggtttatgcacatattggtgtgaattacttctcatctaagttaaaagctactgaagttaatactatctgtttattctacctgaccaaaaacaagaaattgaaaagaatccacaaaagagggctattgaagataaccacttgtcattaaatttaaaaaaaaatgtggaaacaatttgttttgttgtcagcccacttttcaaaacttgtgcccagattcttaatataaaagaagtatgcttgagtttttcctcttttggggcactaagcgctgtctcacagtgccccctacctggatgcagtttcccaggcagaggcaccatttgctcaagaggctaaatgcctcagtgaagtattgctaaggagtgtcaagtcagccttgcagtgaacagtgttcaccttggctctggggaatatccttcctactggagtctggagttggcatctgaagtcactagggacatagtacgcgttggctcattaaaagagactctaactctgtgtaagatctgaaggaagaggagagaaagatgctttaagtaaagatattttagaaagacttgggtgacagaaagcaaggcttgcaaggttccagtgatgggataaatatgctaggactggggtctagtcacttatgttcattgtcctgacaactgcatgtgtcgtttctcttacattcacattttagtgtattataacgtggtgctgcatgtctgtgctcttgcgaggacccacggctccattctaatgacttagaacacgctccttccagttgccttttagaacatagcactttgggaagactttgcttttgtggcgatcttaggctcacaaactcatctatactggtttttttaattttttgtggtttgtacttaactgttaatatccccactcacccaaaatatgaaatgtgtctactgctctattccttgagataaacgtcagatgctatttgttaggtgttgcttctttagatatttgagggactcctctgggaagcccacaggagacctgggggtgaggaaggcacacagagcaggaaacaggctcacataacttgtgttgtgatactcttttttttcaagatcttttctaccctaattgcttatgctgctgcagccagcacccaatggagctgtgttctgggttcatgaaataattttctctctcttcattgctgtctcaagtcagaactgatagctgtgcacagttttagttgattgtcatggggatgggaggaggagtgtattttcctcataggaacagaaccagtgtcagtaagcacattttgttcagctacacagttggtctgtcaggaagaaacactggtgaagtagccctgaacactgtcacctcacctttccttctgtctctgtcaatgtcatctgcacaaagcagtagcatttcatgctgtccttgaatggcatttaggagcacagaaagggtcagtgcattttcagttagggaatcccataggcttgcaaagattgccactggaatattgggagcgaaagaatctcatatttggcaaagctaatgaggcgtgtaaagccgggagaggagagtgtgaggtgactgtagtaaataaaagcagttaaaactgcccgcttagtgtaagaaattgtgtacgcaccagttctatgcgttagatatgttatcgcagctgatagattttgaagatttaaggtaaaaatattaacatttggtgaaagtgtaacatagatactttgaaaattgttatgactaaattatgagtcataatgagttatcactttagtatgtgaaaattttactttaatttttttaagtcaagatttgctttgttatatttgtaggcatattaggatcaagcaggaataaatacagtgtcttggttgtatcaatacaagcagattctgatttctttattagtttcttttatatccatgaatgaaaaggcgtgactcctaaaatttaccatggtttgtttttccctagatgctctactatatgtgtatgtacatatacatgtataacatttatgtaatttctgatggatgcaaatcgaacaggcctatgaaatacatggataatttgcccactcacctcttgccactcaaggtctcatgctgaaatagagtgcagaccattactttaactcatttggtggtcctcacccccttgcagtctgctgtaggtgcaaacatgaaggaccaaacatgagagattcactgaacttttaaaagcacatttaagatttttattatagtttggaatactatatggactaactttcaaaactagttgcttacatcttggactttttttcccccctttggcagaactcaccatagttgaatccttcatttagttaggacctgttcttgctggtcccatttgtagttttattttgagaggtcagtggttaggtacttatacttaaagataaacaagtctaatgcaattggtatgaatgtgtatcctaatacaatgtctaggagctccagctcactgagtagacaggggttcagtgatgtatttatgaacagtcaaaatacaccttctgtggttccccaaagtaacagaaaggtagaataactgatgctggagcattaagttgtcatgtcaacatccataatgtgcttagcatagcacttaacacagaagcctcatgcaagcttagtaagtattaataattaataataaatattcctttatcataacaagatgcatcttttggttttagatcagtgctgtcgggaggggaggatacaagctggaggtttcctgaataagtggaccaggagctagcatgtgtatgcaaacgctgccttagtaattttaagagccagataggagaagcatgcctatgttttacctaaggttacctcctgacttcttccatgttatcatccacattgtaatgtcacagtgatgaaaaacatgccctacaaagacaccaccaaagattattatgtaaacactgggccttttgattattagctggtttgatttgcaatccctaaaacatcataaatggcttggccatcgtctatgtgctgaaaaatataattggagcaatttgaatacacacacacacacatatgtacatatatatatatatatatatgtatatatatatatatatgtatatataatgatctggcatttccagttttatgatgccataaaaaagcagccagcacatgttggactgtttaatggtcctggcacctaccaaatgtcactggactttacaaggtcatagaaactccactttggttcaggggtatagactggatccatctctgtagcccacacagtatatggaaccaggaatgttgatggtgctggtgaagcctccacagcactagtgtctatatattgctaggattctgtggcatagagaccacacgtttatgagaaaagcaagactgtttctttgtgtgccatcctgtcagaggcagctctaaatagatctggatttctggtgatgacggtgcagatgcaacctgctgtcacagctgcatgtgtatgtgatctctcataagcaaaagctgctggggggagacatgatatttttgtcacaagaatgtctgtgatttgctgccgtttcacttcctcccccctccccccccaaggtgccaacccaaagcttgtgcactcagaacaccaagcagaggtatagagtttcactttggtcatttccaagatgattaatggagttgtgcaatgcaggctcctgagcactctgggaaagtcacagtatcccagtgaggtggagtgccttgatactgcgtcagcagggagggtattttgggatattgtaaatgtcactattggttttaatatacaagaatcttcatcatcaaaccttaggaatgttctacaaaacactgcctagaacagctattgagttctataaatgactctttaagtagctagaaactgttacctaaaatctcccatttgtgacccagttagatatggatgaagacagtttagggcttattatatggagccagtattccttcaagtaatgataaattataaagttaactggctgtgagtgtgtgtgtgtgtgtgtgtaataagaacttgtcatgggaccagaaaagaggaaagcctgaattcccagtccattctgtttcagttgaatacatattttgtatctatggtaaactaactgtaagaagttgagatataatttatctatcactcttttctagtaaatatcttaacattcagactgtttacagaactgtgcaagaaaaataagtaaatattgaaactcattcattcatgctttcaaggtttttaaagtgtgcagctcttagtaattgacttaattagcagggataactggtcagctgcatgctccttttacttcatgttgctcagtataaacttaatactttatgtttgaggacatttccagaataaccctttccattgaaaatggtaacatttttagaatgcatagagctctctttagaatatcagctattgtacatgtagaataaatggaccaaagtcttaatctcatggtagatttgtaaatgaggtttttaagactagaactaagattaaccacggcagaagactagaatcataatctaatagaatcagtgcactgacaagaagaattacaagtgaggttagagtggtagtgtctctgtctacatcccccatttccccccttcctcctttccttcctgccctctctccttcctgtttctgtgaacactaagggagttgttgatatggaagcaaagacaaaggaacccatgaggagagttctgactgaaaactgggtaggataggaccttcatcttggtttttgagcttctaaagctgagaaaattaatttctgtttaaatgacccagtctgtgacatttttcttatggcatccctaactgactaataaagcctccattatatttcactgggtgggtataagtcagtgtttgtctttcaactggtaattatcttaatgatgtccactgctgtacccagctgggcatgatagtctggtacagtctaaacatcctgtagtactccaacccacacaacaacatttatatgtggccctaattgtccataatgccgatgttaagaaagctagcatgtcttttcagggtgcaggtcctcttgcaaacttgcaaaagccctccatgggtgcaagcaagctataaggaacactagcgtaggagcttctgcacagtctgttttagttgcattgacttttttctctgcacttgcaaaatcacataaaatgattgttagtgttaattgaatgcatagttgtctttaaaaatcaaattgaaggatttagatatgggagttggaaggtctggacaaaatacacttttcttacagtgaattagaaagactgttatcgatctcctagcattagatgattaactagacaacaaggtggattcataagaaaacatttcgtggaagtgagaagccacatgtcttggtgaccactgacattaataatcttattttgggaaaatatatatcatcttgggaaaaaaaagctgttaagaagtctcaataagaagctattggtttcacagtcagattttcaggccaagaaagtacttcaaaaacacgcttgtctctgctgtcccaaaggaaactctggtttcattttaaccactgaaataaatggttccagtttgagagccttgctagaaatctagtgttgtgaaaggcagctggaacagcctctgaggtggcacccctagaatttgttcattgcctccgtattctagagcctacccaggtctgactgggcaactttatccttccggttggtaccatttggcagcatgacagtatgtccttttggattctgactatacaaatcatgataacccttttatttcaggtttaaaaaaacattgaaaatttaattttgacatttttatatttttaaatttacttgccttctttctattgtactcttttattttcaattattagtaggtttttaaaatagatattaaaataaagaattgatgttaaatttagtttataatctatgttcctaagcactagaatgaagacagagcacaatactttgaatgtgttataaggaacttatccactctctgtgcttcctgggtaggggttagggcatctggtgggtgatgcctggaagatgaacagggatgacactgactatggctttaccataattctcaaaggaactaatgctactggttggagggttttagttgttttgtgttcctagatttttaagtaacgctctaggttgggatatttattctgatttactcttaatctttctgtttgtagagccacaaccattcacaagtgcagtcaacacctaacctgtgctgactttaaaaagcggagtttatgaaattgcccttgaatgggttactgtaacttttcctatgtgtagcagtgcaaattcctgtggcttcacacaaaatgtcttctatggtgttttctgctatgccagaactaactccttgttaaaacccacatccctggccctaacttgtgtgcacagacactaggaaataatcctcactcaccctcctataagaaacaccagtaaatgcattgatttggcaacttcaactctggtggaattgctgctttagtctgtctgcccttgtttgttcaagtgtccccaggaaaagtcacaggatgtgtaggaatgtcctgttcagaacatattcacattattttttgaaatagagaatctataacaataaaactaagcaacagagaaatatagtcaagtgatactttagccactgagtaaatgcacaatagaaaccatatgtctaagcttctaaatttcaagatggatgggccagcaaaatggctctgcaggtaaaagtgcttgctgtcaagtctgacagcctgatttccatccccaaaacccccatgacggaaggagagaactgaccccccccccccacacacacacaggttgttctttggcctccattagagtgctgtggcatgtaataaataaatgttaaaaatacaaaaagtttgatgggatgccctgatgcagaatttataggcagcacctaaaatccctttctgttatttcagaccaagctgggttgataggtagagggtctgggtgctgtgtggtcaggaaggtttcctcagagggacactgaggaaagcgatggccagtgtttgtctagtcccaggctaggtctgtgctgtttgtagagctaaagcacctgaactgactctgactgaaccatcggctctacgcacccttctcatctacacctcaagccagttttgtgaaaagtttgaggaggaagtatagagaagtggaaattgcattggaactgtggttggttctcatccttcctcaagctgcatccctttaagactctggtttctcatgttgaggggacccccaaccatagcttcataactataagttggctactgttaggaatcataatgtaaacacgtgttttccagtggtcttaggtgacccccaaagggatcatgacctcacagactgagagcaattgtgctgcagccaagttcttctttatattgaaataggtattatgtctctgggagaactcggcctgggagttctgagaactgtagcacttaggagcttaattattttgtccaatcatataacttcaaattgatttgtgtgtggcttattatatggggctaagttgtttttgaggttgtttttcaccgagatgcttttatgctaacaatgtttctgtgagcacagcatatatcaagcatggttatttgacttggaataagccattttatgaagcatgggtctatctgtgaacctatcaaaagttgtacctagcagataaattagaaatctcatcctgtcagtgtggaattctacttccctttgatatgcatttaagctgtgttccagggatgtgcttatagtgttagtgtcttatgcagtttgtagggggagggtgtttataaccttcgtgtcttatgcagtttgcagagctgatggctctataaactgggggatttaggcatcaggactgtacagccagaggcatctggaagagtccagagcagggagagaaagtagtaggagggtgaacatggccagcagactagagttgtcagtgaggtgagtcaggagccagagaggagggcaaacagggtgtggacaaaggaggccaagagaggaaaacaagagagagacaaaagactgagagcaaagagggtgcatggccaagatggcagggttatgtggggaaagaagttggcggggtgggatggggagggaaagttttaggatggggactggagtcggaaaagctttgaaaagacacagacaggtacttgtgctactgagaaagcctagaggccagcgcttgttttagtgtgctaataggcaccaaagatccatgtatgccttctgacagcagtaaggaatggctcctttggcagagggatacgggccagaatttggagagtggcgtttctgttggacctacgaatgagaaaagaagctgtagactgttcacagtcctaaacttgcaggcagtgtccttattaacacagtatagaaacctgtcctaaaacagcttaaagttagagaccctaaatagagcatttggcttagaagagttacagtttttattgtaaacatcaattttctaacttattcaaagtaaaattcaacagaatttacttttctatagaaaaaaattaaaaaggttatgtgtcgcttaatctgtataagcagatctgcttagattctctggtgtaaatgtgtagttgttgagattgactaacagtgtgtcagtcagtatgaatggagtcgttcccagggtctggcatattacagactttaataagcgcttctgatccaggatagacagatacttatatacaccgtttagttatgctgctttaggggttgatgtttctgactttctcattgtcagttctttgccggatgagcataccaagtctgactattttcacagtttggggtcatgggacaatattggaaaggctgaaggctcatgtctaaccagtatttgactactatcctttaaacctctacttctgtgagaaccaactagctctcttttcagccaggggatttccagtatgtggggctttgtagaagttctcctttgatttgctttggggctcctttggagccattttcctgggggaacaatgttctgtgagtcccctaagctagtttgttcaaactcagtagagataaaacaccaatgacaagtgttttcatgaatttcgcttctcgtgacttggtgatgttaatgaagatgctgtagcaagcattcaaggttctgtacttgacatctgtgtgtgaggcttacttttaaagcagtaaccttttaaactggaaacagtaaccctgacattgttagattacagaaacttcactgagcctttaaactttttcaaatatcttaaatcttcattttaataatatatttgtagttgaattcatgacttcttcttaatgtgtaaaaatgctgtgagtgataaattgtgagaaaaactcatagatttagataacttgtttgcatatcatttctataatttagtgattttattttgtttaacaacggttcttgcttcttttatcttttagggtcgttgctccagagagaactgcaaatatcttcatccacccccacacttaaaaacacagttagagataaatgggcggaataacttgattcagcagaagaacatggccatgctggcccagcaaatgcagttagccaatgccatgatgcccggtgccccgttgcagcccgtggtgagcacactttccaccccatccctgtctgtgtggccgtgttctgtgtctgtcctgaaacagtgattgtatgcaaatagaggcagcagtggtaattgctgagtgccacgccccgtgaggttacttaccttcacggcaaacttggcaatttatagtctagtattgcttctgctaaaattctcttaaaagttaaccgtttaacctgcgactgttcacctggtgtttattaaagtagccattaaactcagtttagttaaaatacattccaaatttcctttgaagttgataatgatatttttcttaaaaacaaaacaagaaagcagataaatgataaatagtagtctttagctttgaggctatttcttgctttcttctctccttgaagagaatccctgttattttttttctctctcaaaaaggagactttgtggaaaacttaacttgaaattacttcatagtcacaaatgctgggcactttttcacagtggcgagttataagcatagcttggaagtatcatcagaagagaactagtctaaacaccagaatcccaagggcctttgaaaaatagctatgagtggtcataggtactaatattttcctagccatgtgtgttggtaacttgtttatgaataaacatatgtatttaaatgtttagatttttgatgtgcatgtgataaattactttaataatcttatttatataatagttaatgtttggttaaaatggtgtttatgttaattattgttcaaaaaccctaaattacttacatatgtgataacatttatatgatcagaatatgtctgattgatttatcgctaacatattatgaactattataaggtcatgagaacacatgtttttccagtttgttaattgtagcatgtgtgctaactgatttttttcctaatacattttaacacctgaactcaatgtaattattattctctcttagaacataatgcaacaatcattccaaaaaagagggggggattgcatttcgaggtgggagggatccccatattacaccggcagtgataccaattatcaatactgtacagtcgaggtgagagaatattataattaattctctatcattttaatatgatttttattttatgacattattgggggctcagttaaaatgtgatattttgatttttatggcatctccttattttatgtgtctttatgatgataacataaatattttcatttggttaagaatgttttgtataatcataatttcttacagacaaatcggttctaaacatatctcttacacttggccctcatgtatggtttcaaagatctggaacagtttctactttagtcagcctccttgatgtgaggtcctttctcccacttaagcctgtaaatcacacttactgacattctgtgctttctgtgactcagagcacgtctgagtcaggcaagtgtagatctgggctggaggagcatagtccccaacacggccctgagaagttagttttctgtgaagtcttggcccattttttgaccttgtccttaaatctcctcgcatgggtgatccaaggtcatattatgcttagccctggaacaaactgtcaaagatcttttattctctttgaaattctagtgacatatgtgttttttgtagtcactaaatcatagatctctgaagccatccgtacttagactcctggtccttctgttaacatttttctgcatagacgaagtaattatctgttttagttatgagcacaggcgttaagttcatttctccttcacatcattacagttcaatgggaattaccctctacaaaggtactgtgaaaccacagttgaaaagtctccgttcaggatgatgtttttgtaataagtattaaaatcacttcaattattcaaacctgaagcattttttactgtgacgactgtagagaaggctttaatctaggaaatttgccttcaaaacccacccgagactctgatcctcttttgagtcagcctggtttccatgaggataacacagggatccagaagtaaatggaatgactgtgactagctgctttctgtgacttcaatttgagctgctagtagaaaatagagccacaagctgccctgtcactaacgttgagaaggactcggccatgggagagcatggacatagatcaggcaggagtagtgtgagtgtggctttcggtaagcagatccacaatatcagagcctaggaggacaaagatttcaatttagcaccaaacttcatacagaggacagaggtagcgaaatgagagcaaactaaatttatacacatccagtagtgtgtacctgcatatgggagaggttcataactgacagacagaaaaagaaggaaataaggagtttcccagacagccatcaacctgacagatattcatagtggtttctctgccctgaaggtgagaggaattataactcagagccagggcacaagccagaagtggcagcttcattgccactacagtgggctacagtgatcagcagttgtcagcagtgtttccaagacaagtgagatgattgttaagagcagccactgtcccaccagagcatggtatgggggtaacttggttaatgcagagattcataggagaactttgtgccttcagtaggttgtcatgcagtatacccattaaaaaggagtaacatttttgagacaagtataacagtttgaggcatctgttgtactcagcaggttctgtatatgccattctcacaactttgctgcgagctaggtaatataatgtccagtttagggattgagcccaagaggttcagagaggttaactacatggcttaggttacaccgcttgttttaatccagcctggccagatgttgagcttatatggtaaaaacatacggtgaacaggctaactactttggatctatggctgactctttgatcttcaacatggaaataaaatatgaaatatattgtccagaatgtctttgtaattatataaacataattcccatttcacaagattagtataaagggagttggatataagaaatggaacttctttgtgtgtctaattcatgaaagttcacacaataaactgtagaattttttatatcaactctttttggcattaggatttgtaataaaaatataagtgaatatttttatgttttttatcatatatgacctttgaggataagtgagattgtaatgattagtcttcagaattaaagaaaactttctgtgctctttcatacgttcatcatgacaatgagaaattgacatacactagctcaccctgacctgcatctgctggatgacaacctggaagcttctgtgtatttctttcatccccaggatgatgttccttagactctctgatcctccaagctctctgcatcacacatagatctgtgtggtcagtggggactgagaactcggtgtgagctcaggcgttccattagtgagccctaccaggctttacgtgggacctgggttagcagtgactctacagagttgctggagcagctactcctcaggtacacaccagcaccttgagacatgcaacctgtgtagaaatcccaggcacttcatgaatctgatgtgtgtgtatgagcagttcagaggccttagattcagttcaagtctcaagagtggctttgtcaccttgacgttggcagtctttcatattcccagggttctttggcagtaggtgaagaaggctttgaagttattatttgtccgactcccagactacctagaacttgccagtactttctgtgctttcttgtcttgttacccacctcatgacgttatggccagttcattctatagagtccccagaaaactatttctacatcagccacagtgacttgtcatctgttttgccatgcatcagtcagtctgacttttcaggtttgtgatcagtccctgaactgtaagaatagacctgtgctcatttatactgagaaggtcttaaatgagacttcactatttaaatgtttgtttcaataaaactgggtcaaaggatacagtgaatcagggtaaagaatgaattccttccccttcccattcacaagctatgagtagagtccacagcagccaaatgcttcattcttagacaaaattgaatatgggtttattcataatacctgttagctctgagtgctgttctaaacagtaattcactaaaactagttctgtatctgtttacaacatggtgcttgcctagaaacagttgcccatacttgggatgtcctacggatttaaaagagcttggcatttcactgtttacaagtttgactgaagcatacatgtatatacatatgcaaacattctactaagcatgcatgtgtacacgtgcacattctaccaagcacacacatgtgcacagtttactaagcatacatatgtacacatactactgaacatatatatacatgtgcacattctaagtgtatgtctctctctatatatgcacattctattaaatatacatgtgtacatatgtgcacattcaactaagcatacacatgtatacatgcacatattctgctgaacatacacatgtatacatactcacattctatgaagcatatatacgaacacatgcacacaccctaggaaaaactgacttataaaatttctgttccataaatttctaaatgataagttttggatcattatatatgacccttcttttttttataaaaacatactattttcagcattttaaaataaacagccttgtgatatttgcagtgttcagaataatagttataatacttaagatgtaatgttaatataaaaattagaaaaaataaactttgaaatattcattataaagtaacagctaaattctgaggtggaaaaaggatatataattaaatctaccatctagatatctgtgctagaaaatatataaagcatttgctactcttgctggcaaagaaaaatcagctagcaaatctgcagtgaatatgttatgcagtaactgcagaggtggttacagtgccatgtgccgggaagtaggagcagaggaaacaagaatggcttcagggtcagtgctacatgcaatgcgggtgagctttatgagacagagtgtagtggtgtggttccctgggaagcgtcgagaggttctgtttcctgaagcgtacctaggagtcagacaggtaggctgagggcaggcaatgtggacagaaactcataaatactcataaaaagagaaccactaagaaaccacttagaaaccttctgtccaatcggaaagaaatctatttccttaaatacatggaaatggaatcaccctgaagctttcaaaaatactgccgcctagatacctttcctgggaattcagacaaggaggggtcgaactataacatgataaaactcctctagggaattttaaattcacatttggtgattatgtgagaaacagacttccaaccagactagaagcagactcaaatgtgcccaatccaggaccttccgttgattcatttatagtggtagacatgtaacattcgtgagcatcttctttagaaaataaacataataatccccaacaaagtggcagctcattcactgaatgcctactgtaaccaggcattgctttgtatggtgggaacctagaagggaactaagagatatcttctactctcctgacatcccccctcccaaagaggccaaagaaaggaaagtcttatagtaaaaaaattaaacataacataagtaaagcacttatcacagtgtgggctgcccgggatagggaattactagtaataatcatgtttgtgtagttaactaggatggtaatgtgaaattgaataatattttcagttataatgaagcctaataactgtaatgtaagcagaatgcttcatttaaagcaaacaagtgataaataaactgccccagaattagcaactggaaaatgtccttggaaaggtaatgctaaaccaaccttcattggaacaaagatatctataagtcactgctgcaaggatgcactcagtatcaaatataccagctacatagttagacattattcaatccctacttcagagaaacgaagacttcaaataccaatgcagccattcctatctttgagatcttacgagccctctgcaggtcagctccggtaatgcaggagtggccatggtcactggctttcctacattaggatccactctgagctgtaacccacccctaacacagtgttcataattggtgacagctacattctatccatatgtaggttttcactgtatttaacttggtgagatttaacgaggctgattttattggtgtgctgtcattattgtgtcaagtcagggaaaaatttcttcatcctgaatgtctttatgaaggcatttgccttaagtaattcctatagtatacagtgacataaacatttcagtagcttgctatagtaagtatcaagtgggctttcttggaactcattttaatttacagctatgaatgcaaagagaaaggatattaattagctttcaatcttttaggactctgctaaatttataacaattcttctatgtggtctgagattccataccctgtatctgactgtgtgcaacagaacacacatttgcctagaatgttcttggacagaagtttaatgcatgatcaccatgcaggactgaccctgtcatggtgctgccctggcctctagcacacaaagggaaagcctgaagttagctgctgttcagggttttgtggagagacaaatgccactggacccagttttacacatggatccttcttcataatacacatggaatttttgtatttcctgagggcagctgcttcgcattggaataggcttgaggtttgaaatggaaagacttattctaggctacttcattagtcaagggccacagacctgtcagagtaattaaacatggtgttcaaagcacatgcttggaggactagctatgttagggtgaatgtatcagtgtgagctatgctatgttataaatttttcccagtgaatcaatgtatacattaaatagtctatcgttcatattgttcttagtacagatgtgtacacaatgcagagctgtcatgtaggatggatgctcaaccatggtatagtcctttgggaccttatgctctcatattaaagaatgccatttacacatagtagatccctggcttctctccattgaatgcagtagcatcaccccagtgtgtcctgcccgctgacagcccatcccatgttttttaataattctgtggcatttcctgggaaatgttctgtcaggcttcacattccagacattttctggagaaggttaatttccattgctgagtgccccacaagtatgggatgggcttgtagaacactgaacctttcttctgagaaaccgacatcaagtgaccaggccaaatgctatctcttctgtgctcaaaagacagtgtaatcatcacctctcacagcccacagatttggtcaatgtgctggctgtggggctctgtgatcccctgggacatctgtgtctgctcagatgataggcacttatatcctgttaacacttgagaacagacctttccactatatctgacagcagttacacagtgtgtttctcagacacatttctaggattgagtcacaaaggtggagactgggtgagcacaaacaagtgtctgtactaagatatttaagacgttaaaccacaagtattctagatgccaatcttcgaaccccctctggagatatgaatgcatattctgcctgctagatttggagaaaaacaatgacttagcaaatatcagtatactgaaatcttcttagactaaattaaagacagaattaaatagaagttaaggaagaaagaatgaatgatagatgaagaataaatgataactctgtaagtagagtatcaatttggaatggagacttgccattaagttttgctttttgtttcaatttgcagccaatgttttcagttgcaccaagcttagccaccagtgcatcagcagcctttaacccttacctggggcctgtttccccaagcctggttccagcagagatcttgccgactgcaccaatgttggtcacggggaatcctggagttccagtgccagcagctgccgcagctgctgcacagaagttaatgcggacagacagactggaggtaggataaagagttgaacc

SEQ ID NO: 1571 - DNA, 4584 bp, Mus musculus
gcagcttggaaattcggtgtcaaagggtctgccacgttttcatgcttgcattttgggctccaaattggcactgggaaggggttactgagcacacggctgagtccaggcctcctctaaacacccatctacttacagtcctggtattcctctcaaaaccaaaacctctttgaattaacagtttcatgctgtgaatttctagcggaggtctttccctttatattgaagtcacacttttccatgtgccgttaaatcggggacgggggaagcagcctttcggacattttcacagttatctcacactctgagttttatcagttcctattttgtttagtttttgtcttttgttttggttgctgatttttttttttctatttttctttttctttttcttttctttttttctttttgttttttcctttttttttttttggagaggggttgggtttgttggtttcattgaacatttaactacctgtaaaatataaacatggctgttagtgtcacaccaattcgggacacaaaatggctaacactggaagtatgtagagagtttcaaagggggacttgctcacgaccagacacggaatgtaaatttgcacatccttcgaaaagctgccaagttgaaaatggacgagtaatcgcctgctttgattcactgaaaggtcgttgctccagagagaactgcaaatatcttcatccacccccacacttaaaaacacagttagagataaatgggcggaataacttgattcagcagaagaacatggccatgctggcccagcaaatgcagttagccaatgccatgatgcccggtgccccgttgcagcccgtgccaatgttttcagttgcaccaagcttagccaccagtgcatcagcagcctttaacccttacctggggcctgtttccccaagcctggttccagcagagatcttgccgactgcaccaatgttggtcacggggaatcctggagttccagtgccagcagctgccgcagctgctgcacagaagttaatgcggacagacagactggaggtgtgtcgagagtaccagcgtggcaattgcaacagaggagaaaatgactgtcggtttgctcatcctgctgacagcacaatgattgataccaatgacaacacagtcactgtctgcatggattacatcaaggggagatgctctcgggaaaagtgcaaatacttccatcctcccgcacacctgcaagccaagatcaaggctgcccaataccaggtcaaccaggctgcagcagcacaggctgcagctactgcagctgccatgggaattcctcaagctgtacttcccccattgccaaagaggcctgctcttgaaaaaaccaacggtgccaccgcagtctttaacactggtattttccaataccaacaggctctagccaacatgcagttacagcagcatacagcatttctcccaccaggctcaatattgtgcatgacacccgctacaagtgttgatacccataatatctgccgaacatctgactagccacaagtatgttacccagatgtagagctgtcgtcacaaaacaatcatacaaagaggaaaggacagtgtgcttgattagagtaaggacgacgtcattagccatattgtatataccgtcaagcaacacatacaaaaatccctcagccacaagacatccacatattgcatgttaaccagaagaaacgacaacatgggaacctgctgcacactgttgcctacacactttgtacattcaattggtatttgtgctgaggtgatattcctatctaaaacaacaacattgtctttcttttgtagcacagagttatgcattaaaatatgcatacgtaattagtttcctatatattcatgccatcttgaaaagacagactatggtgtgaccatgattctattatgtattggtacgtctgtagaccaagatataattttttaaaaataagtttatttctttcaaggtttacaagtaaccaaggtgcaccttgtatttaaaatcgccgttagagctgagagcgcgcatgcagagtcatttttgtttgagagtaatatttttactgtaatagattgtacgacatggtgagggagggaactgacagatgaatgtgccaagcaaaaccacaactgtgtatattttaaagcacaccatggctttaagtaccatgttgttaaggattctcatgaagtgccatagactgtacatcaaattagagtattatttcttcagtgttattgtttctggagccacattttgttgcttatttgctagtactaatcaatcaaagggcaccattcttttcttttttgtttttgaaaccaaagctgtctcagaaatggccaatttaactttacagtaacaatagacagcacaacacaaactcaatacagataacctttcacatactggagatatatatgatagatatataaaattattttaatgcattgtagtgtaatatttatgcatactctactatataacatgttattcaaaagggatatgccatttctgagacacaataacaaaaaatgtttgaggaaattattttgcttctatttatagcctctgtcaaaagtcaaaagactataaatgctttgcagaaatgggttcacgtttgcttaaacgcttcatcacagtcacattcaaaatagtgactctaaacaaagagaacagcactgtcatcagatgcatgataaaccaaaatatgaaaatgggaaatgtttaattaacctagtaattgggtgggttaagtacatgggtgaattttatatgtgattcttttgttcagattaactgcttatagccttagaaagccttttaaaaaaattttaaaaatagatgtgcattcagtttttaagaatggattcatccaaaggaattccccttttttgtggtttggatgttgcagctaggaaaggctatttttgctctgttcagcagttctaaaatcgctgagtaggggccaggtcactggcagttctagtgtggaatgggagaagtgagagttctgttatagaactttccatacttccaagtttactgcaagtttttatgcttgagagagatgctttctaatataagactgatgtgttgattttcctgattgtactgtacatctattaaagccttagattattacattacgggttggaacccataccaatgtaatttcaatcgtgttaagagagtaatggtgacttcacatgttattgtagttagttacgttatagaatattacttatttttcttgttaaaatgtagtttttcatttcctacatttattggattttcattttctattaacagttgaataccatttcagtttttagactattgttttattagattttaccaatgaatttttcaaaatacaaaaaaattaaagtagttttttcttcataacatactcagttttaaattacatgtagtgtcatatgaatatccgtattattgttaactaaatgatttatattttactgatttaatattacagtgtaagaatgtcagtcattgttcttgtctagttttcattaaaagaacaaagatcttttatatggatatcttataaatatataatcattgctaagtaagaagttaagttgttgctatggcaacaatcctggcagacaattgagtaatattttgatgatttattttgtttgtaattagttattatgagaagatctagatcctagatattagaataaaatttattttctactgtatccatttcaaatgttaaagtattgtttaatatttttgaaatccctgaatatcaggccttgttataaataagctgcataatcaataaatagaacaagggactttttgttgataatccaaatactcaaagtttacgtaatgagaattttagcgtgtgtgcaaactcttgagggttgatgatgctgcaatttagcatgttggaaagtctagagagaaggttgactttttgcacttctgtatatagtcaaaagagagaaacctgtataatagcaagatcttattttgaataaaaacgtctataattacaaggagttttgttaaggctaatgaaatgacagactgagcaaaattgcttgcaaaagtggcacagagttagcactccatacccttcaaacacgtcgctttgctttttgtggacagcttgtagtttgccaggatttttcagctggaaagatttgccatccttccaagatctcatgactgacaaaactccattgggccaaatctgcctgaagatcattaccaaaaaatagcaggtacttcagccactaagatgaaatcatggatcagatatcccttacattgttttcaaaactactgcatgtttaaaacttcaacaaaaagagagaaagaactatgctaaggacatatattattcagatcgatatctaccaatttcagtggtttaatgttcacaaaatgaaatcttgaaaataactattgactttcacaaaattttaaccataaacaggcaaaccaaacagcacacctgtagttgttctgtgattgttttttaattgctgtagatcatgttctttccgcaggtgaaaaaaaaaaaaaaaaaaaaaaaaaa

SEQ ID NO: 1572 - DNA, 1026 bp, Mus musculus
atggctgttagtgtcacaccaattcgggacacaaaatggctaacactggaagtatgtagagagtttcaaagggggacttgctcacgaccagacacggaatgtaaatttgcacatccttcgaaaagctgccaagttgaaaatggacgagtaatcgcctgctttgattcactgaaaggtcgttgctccagagagaactgcaaatatcttcatccacccccacacttaaaaacacagttagagataaatgggcggaataacttgattcagcagaagaacatggccatgctggcccagcaaatgcagttagccaatgccatgatgcccggtgccccgttgcagcccgtgccaatgttttcagttgcaccaagcttagccaccagtgcatcagcagcctttaacccttacctggggcctgtttccccaagcctggttccagcagagatcttgccgactgcaccaatgttggtcacggggaatcctggagttccagtgccagcagctgccgcagctgctgcacagaagttaatgcggacagacagactggaggtgtgtcgagagtaccagcgtggcaattgcaacagaggagaaaatgactgtcggtttgctcatcctgctgacagcacaatgattgataccaatgacaacacagtcactgtctgcatggattacatcaaggggagatgctctcgggaaaagtgcaaatacttccatcctcccgcacacctgcaagccaagatcaaggctgcccaataccaggtcaaccaggctgcagcagcacaggctgcagctactgcagctgccatgggaattcctcaagctgtacttcccccattgccaaagaggcctgctcttgaaaaaaccaacggtgccaccgcagtctttaacactggtattttccaataccaacaggctctagccaacatgcagttacagcagcatacagcatttctcccaccaggctcaatattgtgcatgacacccgctacaagtgttgatacccataatatctgccgaacatctgactag

SEQ ID NO: 1573 - DNA, 96588 bp, Homo sapiens
acatcttgggctcctttttaattacatcctacctaatataaaaactgtaaaggtatctctgtatacctataccatcttgtagaaaatagctatatatttcttaaaatttgtaatttgatttgaatcctcatattttgaagagacttgaagcttaacaagagcttattttttaaaaaacatattctgtattttaaaatttctaattactattttaaataatgaaaatagctgtaatttatcaaaggcctgatcaatgttaggataattctcatgaagtcatttattatcataattccacaaggtagacattttaagtttgcaggaacctgagactaggaaaaaattgtccaaaatcttatgcctaataacagattctaaagcctgtctttatgtctaatagccaaggccatgggaaattacacttaatcttttcctgccctgattcttctaaaaagtgtgtgggtcatgtgcaggccattgcaccaagttggttgtcagggggaggtgggtatgccctgttgccaagagcagccaacaacaaaggcagcagggcaaggttgcagcaaagaccaaggttgcaacatcaataactactgccagtggaaactagcccatgtgtcatacttggtatgtatatatctgttgccaataaccccaaagtagacagtgttttccttttagtcactgagtaatctagtcataaacaaaacagatttacttcatcggctgcttctttcatcatgggaaggaaaatgcccaaagttatgccacatatcgtctaagcataccttctttctaacaattaattttggctgccttctatgaatctgatattggtgccaaacattccctttcccacaagttcaagagtaatcaagaaaagttgacaccttctagtgtccacgtgggcttcttggtatttagggaccttggcaaattatttacagcttctttcagacgagccttccagagctttgtaagaataaacaaacttcaaaggtctccgaaggggaaaaactgtcctggctaagtctataatttaggctatctttagagagtacaactccataaagagagaggtccaagaaaccagcttcttttatacaattaactttttctttacttaattgtaaagactaaatgacaagtaggaaagtgcttttgcagaagcgtgggagtcttaaagctgtagaaggaagaaacactgtgcatgggagtaagtatgtgggtgggagttatagattactgctcttttgctagtctagaataactatgcataaacatctttatagtagtaacttgaacagaatcgttaaacttctattaaaggcacttgatacatcattcaaaataagcacaggttaccttatatccagaaacagaaaaaaatcattttacatccagccaaaaaagattttaaaagagcctttgatttttgacaaaacaagtgataataaaattaaatttttattttattttcaaatattaatccaaaagccgacatgctgtacttcttgaagttatcaaagataagctggctagctttgtctgtagatatcatacccttaaaagattaagcccaggaagtgaatgacagtaacaccaaagactgcaacagcaagagcatagtactaatgatcagtcagagatttcttccgaccctgcctttagaggctatgtgatggacaccttgccacttaacacaaatagtcactatttcatgcaactagtaatagaattctgtccttacaaatgaagaagaattcaatgtgcacatgtagtacaaatactgtgaagactttcaactataatgtgagacatttgaattcaataaaaaagggagagagcaataaaataattataattgtttatctgtttagattcaccagatacacactctcatttttctcattcactaaattttgcacatttatattatttacttagttgatcataattatttaccatttcatattcattgtccttgttatactgcatatttcaagaggcttcaggtctagtttttcttaccatgtagcctcagactctaggaaagactggaattatgccaggtgctcagtgactattgtagactggataggaaagttgatagcaataaggtttagaatgaaaatgcagcagtaactggtgagctggtgacctatggccagaaaagtttgaaaaaggaaaagaatgctccacattgtctaaaaacacattcattactgggagggctcgatggaatcaggccctgtcagcagttactcattgctaagcccattgcagaaacatgggcattcagatccatccaggtggggccaggagggtcaactggactgacggcacattcacgaaggccataaactaagatgtctagcattatcttcaaatgagtttcaagtgaggtatgttctgctaacttgtttgtgtttataatttaactatgttaatttattgaacgaatttataaaatatattgaatgtacagaatagcttttgttgaatacacataattacatgtatgagtatgtaactggtgaagatatgtatatcttcaaaaggaagtggccaaggacacactttatctctcagaggctctgatgtcactctcaagggggtgcgtataatcacaatttcttagcaagagacagggtatagaattttaaacaaacagcaaactaagcattttagaatatgtaggattctcctttgtgtgatcttaactctttgtcttatctgtttttaatcctatggaccactaatgcttacccggcataaagtgaaacatattttggttgcctaagaagcaccacttccaagcatgtgcatgacaaaatgtaccaccttgcaccaccagtttagctatccacagctagtcctaactccctcatttctagatgcatatgggcaccagcctacccaaatctaattctatatgagatcgagtttcctgcagataattctgtttctattgagccaaataaactttacttgccaaaggaaaaaatggaacaggtcaatggattgctacctattctggttaatttccatttcctaaactctagcttcttgcagagtttaggcaagaagctggcaaccttggctgcgctttgaaatcatctaaggggcttaaaaaagatacagacgcttggatgcccctcccagaaattttgatttaatttgtctgagttgcagccggcctatccaaaatgtagtcagggttaagaaccaccgccctagtttcagtctcctcattatgagcatggggtcataattacctcacatacctcttgttttaagttcaaggagataatgtgtgaccttagagtccttaacactttcattactcctttgcttcatgaaagacaaataaaaaggaaggacatggggttggcaagtctgggaaggtgaggaggagggatccttctgcagagttcttccaatgagcagttcattagggttaacaagctatcctttgttaaagcaaacgctcttgagggattaagcctcattctcgccttagtgtgaatgactttaatcagataatctcctatcacctagttgaggatttgttaccgaaagcctaggggaggcaaagagagagagttgcaaggccagtttgggattcactgaggcaagccaaggaagcctcagcctctaggaaagaaacctgacatgtagtaagctttccataatgacagcatgaaaaatctgaacaacaaactttctcctcatgttgctaggacaatatttgttaaaagtgtttttctgatcaagcctcttgtctgtccaatagcctttcatgactttttttctgactttctttctgccatgaagctcttaacaagtatcaggtagttttaccatttgccagctgcttgggagtccgtgaggagcaaggccttgcccagtcctatcctccttgccatctgcttggcacatggtaagcacgcagggtttgttgaatttaactgaatggtttcatttgctacgctcttttccaactgtgatttttccctcacgtctgtccccaaccgctagactatgaacaccttgcaaaagacttaataacttctttatccccagtgccaagcacagcccttggcacataatcagcagtcaatgactatgtgttaaatgtattaaggaacaatagccagtgtactgatgcctaagttaagatattaaaattaatttatgactgtactgctcagttcccactcttttggacaaggcaaagaggaaagaagagaaaaagaaacagatatatgaaactcccaccatttattaatgggacaaatgttgttcttattcaaaggtctctttagaacatctttcgagacatgatttgaaggtaatttcaggaaactcagataggcaagaaggaataagaggagctaacaaaagatccacagagagaactcacacaatggaatgaaaagagagggatgtggaatatcatagaaaccaaaggaaaggaacctcaagaatacaatgagtaagtagatagatacagccaacatttaggaacattgacactgctattggcattgtcaaagattggtttacctttagaaataaataagacaatggccatattttttcatatttgttttctatatggaacagtgttactacgtagaaatgtttgggttacagtacataaaacagtttcactacgacatttatattaaaagccctattagatactatttttaaaagattgcaagggaattctgggctaaataacaacacagaattttatgaaatggtagaaagtgttttacaatattacatgtaattacatattataagcataaatagataatatgtcaattttgatcttctggctgtattctatatttatttttatatccgtttagtttattgaaagaccacgattgcatatttacttgtctttaacaacagtccatagtagaaggtacgcatacatcccaggtagagtgtttataaatatattacacattagacagatgaattcaggagcttggggtactggctgtgaaacactgtggggcaggaggcttgtcctcttgttagctgcaaggctttggtcaagggccaactctccagcttccattacctcatgaaaaatgaagattatatataaatgacatgggggaggtggcctttgttttataagattgtcttaaaagattaaatttggaaaagaaattgcatatatagtacaatattaactatgcttttaaaaatgcattggaaaagcctagaaggaaataaactgtaatacaaacagttccctatctctgggaactggaaacactgctgatatcaaaatattctaccttcactaatttcgaattttctatattgtgttgactccaaataataaataagtcacacacaaacaggcataccacatctcccttccctcaagttatgttatctcgaggatcatgagtcttatggcttctcttcaactctgagatgtaaggttctaaggtttgttgtaccccattgccgagggtcttcaaccaaatcacattccgctgctgggtccccagccatttgctgtctgttgcctcctagacagagcccacttttggtttgctgtcattctcagcagtggtggacttcatgcagtctcttctgagattagactatcagcctttacacagcagtcaagagttatctagttatctttgtgaaaacaaaatttagataatgttccatcaccccaccccacccctgcctctaacataatcaaacacttcaatggttcccagtgaggaaaagtatcatggttgtagctttgcattttgagtgtgattaatttgatggagattcattttttccctcttccttgactgtaagctccttgaggttaggtagtttttgttcaccattggctctctagccctaccatgaaccctggccttagggctcttgccatgcagtccccactgctttgaatgctctttccccagttatttctcacttcaccgagaaccttgcctgcatatgaccagctcagtcctccatcctgtttcacacaaccttctctcccaaatccccccaacctgctttatttcatagcgcttatctccatctgaaattacctcatatgtttatcttttattttttatttttgacttattttttgttgcttgtctccccctagtagaatgcaacccctttgagggaagtgatttatctgtgctgttcatttctgtaaccacagtacctagaataggagttagccatggctgatgctcaataaatgtttgtgaaatgaatagagtcattgtgtgaaaagtgttttctgtatggaaagaagaaagaaaggatgaaaaaatagaaagaataaaagaaggaaaaaatgaaagaaggaagaaacagaggaaggaagaactatactcttggaaatctcatgtagcacctccttacattaaactggggaaactgttaggcctattttagagcttcttcttgtccttattgtctttaagaaaaaaaaaaagacaatgaaaatgaatggcctgagagagtcagaagacactgatgtcagttctgctctgccatggtgccaagttccttaaataatgcactcctctggtttaacaagggaacaaggccagatgctctctaacattccattcaatgctaaaattctatgattttgaacttttaatttcaaaatgtatttgcttactgtctctctattgccagatcctaaaataatgatattgaagatacagattcaacttttaggtaaaataacttaattgagaaatgcataatatttaactgctttaaatttcataaacatttagtagcaaatatattgattttatatattttcacattcatgtgcaatatacgtgttatacatacaatatattgtattatatatcaaatatatacatagtatctattagaatacatatttttatttttaaataatgagcacaaagaaattgtgttgtgtatgaaatatataaaggtccttgaagataaactaaattcatgtaattctttctctcaagtatatgtattcaaatatctgaacaagtttgaattctacaaaagaaggtctcacctctctcctcaaccctgttgtgaagtttaatgtgataaatttaatgcatctacttaaacttgattctccatacaagaatgtttgcaacttttgattgccttttagagtcatcttctcttgaccatctatatttaaatattgattaggaagcacaggacatgagactaggttctggttttgacaccatctttcaatcaattatttttatcctggtataataaaaatagcattttaaaagagtatacctccttgagatatttttatttaggtgatttgtttgtgtgagagtgtgtgtgtgtgtgtgtgtgtgtgtgtgtgtgtgtcaggaaagacaagttatattgcagaggcagtgagagcttattgagctatgaatgtggtatgcagaagaagtaagtcacaattcacacaggcactcacacacttacataggtaccttaaatatccccattggactgaaaaagataaatgctgccattatctttatctttattattggtaaacaaggagctgacattatctataaaaaccatattccttaactgtatttttattgagattcattggtataattaaaacttgaatggactgaaatatttcaggaacctgcagtgaacactctttcctttatctgaaaatgtagtttatttcatctgaaattgttttctataatttccctctccacccataaatgaccttctttttatactcatggatatactcacttatgaacctgtagactatacacttcacagaaataggagaaaccataatgttctcctggcactgagggaatatcaatggtattctaaatgaggaactattaactttttattacaataatgattttttagtaatttccatagtttgaaatgtggttaggatgctactggcagttgaaagctgacaacatgattgaatagttttaacatgatctggtgtttgttacagtgctttaaaattttaaatattatcattcatgttataatgttatccagtgatagtcaattaggccaaatcagtggtaatttagtgttatatcacaatttatttggactcgagttatagattgaccattgctttgtgagttttcttagccattctgtttttctgtatctaatgtaaaataacattttttctccttttttatttaccaggatggttattctactgtttctaacattaaaggatcatccttgtatttctttgtattctgtcatggagtaaaaaacatgtctcatctcagtttccatttctcttttgctcccagaagtcccccctcctccagtgttgaagtagaaatataatttccccttttgcaccataagcaggttcaaaagtcctgtgtttcaccatgttgctccaaacagcaaattttctaacccacatgaaaaaagaacactacagttctaacttggaattctacaagggtttgagaacaattgaaaataaatttctaccactaggattagtccttagtggttcgcaggcattctaagcagaggggcatggaagctagctagggcaccaacctgctagcagatgcaaagtttgctctactaagaagttaggcctttaatatcacagacaatgggaggcaaaatgaagacataaaaaggcaagtagcaagcaattcagtaggctaagccagggatttgagagtctcccaaggctcctcccttcctcattccctgcatgagtcatttttccagtctgtccacacccattcacccctccatcccacactctcattcaccctccaagctgccgtcacaggaactttctgcaatacaagtccagactccatctctggcccttgctgcctaaactttcctagttcattagttttggcagtaaagttgagactcgttagatcaacacagacctacttttagtgtcatctcctgccactctcctgtactaccctaccctcgcttctcacagaaaggctgagaaggctggcagaccccttgtatataccctgctcctttcgttttctttgagacagggtcttttaatgtcacccaggctggtctcaaactcctggcctcaatcctccctccatggcctcccaaagtgctgggattacaggtgtgagccatgccatccagcctgccctgctcttttctcttctccacctggactctactcccttttgatcttgccaacttctacacacctttcaaggcaccagttaaatgtaaatcctccaggaacccttcctttgccatcctcagagccctcattggattgcttcccacatacagcacttatcccttatgcagaattaatcggtttgtctctcacctactagaggcgttatccttgagtgtagggactgtcttatccattcttgcatcactggcatagtaggcactaaatgtagttgctgaatgcttaataagaggaatggaagtcttcgtagcttggggtagatactaatgggcagatagaaagttcccatccctgttctctgagaaagtgtcagtgttcttttagtttgcttaaactgtgtgggtacttgagtccttttaaacgattaacgctgggaagaggcaccatttaattaattaatttgttctggaagggatcagtgtacaattttaactcagtgctttgtggatctagctaaaggtcaagaactaaagtcggctattagtgcctctggaagatatttctgcactttagcacctttctgatgtttttccttcacctcgagctggcctcactctcttcaacaaaaccgaacctgcaggaagaatgttgtaccatatccagcatttttgtcccaacaaacatgggacaaacgtttttcactagaatcatccttgaacaagttatccgaattccttacattcaaaggaaatcctgcccccagtctccaaaacttcatcacatcacagacgttcaggattctttccattcaaagcaaagccaagttacatcttatagcacccagtgaattatgatatggggctgcggtttatttgctctggcgacaatatggcttacttgccgtggaatatcccggtatttcagaagtaacatattatttttaaagagggagctttgctttctctaaatcacatggtgcaaagttgggaatacagtggcctgtaaattacaaatattatttacaaactagaaggaaagctgacatgtgtttgtgcctgtgtgacagtttcactaaggaattccaaaactgtggatagcctgttacttgagaaaaatacacggtggcagtcttgcagatgtttttcccgcctgttagccctccaggttcaaaaactgtttggtgcattttaaggcggcagtctcaccagatcgcaggattctagtctaattggcttctaaccttcaatctaaccttgccggcttccttgcaaagcccggtgcaagggcctctttcaaaatgaacccactggtgtgcctagcagtcggtagaagaagcgggagggcgtccggtctgcacgcccgccgcgaggttacaatgctgaacgcatgagatggaagataccaacgggaggccgaggggatccacggcgcccgcgcgggctccggcttcctcctgctctcggcgccgctgggcgaccgcccatgacccgctcttgcgggctctgtccggttgacaggcgaccctgtggcccggggaagcgcgggagggcgccggcggaaagttgaagagcgtttttctcgccgccgcgtgcattaggagctcgacgagtccgccctgggcttcctggtggggctgggcgggcgggggaggggccgcgcagcagcagcggaagccagacctcggcgataagaggctgcacagcgacatgcaacagtcttttcactgcagctgaatgagttgtggcgcccacaatgctcccatgacaaggagctgacaagttccattttccgtcgcgggcatcttggaatcatgactcccacaatgccttgggcacttggtcgacagtggggccgcctctgaaaaaaaaatgtgagaggtaagtttccattttcacagtttccccgcgccgcttcattgttcggactccggcgggtctgcccgtggctgaaggaggaagtgcgaggaggtgctcgccggccgcggttctcccgggcaggggcgggccgctcgcggtagttggtttcgcgtccctcagcacctcctgcccgggggaaggcgggagggtgagccgcagccgctcctgcgcccttccctgccgcgggctctgcggacgctgtcacggcacagcccgcgcacggcttggcagcccagcgggacccagggagaaacaggggggcgagaagagaaacaggtgcgtgcaagtgtactcacaacttaatgacctttgtcgggggaaggtgtgagtccctctgagtcgagcggcgcgcgggtcttcccggcggctcccgcatccctggccccggggctgccatcccgcccggttttcatctgggccaaatatgtgcacgcaaaggttaattctctgcttgctacccataaattacgcatgacatgtttagctgggctgccttatatggagagtgctgtatttcaggccagtttgccttttgccaagtttacagggcggaagacgccctgtaggagagggctgcctcctccttttcttcttcttcttttttttttcatcgttttgtagtgcgtcactcaaaaactgtaagaaaagtaagtatagaagctctttgggtggagccgcagttggttgaattgctttcatgaaaggttgaaaagaatgaaaagtagttagtacttgggttctggtttttagacaaaagcaggacaaatatgtagccccccccccaacttttttttttttttttaaacggagccggaatctgttattggtagtaatgtgtcatgtgagaatactttgattccagagcctgtaacacgagcaggtatatggtggcgcttatgccttcccctcgcacagcactttacaactacaggggtgttgctgccagagtaatattgtattcttaaggctctctggggccgggagagtatgcggctgttgggattctggggtgtatttccgtggagtatgtctccccaggattaaagttaagaagctgccggaaaggttgttgccgctgacttcactttgtgtgcccaccagcacaggcacaagtcatagcagatggatggcaaactctgccatatactctgaggagtttcttaaattaatacgctaggagagaagtcataattaatgcttttagactttcgagccctctgcagcgtgctttgaaatactacaccggtggacactatgtcccttcctcctgggtttgaacacagtgtctgtttatacacagagggtgtttagtacctaagtattctataccagcacaagagagccactccacagttatctctctgtgtggattcctaagtgtgttggtgtttctccttgctgttgagataaaatattatcacccagagagaaaatgaaagttcaacgactgtaaaatttatcccaggaatgtgcagttcaatacttagaatgtcttagatgtagttatagatagaggcactgaataagttattttgtagcctgagaatgcacatcgctgtcacttgtatcttgctttcttaaagttggtgacaactaaggctaaacttctttagaaaacctaatgttctagtttttatctgttttgtgtatttgcatgggagttactttattattattattatattgttaggtcttctttgaaaatgtaggcatagcttttttagtcttatttgtttaatggggggtttccttgctgaagactacaaaagttgccttttgtgttttaaggaacaggttgggtcagcaacagaaaacctgttcatctataattatagtgtcacttaagacataataatcagatttcattattactaagagactcagaaaaacctcacatatgcctagtttaatttttttccttatgtaactgtgaacaaatttgtgtgtagatacacatcaagtgtggtactctgcgcagtcatgccaaagagaaactgaagtgttatatggtttgagatattattgcttgtgtttacatttccacatttgaggcaaagttagactccaagttgaattcattaaattttgattccaacattctgttcttcctttgggcacagaattcctatgaaatgaaacactgggttttgttccagaacaagaacagactaacccaaaatttctcctgggggaaaaaaaaagagtaaaattacatttctcattgaaaattgtatttctcattgaggaagggtgtgttactttattatataaaatgccttatcttcattataagaaaaaaatgcccttgcatttgtcactgttgccatacattaggcctgtatttgatagatctatatggaaacagagaataaataatcttgctgcaccttctggctttctgcttggtgatagatgtgcggattagagaacatctcaggtcttggttaggagaagctgaaaagaataggtgattgggtttttaaaattctgtatgcaaaggcattagggtgggtagtagatatgagagtcaaaagagtggaggaaagaagtgaaataggttcacgaagtgattggcccaaaataaaatcccatcaaccatatggatcatagagaatgtgacatagaaagattttaaagtgtatggtttttttaggccaaaaagcttcatatgtttggaaatctagaatgtgctgtccagtacagtagccacatgtggctgttgagcacttgaaatgtgtcttgtccagattgagaagtgtaaaatactaccggttttgaaaactttatatgaggggaagaaagtaaaacatctgattaatatttttatatttatgatatgttttaatgataatttttgatatattggttctaatagaagatcttactagattaacttcacctgtttcttttctctctctctctctctctctctctctctttcatggtgtctagaaaatataacaaatgtggctaacatcgtatttattttggacagtgttgttctaggataaagcaggaaaacaatattctgggagaaagcttaaagattttgctggtcaaaacaataaaattggcttattttattatacatagaaatacctcgtctttcttatccattgtaaccaaaatttgagaaaacacaccacctaacatctatttttatttcctcaaagctgctatttagtttagagatttgatggtgaggtagtaataatagagaaaaacttataattagagaatgagtcttaacacctctcaaaggccaaaatagagtatgattgttacttaggaacattttagagacactgtagttatcattgtcctgaagttaccaaacataaacgagtcactaaaattattttaaaatagagattttagtaaatagcaattatcttcaaatacttaatatgtgttttcttttgctagaactttctttagaaagttaaaaaaaaaaacccatatccaaagtcctgagcaaatgttaataaaagattgctgcattcataagaatgaaagatttttacctgcagataggagggtattgttttgaatattagcaaaggtgaaaatgtgtttctaacgtaacattatgggctctgaagaatttctatacatggagacactgtctttataatttgaacacattcttgagaaggcatctgactggtaaacaaagcacaatggcataggtcctggaaacattcctttcagatattttcataactgaagtacattttgccattcacagtgagtgttaagctgaaaaaaatgtggttcttttctagccatataaagtatgcttactattattttctcgaaggatgccaaaaaatgtaaaatggatgttgtggattcttcgtggggaggttagctagtttgtatatagagcctcaagaagagttgcctcagcttggtgccatcttgagtctgtcttccactagatgaggcatagcttccattagtgtcagtgcgtgtgtggagggtgaggggaagaatgatccccattaactttgtatattgtttctgatgagtcatggagcatattcactaatggttggagaattattgattgcaaggcagaggattcaagaagagctattggcatatggcattaactgtctctagacatattttttatttttaaatttgaggtagagaaatcggtttttacgtagtgtttttcatattataaaaaataaacgtttatataagcattacagatacatccttgaggaaaaaaatagtaaatacatggttatagttttctacatattaccagtttttttcataacagatccagaacatctctttcagataatcgttcatgtttttagagaggcatctcatcatatgtgcctgtgaaatctgtaaaaatatgtgtaacacacatcttgaaatatttgtgttaggagaattaagtcttacacatttggttctttttctactgtttttgattatgttctctaggttactatgattatcttttgttaaaacagttcaggaaatattaatctcaaaacgaaatgtagccatattggacagagtagagaattgcttttccacagagaccagttattccaaaaaggtgaagatgtttctgaaataatatcatgctcatatgctccaaaagaaaaaccatcatctcttttgacattcttttaggaaactgagagatgtatgttttatataccaaaagaggtgaataatagttgataaaggtatgcaaaatacatactcctgtgaagtgtgaacatacaatttgtatgtaacgcatgcatgagcatataactttccccaagacaatgccaatttattcaaatcacctgaatgttaaataatatcatactattaagaagaattgtggtaaatatgaaatctaaataccagtgatgatgtccatgctgatgtcaactccattccagtcctgctttagctaaattcacaaaatgaagagatgtctttctccaaagtagttttccaaaaatttgtatttgacactggattttttcctacgttttcacttttaaaagtttagaagctattaactaaaaatgaacttgttttagagagctaagaagattctagatttatggggacatatttagttctatgaaataagcattacgttgctgacttgaaatattattctatcatataaagttgatttataagtgaatacatattgtgaaaaaataccacagtagacttagtgaaatctaccaaacttaatcaagatagatatacgttgtcctcaaaaaaataagaatctggtagggaaaataagagcttcgaaaataactataaagtagaaagtgatatttaataaacaatggctgggtaacatggtatgaaagttcagataagggaaagtcttaagataactctgacttgacccacatacatgtaataaagggaacagtccttaaatgcataaataatgggaacaaaaggtattcagtatttttcagccttagcaaaatattattctgttaacgcagtattctattcagcaatggttccatattttccatatgtttatagataacattcagatatcgaattttcatatatgttttaattcatttatttatttcttttatctaggagaaatataatggtttccaaatgtcctatactagattattgatagattttgtcattagttttactattgaataccatgaaatatcagctgttgcagccactaaatagttacaaactgttggtactacagtttactagtcaatccatggttatatgcttgtgctatgctaaatataaaggattcaagatgaggacttaagcagttcatatttgtatttagaatattatcaaagatattttcttaacttgtctcagtattagaatttacagcccattttcagcttattgtatccagaaatttcaatcatatccaataatttatcagcatttgttgatgacagtaaaagtgacacattagcattttatttgtttctgtgttgtttgattacaacagtgacattttagcactctttgtggacggataactcttctagtagaaagaaagcaggagggtggtcaagctaagtgacagatacaaagagttggaggacatagggctttctgtgggtaagaaatggatgagaaaagctttatgtcactgactaggcttgcaattcagtattcccctatcaaaggcccccttactgatgtttctgtttaccagatcttggtttcaagatgccaggttctgaagagatacaccacgagttcttataaacactatatctaaatttggtttgaaagtctaatgtttggctgtgtgcagtggctcacacctgtaatcccagcactttgggaggccgaggcaggcagatcacgaggtcaggagattgaggccgtcttggccaacatggtgaaaccccgtctctactaaaatacaaaaaattagctgggcatggtggcgcatgcctgtaatcccagttacttgggagctgaggcagggggattgcttgaactcgggaggcggaggttgcagtgagctgagatcatgccactgcactccagtctggcaacagagcaagactcttgtctcaaaaaaaaaaaaaaaaaaaaaaaaaaggctaatgtttataccaggcaggtagaaaaacaaaaacggacctcattagaggatacatgaggtttctaaaagtggaactcctttgtaaatgtaagaagtgatatcaatattattattattttaatatacttattttgaagtaactaagtttttttgtttatttcttgaaagaaacaatagattggggaaaaaccatttactcttttcatgccctagtttctaaatctgtgacattataaaggtgtaaatatttatgaaaatagtagaagttgccactggctgtattcttttaagtaaggtatctcatttaatcttttctactgtaaagtagccgtaaagtaataagacttttaccttaaagatcatgactagaacaattttttcatttgcggagatatgaggcttgtcatttttattattccaatgttcatgtttttaaccaatttttcttgtcttgcctccactgattatatataaagaatagcgatgagaatatagctgtaattatgattactaacatctttgaatactttctgtgtgctaagctaaggtttataattaattcatttattcctcagaacaaccctatggtataggtactgttaatattctgattttacagataggggaactgaagcacagacaagtccaattaattgtgcaaaggtacttaattaataagtagcacaataaggagttgaaccaaggtagcccagctttagaatccatgctcctgtgtaaaagaataaaaacagattttaaaaatacttattttggatgctgataggagcttgagaacataaacgtttggaatactttaaaagacttgtactttctacatcatttgaagagattccagaagaatgggcagaaagtaagaggatagagagaaaaggcctggggtgaggggtgggaagcattaataggataggaagaaatgaggaatcaggtgttcaagggagattggtgctacacttttgaggtcattgatgaccagctagtaagtttaataatacgtagtgtggaacataaacagacacttggtgtttagggtagtaaccttacaggagttgtgttttggtgacattttataggggtaggacacatatagaatgaagtagagattgtggttatacagaacagagatgagggactagatgaggggagtggccctagaatgaaaaggaggacatgtatgctgagagaaatgtgataaggttaggctgcataggatgtaccagctgactggatgtggatattaaaggcaatgggggtattaacaattatttttaaaatacagcaagaatttaaaaaacttttaatcaatcaaaaattccttatttaagaattatataaaatatcagtaagtgaaaaacatttaaaattgtattttatcagggattataacttaagtagaagatacatgttaatttcttaaaacatttcatttctgtgctaagctctttcaaagcactggatggtgatctaaaggtcaccaaattctttgtcccaaattggtaattttaaagtaaacataatttcaacgttaggcctattttgttatttgctgagaaatgtctcaatgtcaaccaggcagttctcctctcttattaaagtccatgctcagaatgcctgtgtaacctatccttagtgataaacaaggtggcagatagatacatgataaaacaagtttgccatgtgctcaatgtggctgacatttatacttctcagaccttgctattttagggaaggtatcagtataaccagggcattctttttcctggaactaaaaatccttaataatcagtcactattataaacagaatgatttacatacaggaatcaataaacagttgcttttggttaatggttatctggagtaggaggatagttatatttcaaatagaatagaaagctttattggaatacttacatgtctttttagtttgaggaccttacaagctttttacaaataaatggtttaaaatagtttaaacagaaaatgtcagaacattgatagattatgttttatttaatatacagagaaaaattcccatgaaataaagacagttttcaagaaaaatattctatttataaatatttacaacttattagttatttagattgcccgtgtccataaaaataatacagaaattacactatttatgtctttaaatatagcatgtttctataaactagagaataatgttgacagtattttattttgcctttgttagtattatgtgaaagtcacacttattacatgcctttttctattattagactttttttcctatctagtttttgccttgtgctatacagtatggtgaaaatctatttagctatgtcattaagataatgcttagaaaatgctaatttttaagtaactaagattaagtagtattggatattctttgccttctttattattctgtcattgggctaattttaactagacaaatttattccaaagtattttgagccattatttgaacttcattgctgtaacattcaggaaaaactgcattgtctacctagtggcattcagataaggcatttggtcttaggtacctcttccaaaagacttttaagaggtttgataagcatagcaaaagtgaacgacggaggatacaagaaaatctttgatccaggagtagtctctctgaagcattgcatgacctttccaaaaaataatttgagaagtgcctaacaatagaaaaatatatattttttccttcaataggaaagactttagaaaaaatatactcaagtagaattctgcataatgctttctgggggaccacatttgctgaaaattgcctacgggaaatgactttctcagagtgatatagttttgaggactgagattttaaaagtaaatattttattgggagcaattaatttaggaagaatagtattatgcctattcctctgtagttgattaaagtttactaagtgctgaggtcttttcccttaaaacattactttgccatgttaacaatcaggtcatagaggaatgaattcatcttttgtgttttgctaaataatcagttaacaaacatattctgagcacgtttaaagtcaaaggattgtagtaggtcacaagagggagatcgaaagtataattacatagtgtctttccttctttgacatacaattgggttgaggagaaagacttgaaaacttaatgcaaggcactatacaagttagtaccaaaggaggaaactgaaagagggaaggaaattcaaagaaggaagtttttgtggaactgaatggcaagggaatgctgtggggaagagggggcatctgtcataggcccaaagattaagcactcttttcggaatatggagtgacatagtaagaataaggtggaagtagtgatgaaagctaccatatttgagcagcgtcttttctatgtgaggccttgctagcttatgttgtttttggaaaaaaacagatagacaacctggtagtgatagtagacaatgaatgaattgggccggtgagtcaggaatcatcatcctcttagaggacacagacttagagaaattatcttatttgcctaaatccacatagctggtgatcagccgaactgaacagaagccaggtcttttcatacttcaaaaccagcattccccaaccccatccctccccatcccatgattctgttgggaatgagtgtggcatgtttatgacatagtaattttaaaacttcacccatacaacaactgacataagtcaagaagatagaaattttatttaaaaggctgtcaaatgtattttcatcttttttgctttgatgatgggttacaaatagcgtatcgtttgacaaatgcttatactctgtttcttggatttgtaaaaaaaataaaacaaactaggcctcccatcttcagtagatatggtatggagttgcagtatcatgatgttgtaacagtgcatttcgcagtaggtagacccatttgggattccctcagaggaagcttgtgaagtttgaagataatgtactttctcaccaatagtatgaggctataaaattttcaccaagaaatgataggggcaaaagtttatagatcatggttgtttgattattttatgcttttatgttacatcatctaatttatacatcagtctctgctctctgtaactttacatgtgatgtagcctgtgactttaaaagataagctgttaattgtagagttgtgctgttggagacctgtcactttgctaacaaattcctctcttcatagagctatttagaacatatggcaaataaaattatgtgattatgtgtttttagagaaaaatttatttatataaaatgaaagtctttgcttttggctgcaaaagaaagcatccttaatagcaaatattgattgcagtgccagtgtgccatgtatcatgctataccctttggaggaaaaagaggtaagatgtgcctgttctcaaagtaatttccagtatagtgatagaaatattcacaaataatggacgggcaaaacaaagtgggcacaaagaagccaagaataggctgtttgtgggcagagtgtggaatttgcctaaaaccattcggtagacaggttaactctttagatactttgtatatattggagaagagacaaaatcaactcataatttattaaaatgatgtgatttgatatgtacaccatttagtttttctgttcaagtatttggtaaataagtgtgatgccagcatagtatcatcctggactagacagaagaaattaatttatttctgatgctggcagttttggagaaaggtgggcacatacggttcatctgaatcttcctcatgctaaattcttgattggaagcaggttaaaacactcaggttaacgtttatgttaacagaaaagaaaaatcagtcagagagaggtgcgttgtatttaacattaatgacagagaattttaaatatgcacatgattctctttttcctccagcttttctttctgcacaggaaataaagctgtattttgtaggccagcttccagactttgaaatggtgaaagtgcaactgtgcatattcttctataagaccccattcagctgtgacgtgttgttgtttccaagatttaatctgcattctagtttagaaaattcaggattttattgcttattattattcatttttattcataaatatttgtttaaagcccattacatataaagttttactataagattttaattgaaatttttaagacaaattaagaatatggtttctgattttctgaagtttatggcctatagaaaaaggtccattcataagtgaaataataaaagcaaaacaacaaaagactcgagctttagccattctagtaattattaaaatagctactttcttcgtaggaacttattattttacatgtgtgatcccatagctcttacacaattctgtgtgatttaggcattgctatctttctggctcccaagtgagaagattgaggcttggaaagattaaggttaggggatttgctcaagggtcatatgataaggtactactgtgagagctgagatctcaacccaggagttttgctgtttttctgcttgtttatttccatcagtatggtatgaattaggcacacaaatactcattgcatgtagatttgggacctactccaagttaattctggaaagactcagtgaagaagataagatgtggaagaggttttttttaagcattatggtcatgaaagagcagactatggaatggactttgaagtttcactagctttgaaaggaggggtatatcaaatggcctaatctgcctgtgtggtttgctcagtattagttctactcatacctaataccctctgccccagcactcgccaagatcagcaaaatctacttttagactcaaaatcattaccacctgtgaagtttctgatgtcgcttctgagtgacatagcactctgtcaattgctctgttggatggctttgctgaatggcaccttttaagaagtgccttgagccccaaaagagtttcaaatgctcttgtaatctattcagctgcattattgaagatattagggtaattcaattcattttttcatcactaaaacatagaaatctgttgccaacattaaaatagacaaacatatcattgaaaatttaatagctctacattcacttggagatttccgataaacttttctcactttcccccaaatccttaataattagagcatgtccatgtgtgtatgtgtgcatgtttttgtgtcatatccctatgtgtctatatatatattccataaatgattgtgaagtggtacacaagttgtagctaaaaatgaaatagaataaatgtatgaagctaagggatccattctccaactaatgcgttagttgacaaatttgctctgaaatattgataccattttgtggttccctgtattgaatacaagtatgggcttgtgaaaatatagtatccacagaccctaattagaaacaaaataaaggtattctaatatacctatgcaaatttaaagttttaacttattcatataacagttttcagcttgtcagtgacctgatatcaatggatttgaaaatgattttacctttaagtaccaagaattcttagggacatgtgtgtgtgtgtgtattcagattaaagattccatgctaatatactaattttttggcaagaaaattaagcacctgtatttcagtttaatagtactgtggtaaatgaaatatattaaacatgcagattctgttacattcacctaatattaatttgaatttttaatattctaggcactgtgctagatattgaatacataatggtaaacataaacagatagtaaacagttataaaatttagacatctctcaattttcaaattggccattgcagaaatagtgacattttattaggttttgttgccacaagattttcaataattaaaaaaaaattatttatagatgccagtaaatatttattttacagcatctagatgccagtaaatatttattttacagcatctaccaatgttagatttactatgcacgaaggaaggattttattttcatgtaaagaaaaatgccattttatgcttagaatcaatgctttacaattaaacaagagaaatagcatcacaaaataatacgggaagagaaaactcattttgagtagcagcaaaatattgtgagtttaaaaggtcaggccagtacaggaggctccagttttgccactcactatgcagaatgctgtgacagccagggctgatacagctgaaaatatctgcagctttggaagccttgtaagtttcagaaggtcattttggcatcatgataggagcacagattcacatggaaggtcaaactggacagccaggcaggaagataggttgctgaacccagtgcttgtagattttagagcaatcaccaactgcagtaactgagttttttaattcaatgcagccatctttcattgtaatgtttattggggaatgagctttacttggtggggaaattataaattaccttctctcttctgaaacctaagtgttgcatctacaactttccctggtatcaagacaaatgttactttaattttatttacgtgtgatatataccccatcaagcttacaaaagtaaagtgcacatcagataggactgttgttgttgttggtggtggtgtttttaatcaattagaaggcaaagaaatgaaacaagtacttatgatgaaattgagcactaaatttatctctcagcttcctggcaactgaagcagaagctttaggaagtgaaaaagtcctgagtttatttaataagatttcttcagatcccatacactgtcttattcttagccctttgggtgtttagttaaatatactgactctgcccttgggtgaagtcttgaatgggtgaattccaattactaaaaaagtgaaggctgaattctttagcctgcctttaaggcccttactgatttggcttcagcccaaagttccagggtcatcttctgccagccccattacatacaggtgttccatacagaccagttcttccagtgttgatatgcagtgctttcccacatccctgccattactgtctggatttctacagtttggatttctactcctttttgtctctaaccaaatgaaacttgtccttccagaccaaccttccatttcttatcccttttgaaactaaccttgacctctctctttaacttaccaagctttcttgttacctctactgtgtacttctcgcttccttttttatatatagttatttgtgtgttagttttatacctttaattaaacatcaaattcttaaaggctggatccaagtattctcgctatatctaggctacatataaaaggtggtcaatacacagttaatataatcaatacacatattttatgtgtattatatattgttaatgaatatattcatttaataaagttactgttgaatgtatttgaatttcttgaaggaaaacatttcttttcctaggatagtagggaacaaagaaagaaaacctaaaaaaagaagcacaattagagaaacacactcctgtaatttttctcaaaggaaatattttgagacagcagaaccaagattataattttttttaattgttttgactttgggttttctttttataagtcagcttaatatttgtgatttctctgtgccaaaaagtaaccaatattaatagagaacagctttagtacatgtaaaagaaaaaaatcctttatgtcatttcaaaccctcagtgctttctttctgacagatttttaatggttttatcagctgttaattaggttggtgcaaaagtaattgcagttttaaaaaaagatcgcaaaaactgaaattacttttgcaccaccctgataaaaaattggcctgactatattgctttgaaatgtttcagacagtattctgtctccttcattgctcttcagatactgttttagcagtttatctagatcagtcttactgtgtgcatagtcagcatacatcagttttatacttttaaagcggcattgcattttacctacgtggaagttttctgcagacatattttaagcttctctaagaaaagctctgaagaaaatgtaggctcctgttgctcggagggctgatgaataaatttaaaaaaatcatgctcaaagaccacttccttgacaattaatctttcaaaatcagctacggagtatctagaacttcataatctattcaaaattgattaacaatcttaattgagaagacatttgtatctgaagtgtagaattttcttgtctccaggtatacattattaatgtttagtgtctaccccatggacataaaagagcaatagcatccgttctcagctctgtaaaagagaccatcttatcttctctagaatcaatattcaggggtttctccttcacttacacacacctcactctgagctaaccacaagcaatgcagtagtggtacctccaataaatcccactcaccccctatctctctcccttcttttggcttctgttgtatatattagtagtcattgtcatttctaccaagtttggtattaaattgctagcatgtatcgtgtatcgtgaatgaagttttacatttgaaatcagaagagctgatttggagttctggttcttccatttatttagcatagggattttaatgggtcagtcacttaaccatgcaagcctcgcctcaatttatttgttcacaaatgagcaaaataatataaccaaccatctcttagagttgtgaggaacaaatagtaattaggatgaaaataaattgtatgtcaacatataaaatattatttgctatttttgaataatagaatgtataagttgttgggaaagtaaatttctatgcttggcttcttcagtggaaactttttttttttcaattttttttttttttttttgagacagggtctccctctgttgcccaggctggagtgcagtggcatgatctcatcttactgtggcctcccgggctcaaacaatcctcctgcctcagccttccaagtagcttgtactgcaggcatgcaccaccatgcctggctaatttttgtattttctgtagagacggaggtctcactgtgttgttcaggctggtctcgaactcttgggctcaagcagtactcccgccttggtctctcaaagtgctgcgattataggtatgagccactgtgtccatcctgaaacttttttttttttaattaaagaaccaaatgaacaccttgcagattttatgtataagccagaaagaaagctcagtacatgtatagaatgtagcacaagccaacttttcaaaaattaatctttttaaggggcattatgtaatgaaggagcatacatttttagttttatccaggataaaagtggttctttttcccccattaactttaacacagaggttttactttaatttaaattccaaggactaggtttttgttgtatatgaagaaaacgatttgactaaatccaatgtaaatgtttttccttattctttgggggcacacacatacacacattaatccttattttatattttatttataatataaatatttaattatattttatttataatacaaatatttaattatattttatttataatataaatatttatattttatttataatataaatatttaattatattttatttataatataaatatttgtattttatttataatataaatatttatattttatttataatataaatatttatattttatttataatataaatatattttatttataatataaatatttatattttatttataatataaatatattttatttataatataaatatttatattttatttataatataaatatttaattatattttataggttgaataggttccttgtttatcttttttgcaaaataattttattgttataaattgttcttattataagcaataaataaggaacctaaatatcacaatctgtaaagcattttatttgtgtgtgattttatatgatagttcattagacattagataggaaagtatggaaagttttgagattgctacatgattgctcttttaatttgtccaatgtattcctttaaatgttgtgagggatttttttaccagtgaagtagcttttgcatgctaagttgtagtgaactgctgggcagaactaaaacataaatggtttgaggcatgattaatagttgtatatggtggccgggcgtggtggctcatgcctgtaatcccagcactttgggaggccgaggcgggtggctcacgaggtcaggagattgagaccatcctggctaacatggtgaaaccccgtctctactgaaaatacaaaaagtagccgggtgtggtggtgggtgcctgtagtcccagctactcaggaggctgaggcaggagaatggcatgaacccaggtggagcttgcagtgagccgagatcacaccactgcactccagcgtgggtgacagtgtgagactccgtctcaaaaaaaaaaaaaaatggttgtatatggtgtagtatcttagagtgatgtgcagtggcatgcatgatttaaaataatattaataatcataacagagcttttttgtaacattttataagcatactaccttgctgaagtagtcgatggaatataatcaaagattgtgtcaccaaatctttaaacaggacattttatcagagaagatactctggtttcttaggtaaagttatagggtagaaacacagtaagcagtctctggtaagaataatattttagccttgattgattatggttgccaaaatttaatggaattaaaaataacctgggaaaacatagattcctggtttctatcctcagtaggtctagggtaggtcccaggaacggtatatatttttaatagttacccacgagtcactgattcagataatccaataatctttctggagcatcagtatcccagagaaacaaatgttgccgttaataaacaatttgcagttatttcagtttattagctagctacgattgcattctgatttgctgtggaaagctggtcattactttttaagagcatatgatgctgatggaaacatgtagagctttaatcgctgtctcattaaaaggatgtagtttattctttgtgtttccttatttgttacagcttttccagaatgcacagaaccttatgtgcaattaaaataattaagaaaaagatattgttttctatttagcaaaggaactaaatctcatgctcccttatagtttctgttcaatatgcattctcttttgaaagtacaaatttgtaataatacaatttttgatctcgtctcccaagaagcctaactttatttatactctgactacacggtaaaatcacattgtcaaaataaaagcgttggtaatgctcacattctgccaaccaaccatatttgaagtcttttaaaaattcactttcaggtactttattctgtagactgttatttaataactaagaaagagagtttgaggaggacaaagtgagggcggaatgtttttattttccaagaggacatacatgcaaaggcataatcatataagagtatatacctatcttggttattttaattagaagtgcatgctgcttcagggagactccccactcctgactcaggaatgactgcgagtggaacccccgcctcagggaaaattactacatgggaaaatatgcttgggcctacatgagttttccagagttctcttgtaccttagctagtttgataatgctttgcattatgtatagcagttgtcagaaaccatttcctttaatcagttagcatccaaaaaaggaaggggtagcagatattttctgacatttgtagatataatgtattaaaaaaagcattaccttactcttatgacatagtgttgtcagagatttcccaaatacaacatgccctgcagattcttaaaactacacattttccttttgttaataagaaaataacagtaaagtatttattgtctattttgataccctgtcaacccaaacatgtattccaaattccagcctctgtttctttgtaaataattacaaaatgcaaatactatgattgttttaggaatgaaatgccatgttttgatgcaacaggagttgaaaaactgattttacaaatgtttccattgattagctgctatatgagggctaacagttgaaaatattttggaaaaatacaaaaacaggctttcatttctatttatagaaaaacagacatactttttttgcatgttcccacaagagaaatttacagtgtagataaagtacagcataggcttaacaaatatagaaaaatatgttattgactcttggtggaagtacatattcgtaaaggttttcttaaagttttttattctagttcaaagttaatacatatatgaatacacttcatgttctaaggatttatattattaaaatcactcataagcatagctttttatatgcaatttcagcattgattaaaagagtgaaaaatgggcattaacttagttgactactgataacaaaatggacatatagtggagtaatatataattgttaaaaagtaattatattgatctgtttctattgacatagaaagatcattaatatattttatattgtggaatattaacataatttgttgtttaatctctggacctagttagatatgtgaattatgtgaaaccttcttccaaggatatttaagttacattgaagtgaaaataggagttgtcaatgcatgtctttgttttgtggcgtatcttagtcttttaaaccagggaaaaacaactgggtcttgagtcagtgttagtcagtgaaaacattattcttgtttgtgagcatatgtgaatttgttatttttttgaaaaaaagtcaagttaaactgatatatcttgttatgaagaatatatattattatgaggaatatattcagttaacattggtatattttttaaaagtatgtttgagattatttgttaaaaagtaatccttaaggtcagttgtataagtcaatagaaatatccataggattgtaatgttaaagtgtgtagcacctatgtggcttgagtatttgtaagtttggaataagaaatatgttagtgaaataatagggacttttactgattatatggaatggaggaaatatttgtgtattacgttgtgtcatgagaagttcactaatttgtttttttaggatacattcgagcaattccatactcattcgtcattggttttagtcattgtattctgaaaaataattattttggtctttttatttaattataggcatagatttttctatactttttttcataatgattaatagttaaatcacatattttgggccatattcaatataaataagctaatacaattttcctgattgaggttatcacaccaggtttaaaatcagacatttggaaattcaaattctatttgttaagataaagcttctgtggtcagatttagtgggtagtactgagggcaattatcacattaaatttttagaaattctgaacagtgtggcaactattaagtttgatcctaatgagatatgctttatattttgggcaggtttttttttaaattatatctgtcatttttttcacatgttgattttgtaatttatcctacttgagtctgctaaaataggaaaaaaataggttaattatggagaagatcttataactattggttgtgagaatgatttctgtgtgagagggaaagttggaatagaggggcaaagaggtacaaaatgcagcagatttcaccaatgtatgaggtgctgtggaaatattttcttagttctgtgatcaattaacttcatacttatttttgtgttgtgcaataatgtcattagggatgcacagatgaatttgctaccattatttaagcagtgaacatcatattttaaatgttttaggcagaggtgccaccaacctcagcaagaagcttggtgatgttcagaagatatagaggttaaatatgaaaactatgattttggcccttagttactgtatcaaataaaataatactcatttaagtaagctttaggatcaaagtctataatcaggacattgtaacgggaataacagtattactgtgtgttgcatttcatttagcgttcacatttttgttgtgttagttctacattgacagattcgggttgggtcactgtaccattcttcctgaaaattgccaagatgatgagatttgatttttctaccatttagctcttgagcacataacagcattttaacttttgctgtagtctgtgttctgattccctatttactattttgaaatattaaatgatatggacagatcagatatgtctacctgaggctaacaagatgatgtctttgtgtaatatataggtaaataaaacactaattaggagtagtgctttctcttgtagaacaattaagtagcattcacagttttatctcattataccttcttgtagaaggaaatgttaaaatacttcctctttgaatagcatcagaaaaaatgcagtgtttcttttgctggaattgaagactggttctgtcagaatttcacagataattatttaaatattttaaatttgcatagccacataaatctgtttcgaatattccatggctcaaaatatctttcttcaacttcataatcaaggaggtatttaaatatgttgctattttaacttcatcgcctcatgttctctttccaatgagtgacgtttgatgctggtttcattcacttataaaggtgacatccccaatatactaaaccatatagcttaagcattgtaatttgtcgaaaatacaaactagtctgatatactaagaaaaatcttcagttataccacaaatattaattgttcgtttcctctgggccaggcattgttttggtgatctgtttctattaatggagaactagtgtaaccactgccttctctcatggagcttacatttttgtggcaaaggcaaatgataagcagatagcgagataagcgtgtaatattactctgctttcttcacagtactatgtagtattagatggggtttttttgtttgttttgttttttagacgaggtctcactctgttacctaggctagagtgtagtggcttagtcatagcttactgcagtcttgaactcctgggctcaagcagtactcccatttcagcctcccaagttgctgggaccacaagcacatgccatgccatcatgtgtggctaatttttaaaaatttgttttctgtagagatggggtctcactgtgttgctcaggctggaagtgtaatgttatgtacttctctcaaaacgagtctggactgctgttgggaggaacagaaggttgggtgctttggatggtggcctgaaaatcttctaagaagataactttgcagtagggacttggacgaaggcctattggggtatagagctagtatgcaaagtgcagtgattcattgtgataattatcttctagtgagcttaaaccttttacatttttaaaaattttgcctgatacaggaattaattcaaaattcacttttaaatcattgtctgtatagaagctttatgttctgttttgtcctaaatatgaatacttaaggatcaacaatcattttctaattggaatacagtttagttgccactggaattctaatctttggcagtagtgtgtcacctaaccgacactccttcattatccttcctacagtagaccactaggtgatttagggaaccaaactgttgaatggatcagaattctaaaagactgcttcgacagagcttagattacttatttgcgttagtaaacacaatcttcctttcttggcagcagctagtctgaaatgtggcagaccagcaggccacattggcagtctctatgccattccagaggatgtgtgattgaaagttatctttttctttgcagtattgttaaaacttagtcatttacatatctccttcatgattttcatttatgtgtagtctcttaggtatatttgtgtgtatatgtatctattctttaaatcttttttaaaaatttatttaattaatacttttttttttttcagacagggtcttactctgttgcccaggttggagtgcagtggtgtgatcatggcttactgcagccttgacatcctgtgctcaagcaatcctcctgcctcagcctcctgagtaattgggactacaggcatttgtcaccctgcctggctaatttttgtattttttgtagatatagggtcctactatgttgttcaggctggtctcgaacacctggcctcaagcagtcctccacttcagcctcccaaagtgttggattacaggcgtgagccacggtgcccggccctttaaatttgtaaattaaactttaatttcttcctaagttataatattgatgtaatcacagaccggacacactagttttagcattctaatccatctgttaaaattatgttgtttgtgcatcacctgaaattgccatgggtactgctggtagtgtgcttacccctcactgagaaatacttacctctgctttttgctatgtggagttgaatagtgctgaaggctgcattaactcgttcagatggcagttcttcccatataatgtataacatctttgttactctacttagcaccttagtgaatacagagatggctgtacagcctccagaaatgctaagttggttggttgtatatggaaatctctgttaatatttgggacaaaccctgggaataattgtgtgagcaaacttagtttactaaagaactgcattgctaattatggacttgttgacaccagtgagccaggggaagaagttgtggttttgggcaaggggttctttcttatcaactccaaacttacagggtgaagttagccatctctttcagttagattgaaactatcttaataaacaaaaatcataataaacgacctcaaaaaattacttagttaacttcctcagtatataacttatatcaacattaaaagcatattaaataaaattcttcaaaattaccagctaactactctgggatataactggactgattgcctatatttgctttagaagaacttttgcaatgattagtaaacatatgtgagcaagaaatttaaccttgctcatagaggccatccagttctccaaaagagaatttcattttcataccttgtaagcatctctttatcttctatagcagtaggtatgtgactcttaaataggcattcatatgaagccatatatatatatatgtaatttttaagaataattgttgaaagaataagaataatttcattcttctttatccttttctcggtttttattatctctgtcatttcaaattttatttctttcctttttattttctcccttatatttatcttaaagtagaatatatacatgatttctgatatcattcaaaaagaaattggttcttgtggcagaatattagtgttgtagatgatgtcagataaagcaagaaactatagcgtttggaatgtgatcagtaggttaaagagggactgctgttacctattattcagattttaaagtttgattctttttttttttttttttttttttgaggcagagtctcgctcggtcacccaggctggagtgcagtggtgtgatctcggctcactgcaagctctgcctcccaggttcacgccattctcctgcctcaccctcccgagtagctggggctacaggtgcccgccactatgcccagctaattttttgtattttttagtagagatggggtttcaccgtgttagccaggatgatcttgatctcctgacctcgtgatctgcctgcctcggcctcccaaagtgctgggattacaggcgtgagccaccgtgcccggccttaagtttgattcttacaatatttttgttgttcagagaagtttattataatgtattgaaatataggtcagatatttacctcagaagcaatgtacccattagtagaaatctttcctttaataattatttacagacaaaatttattttaggccaaatatgtttgcaagaattctcataatctggacattacccacatatctttaaacattatatctatctgtagaacaaaaccccattacttagttaatgttttgtgaattcagtattgatccaaattctataaaatcttaatttaccaaaagagatttctattttttgaaattctttttttaatatagagaaggaatataaaacaataatctgatatcagcagtttagtgaaattgatctataggatataatttgagtttgttacccacagtgccctatatcaagggcaggcacatacattatcaggtctagctagactaatgcataatggccagtatctattttaattgttcagtgtctatgcctgaactaattattaatactttgattatcatccttgtctatgtcctttacaattaaatggtacaaatctatgttgataatgctttcagtagcacttttgaagtaaatagaatttctctgctacagaaagtaaatataatcagaacactgatttgcaagcattttagtaatcaaagtatattttgtacttgagggattgtctgtaacctggcaaaaaggaaaaataatcaactctagaaattaatttttagttgtatttagatatgactaccaagcaatgcagatatttcttggggtaccagtcttcttacatatattgtctggatgccatagatcatgatattaaataatctatttcatcagtgttgggaccacatcctcccatacatgtttatttctgtaagtgtgaatgaagtttactcatttatcaaacattttaaaaaaagatctgttatgttccaagaactgtgtgatggaagacactggacctacaccctgttgtcagggcatatataacattgagggggagaggtacgaagagctacaaagtaccagaaacattctgagatggagtaatgtttagcatagttgacccagtcctatagagaaggtgatttttgaacagcaatttaaacaaggagaaggaatttgccaagttgcaggggtgaggaagtgtgtgtcaaaccaaacagggagttagcatgtaacaagtcccaggagctcacacatgtcttggcacctgccaagaaccctcagcaactcctctccaggggagatacaagaggtacagcactgagagaagcaacaagataaaatgtatcagtttgttaaaagggaaaggttcaagaaagagggagttgtaaatcatgttacaggtcaagtaaaggcaagaacaaaacatagtctttggacttggctttcctgacagcattgatgaactttgctgagcagtaaagtaatgggtgtgaaagtcagactgataaggattcagaagtgaatgggaaaggaagaagcagaaaaacagcacggtagatgactctttagatatttgcttgggaaggatggattaagtgcattagggagaggaggatgctagccagggcagggtcctcttcctcctgccatgtcaccgtctgcatgttggagtttcttcagcacatttggaagctaagagaaggaactgctgaaagacagggcgtgcatgtatagaggaggcagaaaaagaactagatcttgagaatgactgagtcaaggtggaggcttgtggaagcttaactgtgggcaggaggagggagaactgggagaccaagaaagatacagaaagataggttaaagacttgtgagtaggaaggtaagaaaaagttcatgcttaagggctactgttatggctatgaaatattcgtgacgcataatattattatccactattgctaatgaacatggagaaagagtaatgaagttttagaaaggctgccgtgtgcaatgagatagggagctgtccaaggacagggctagattgtgaggcagtgaaagggcctatgtgaccctggaacataataatttatagaggcaatgattgtgtgtgtgtgtgtgtgtgtgtgtgtgttttcaaatgtatgtttcagtgtgttcatgtgttgtattcatatatgtgttcatgtgtgtgtgtttgtatattttgtaccctagaagtaatccaaatcctgatgcagcagttgataatttagtttaccaatatttttggaactccatctattttgcatcattatgctaagccatggggttactgagatgaataatatattttttctgtccttaaaaacatatggtctagtgggtcagatatataaggaaataaaacactgtatagggcataggtgcagagataattcagagaaggcagtattacgatatggatggatagagatggggataatgacatcttggtagctttttggaggaagtaacatcttagctggctttagaggaagaaaatagttacatgtgaggcacttgaagattctgaagagaaggagtaaagacattgttgaccatgcaggtggtccattctcaaggcatgaaatcattgagtaattcttaatgcagaacaaagtttcaggaagatagacacagcttacagtttatgactggacctttggtttttttttttttttttttttatagaaactggcattaagacctaggaacttttttgaaaaccaaaatatttcttgaacactggggatgaggtttttttttttttttttttgatggagtctcacactgtcttccggcctggagtgcagtggcgcaatctcggctcactgcaacattcacctcccaggttctaagtgattccaggagaatcacccagcctcccaaggagctgggattacaggtgcctgccaccatgcccggctaattttttgtatttcagtatttttagagacagggttttgccatgttgaccaggttggtctcgaacacctgacctcgtgatctgcctgcctcggcctcccaaagtgctgggattacaggtatgagccactgtgcccagccatgggttttttaaattttttttagacagagtcttgctctgtcacccaagctggagtgcagtggtgcaatctcagctcactgcagcttccgcctcccgggttcaagtgattcttctgcctcagcctcctgagtagctgggattataggtgccaccaccacgcccagctaatttttgtatttttaatagatatggggttttaccatgttggccaggctggtcttgaactcctgaccttgtgatccacccacctcagcctcccaaagtgcggggattacaggcgtgatccaccaagcttgattgattttttaaatctctatcaaaagttgtagtcgtactgtagtattttccaaatagttttggaaagtagttttttaaacgaaatttagtgttaaaatggcaatattaatcttaaacaatttaagttctagatgttcgtgttttttaatgtacgtatgtatttatatcctatactctagtttccaaaaattataaatataccatatgccaatagagcaattttggctcatgaagaagtatcatcaaatactagttatcatactgtgtcattgcctctttaaaatgtgaaaattttactttttaaagccttgttttcctcattggcaacattcaaacaaaaaataaagaagaaaaatcctgatagaaaaagtaagttgttaaaagtaaaaatgccctgctctaagaagtagtcttgtggtgctgagttaactgatcatcaggcaacaggggatccctcatcccccaccctccagctttgtttggaattgtacttctgaagtgcatcacgctgctcaaatcaaattgctcacttaatatttaatgtttctgcgatggaatcactttctcccttgaggttgacttcagatttaccagacacactgacaacactgtactccttattttccccacatgacctcagcttctgctttaaaaatgtacgaataaaggatgcttttgttcatatcttgcctgcctgtgatatattgacaaagtgtctgcgggctcaatggaatagttttacagtatgagtgctgttttcagtggaggggcaggacttgggctttagaaggaagtgaattggataggtcaggagaatgtaccatttgtaaacacccctttccttttttattcacgtgtcaggacagcaggagcaggctgttcagtgcccgtccctgcgcagagccggagggaaagcagcttggaagtcagctgcaatttttaaaccttgctttttattccctggtaatgatcttcaagtgcttagacttgtctgagaagctgttttgaaactaacatggtttagtccactaactgcatgttgggtaaattcaaaacccacatgctcgtcctcttgcagtggaataagtcacatctgatggacattttctgtgcttatagcatagtaatgaacgtctgacaggcgcgacctttcataagacaacccacactattggctttctgcccagaatattgctgcaacactatctgtgattggttatctctctatcatgcattgcttcacaaggggaaacggcccctttttttaataaatctacgatggctggctgcaatatgcctcactgtaagtattttgtgtatgtatgtgtgggagagagagagagaggctgacttgaatattacttagtctggtatcacatggcaaggttgtgatactgtaggacatcagtgaagtgctacttagtaaatcttaacctatctcttttttctacaggttggtactaagaagtgcctttcctgacgtctctgctgcttggaaccgcttctagagcagtctctgcttttgccttgcttgctgccagctagactgtgacgacagcacatccaccctccacctctagcccagacacccccatttctacttataatcaagagaaaagctctaagtatctggcattgccctaggctgctttagtgttaaaagaaaagtttgctgaaaaagtaagatatcttctgccaggaaatcaaggaggaaaaaaaaaatcattttctcgattttgctctaaactgctgcatctgtctatgccaaactaatcaataccgattgcaccaccaaactccattgcaaattcagctgtgaggagattccctttcagacaactttgctgaaagcagcttggaaattcggtgtcgaagggtctgccacgttttcatgcttgcattttgggctccaaattggcactgggaaggggttactgagagcacaaggctgataccaggccctacttttaaacgttcatctacttacaatcctagtatttctctaaaaaccaaaacctctttgaattaacagtttcatgctgtgaatttctagtgggagatcttttccttgatattgacgacacaattttccatgtacttttaaagcagggagtggggaaaagtattttgaggggacattttcatcatcagttcagctttttttttttggttgttgctcttttttgggggggttgggtttgttggtttcactgaaacatttaactacctgtaaaatctaaacatggctgttagtgtcacaccaattcgggacacaaaatggctaacactggaagtatgtagagagttccagagggggacttgctcacggccagacacggaatgtaaatttgcacatccttcgaaaagctgccaagttgaaaatggacgagtaatcgcctgctttgattcattgaaagtgagtaactattatattcttttaaggatattcaatgattgaatgaggggtatatggacatacagttctctgcatatgggattatggattgctttgttcatagtttagttatacagtgtgttgatgatgttgggctggggaactttacgagaagcagtagaatcaagtctggccaaactttgttatgaataactttatcagtcctttcactgcatgtttttttttgctagggcagaaagtgttgacatatttttcacttagtaatggcaaagtgtctgtctgtccctggaaatggtaaatgtagctacctgtgagtgtttagcatatgcatatattatatataaggccatggcaatagctgaatgaggatgatttttatttgttggtaaaggcattgtacagttgcaaaagagaagcagatttaaaatcagctaaacttggatagactttttactcttttaatattttgacattttagattttctttttattttgtgggcattttattttcaggccagagccacgcattttatggaaaatgtaactagaagtaaggtgctgaactgctgctacagcaccttacctgaggcacaaactttgttgcatgtgagttatataaataagtagaaactcataagtactattgtttattggatttttccagcttcaaaaattctaatgtgaattagcagtttattttctgttagatcatgatttttttttatttgtaatagtcttagctagaaatgttaaaagttagcttttgtgggcaccataatactaaaatatttactttagtgtttcttgacattcaaaaatgtcattggatttgtaattcaggtatcatatttgaaaatgagtcttttaaaagataacataaatatctttattttgacacacaaggtcaagactagaaatgtgttcctgggtactttcagcctacttggtttaatcaaattgcttttgaatatgaatgtcctaatttaattctttggacctttgaggggaggacactatcacttctacatatgtagagaagtaaaagtctcatagatccatcttgtctttaaaaatatatggtgctataataatcttttctttaataacatcagggtgagttatgagttaattgtttcagttcattgtttcctggtccattttaggctgttcattttgctaaagtttttgccaaagatttcgagaatatgatctttagagttgaacagaaaggaggtattaacaacaaaaatattttaaaatgttagattcttcttaatgtcatagtcctaaagatcaataagcaaaagttataaactcccattgagactttcttcaccctttcctttgagaggcatcagtgaagggcacagtggttgtacctccgtgaatgtgtattcctaaattcatgctggctgaattcaggtgtaattagagactgagacccataaaatgaggggcaaggagctaattactcttgtcggtaaccagctgtggccataagtaaccctgttttgacccaattaatagtaaatccaatttttaatcctacagacagttgatggtgcactcgtagctgcaaaatgaaggacattaaatttggctgtgacattgagtggttacacagaagacctgcttctacaacatttggaaacattgtgaaacattactattcagttgctatttttccatctcaaaatatttttttttagttgctgctcacttatggccacagaacagtccctttttgagtaaagcagcaaggttgcttaatgacatgctatgtggttaacaagattcaactgccacatcaaggactttaaataatttcaagattttaaatgtatttatgaaatgaactcattacagcagctaatcaatgcaaactttgtcctttttctttgtctttctaagagaaactgaatttaatttaaatttaaattacagtgtctaaaacttggtaaaatattttaaatttgaataagaggaaaaaaaaaacatgaatttatttatgatggagcttcatacccaggacagtagcttcttaaatgttagtaaaataattatgttaagcattaaaacaattttgaatatgtaattaagcatttatgttaaaaaacatgtttcttacgtgtgtgtgtatatatttataactgacacatgtgattctttgtacagtatttagaatccttcccttcagatagcagtcctcttgtattcagtcttgtggctaaaatagatcaaaaacatattttaaaactgttaaagtaactgtatgactcatgcttgaagttctgaaatttgggagcgttatgaggtttccatgccattaaccgctagatcatttgcattctctcacagagtaaacggaaaaaaatttagaaaacttgtaataatcctgacttctttaataaaatgtgtcctgtgtattgcttaaatccatagtccagccttttctgagttcttgagccatgagatggaggtggcctgtgtaatctactatttttagaaagttaggaaagcaaaccaaatactctctgagaggaccctatgaaatggctgtacccttcagctgtgctgcttcagactttggccaggctcccaggtgacttacgttaatagcagacttctagttagaagaggagaatttatttcattaaaaaaaaaaaaaataagtcaaacagttcaagaaagtattcatttatgtaaaagaagtcaattggtatgttactaaagataataggaagaaaattagctcactattttagttgcatactgatgattttaaggtttaaataattagatttaaatataccgtatgtaaatgtagaagtctgtatcgtaataaatctgttgctaagtaaaatgggaatacatgacaacgaggaatgtaggtattaagaatgtcagaattagaacgagaacagtaaaagagcaaaagctgtaataatgtgtgctagtatataaacaatactctaaatacttagtttctctaattttccttttacaattgcagttttaatttataatagtctaagagcgtattcaagctgagacttaaattgcttacgtgctatagatttaggtgtattagctatttcagaaatccagaacatttgcaaaggtgcattattttatgccaaagaggattatgttcccctatggcttgtgaaagagataggaaaaaagaaaagaaaaatattaacactgcaagccaccattagaaaattatatttcaaaaatgatgtttcaaatcaatgacaaattgcctattcagtcatgagctctcaactaaaatttggggagtcaatgtaaagaaagcctacagaatgtattttaatatttgccaagttatttataccctcaaaaaaaaagcttttacgatatgatcaacagaaatagacttattgtttactgaattctatttcaaatacccattcatttttcaggtactagggatgggagaaagagaatataacctttatatttactatctattttccaaaaatctagcaaaattcttttacctttgaaaactttagtcacttgttcctttatcaaattgagccattttatttaagataattaaaatttctttttgctatatacagtgatatctatctataaatagcaccccgatcagatttatcatagacacatttgagatcagattccactgcaaagtggcatacaatcaagggtgctgagaacagttttaaagagcctctgcaggcttagcagaatatatgaagtatggaaattaggtattagaaggcacacaaatatatgtacatacaggtaaatgaacaactaaagcactcaaaatcagtaaggcaaacaagtatccagatggtcacatatggattggatggcataactagacatgataaagtagtcccaaaggtggttatagttaaattttagaagatcctctgttgctagcatggtttatcctcaatccagaaattgcctgtgttgctgctgttctaagccccaagcatagacttttcatcatattttaaaaaccagtttcactgataatcctgataaaatatctgcaagttttagactaaatatgcaattttcaattaaaattttgatctattagggtcctaactggaatcactgttaccaggaagtttttttgtggtttgatttttaaccactggtatctcccatgtattaaaactttgacagattattatatatactgtgctggcacatatattcaatgtgtctttcagtgacagattgacatatcacttccttgttttctcctaataacttaggagatgaactaactataaggcataacctgcgcagcagtatgtttcatataaaaggtccctaaggagaaacttcacaactttgtaaagaatatcctgtgaatatgctgcagtgtcatcaactctgacataaacctttctttaatgaaattctcaatagctgcagttgctttggtgaaactagtaattgtattcatttgcctgtttatattagaacttttttagaaaacttttttttatgagtaaaggtttttttagactattagataaattgtaaaccatgtttcgaatcaagctacctgctgcagtaattctagaactatttattttgcttcatattataagattttggtacactgcgtctactttttttctcatgaaatcttgcttcactgtgtgagtgtgacaaactaaaaacaatttagacctcaagcaatgtggcacttacagctgaattcagtttcattgtaattcagatgtctgaagctaatcaaaattccacggagtacccttgaaacaattgcatatataaggctgtttctcacttaaaagagacaatgcagtgtggggtgaattgtcttttgaagaactgtatgacacatgcccagttcaggtgaaaggtgagaaatggaatgtttctcagacctagcacagacacctagggacctagtttgggaagcttatcttgtcattttccttgccaaggataagtagaggatttcagctatcaacattgctaatccgttacctttcatgctgagcaatgtctctgccttcccacagacttagacaaagcttcttattttcttacaaagaggtcctattgaggaaatttgaattttttttttttttttaaacttagcagtactacatcctgtgcttttagataggtgagcaattttccatgttaacagctaggccaaaaatcatgactgccagtagaagtgggtaactagatagatagatagatggcctttgatttagcactgatgatagttattagcatgtagcaacttaagtaaaagcaactggaaaggcttgatagaaattctgagttgtttgaagtataatagattattaggatagtaatttctttgtgaattttactgtaaacaagcttgattctagtgaggacttatgctaattgctcacttatactaacagcaactacagagtttttatttaatactgtttcttatacaaatatcatcaaatgcacatctacctacagcatcatccctacatttttggcacatgtttgaaatattttcactttgagataaagtttgatttttttgctagcgataaaactttctatgctatgagcttgtgttttgaaaattactgataattactaaacagtataacccctgatatcttctaatttggttgacaggctgtttgtcctctggattcctgagggccttggccatctctgaccattacatttcttcttttgttatctctgagttctttccagctttctaattgtccatctttagaactattggttccgatcttaaatatgtctttccatagtcacacagaagtgatttagacattttgtctgtgaagaattagattcagctttgcataacagagacacctcccctaccctccccagcatttggtataaacaaattaggggtttatatttcagtcgtctaggtctatttggcgactctatagtcattggaactcaggttccttctctcttagttcctaaggagcacatggcttccaactttaggattatttcaaaattgcaatgtggccactgcagtgccagccatcatatccttagtctagcaggacgcagaaaaggcaagacaccataactcagcccagccaggctccttttaagcaaaggttctctgagcttcagccagtaatttttcagtctcttattgactgattttggtagcagggattgctaggaagtatttttttgtatgtttgtttgttttgttttgtttttatttattattattttaaaaaactgttgccttgattgaaatcaggagtctggtaggtaagacagaaggggagaatggaaatggatgttcaggagggccatttctggaataaaagagtgtttatttttcctctcataaaactttcagaattaagtaaatctctctggaaagcatctgggtaagggaggtggttgaagagataccacttttgaagagaaactgaagtcttctcatcttgacaaacttgtcatcacttctgtcttgcttatttagtaaataaaacctggcatatcacaaatggatttatttttccttatagagaaaactaaaacagcttcattttttatcttcttataactgtacttatttatttatttatttgagacagagtcttactctgttgtccaggcttgagtgcagtggtgtgatctcggctcattgtaaccttcgcctcccacgttcaagcaattctcctgcctcaacctcccgagtagctggtcctacaggcgtgtatcaccatgcccagctaatttttgcatttttagtagagacagggtttcaccgtgttggccaggctggcttgaactcttgacctcaggtgatcagcccgccttggccttccaaagtgctgggattacaggcgtgagtcaccgcgcccagcctactattcatatttatataaacagtcacatttttataactggaatatagcagaaatgccatgtcattaaaaacaggtcccaagtgattttatatgacaaaagaatctgcactttgatttgtatttctgctgcttccacaaatacactttcttattttttccgtatggagtaaaataacaaggtgagttaatatttattgaaacttaatgtatgtcaatcagtgttttcagtgcttttcatttttttcatagtattttgtccctataaaatctcatcgagatagttactggtgttacttccatttcacagatggacacactgaaatacagagaagttaggtaatacatgcaaggtcagtcagccagtaaaatgtggacttggagcctcgtaatctgatttcacagcctgtactcttaattgttttgttatgtttgctggaaaacattgcttcttaatttccatatgcatattctaaggattcgacaaagaaaatataactaacagcagtacttaagaataaaaatgaatatccaagacaaatttatagtacagggcctaaaacagtaagtactcagaagtaatcactgtattttaagtcaacaaatgagtcaaggagtgaacccaaaatagcagaaagaatgctgccaccaactttcaaagatgttgtatctgttgtaaaatatatggccatataggaaaaattttaaatgaatcatcttagataactagtcactgtataaactatatagctgcctccccagtgcataaaaagccatattcaaaaggtttaattgtttagaaaatgtttttccacagaagcaaggtgattaagtcatcgggtcaaccctgagaagccaaagtagcccagaggatgcttgagttatagttcagtacaaacagtaccttggaaaccctggttattaattaaacccaagaggctccatagaagtgttatcttatcataaatcttgagaactcctagagtcacagaccccagctgcttttgtcaaactatttctgtggcaaagatgtattttaaatttcagtttagggttccagaaattcagcttgcctagtgcaggggaggtggcctttcccaaagtcctggaactcatgctgtgagccagtgtagttttccccagctttaactttgggctgcttctgtttcctgaagctagtctttaatagggcatttgcttagaatcagcaggatctaaagacagggtatgcagtgaggagctggagtccaaagcttcccacctgtgtaacctttagggtgggaaggtgtcgtcaatatgtcttccaagtgacccccatgtttctaaggactcagcctgcctgttttttgaatgtagtgctcattgatcctgggccctgtctactgcagagcttaatgaacagcttctccccattcttccccctctctgaaattttcagctgtgtggttgttgctgttgttttctaaatactagtagccatggggaaacaggtagatcataaaagtatcaaactcaatttttgttttgttttgtttttttttttggcattttatcataggatatggtcaagagaccggttgtaaaaactcagatgtgaggaagaaaaccattaggaggtgataaggattcaacaatttaagtaatataacttatgtacttcctatgtcaaactttagggaggcagatgttaacaatacagtcctcaaggagccggttactaacagggagactagtatattaggtggtggcggcaatggttaggagggggaagtttctcgacagcaattgcagggtcagtgaaagagatacttgaggaagagagaaagaaatggctctggtggtttatctttcctttttccccttccctctctctcacactattaattatgacatcacaagtgggaataaaagaactagagggaatccccagtaaaagacttcacatagccacaggccaccagactgtggcagctgtccctgaatcatcatgggtcagttggtaacgacctgtattttaaccctagatcacaattttaggcccagcaaaattgttctgaagctgtctagatttattaagctatatttatattttagtttatgttaatatgaggttgagatccaagaccctgttttctccagacctcatatgagtacagtatcttaagttagaatttatctctctgcataaaaatcagacctagtgcgtaggcttctggatctcagaatcacttatacttaagtccaggctgttctcaaataaggcaagaagcatctgctgttaatagctgacagtaaattacacaaagtaaaacatggaaaattaaagtcagaaaagctaggaagcttttctatcattttcaattttctgcaaaaatacagacataatcagtgtttaggatctgcttgtgatggataaattacatctgtaattccttcttttccatattactgcattcagacgataatttgctttcagatatctttgctcatctaatcgttcatagactggaaataagtagtaacatctcccaatcctaggaagcatttataactagtctttgcctttttgggtgttgatagactagtggtgattataagctttcgagcttctgaaaagcacaacgaagattaaaataatcataggataataaaatactttaaaacccttctagtctttaattttaaaatgttccagtagaacacaaatttgctcaggtaacacacaagtaagcattaaatgccttcctgtgtatctgagaagtttgttatgaaatattttggaaaccgctgcatagtcagtgtaggaggagcagatgaattttagctgtggttatgtgtgctgtaaaagactatacgtgcttgtattagtcagaatgagtacaccactaatttttgtatggtaagagatttatactaagctcatcatcagtttctataattcagtgagataaaactgagtcagattgatttttaggtagcacatgtagaaacagctaattttattcccctgatttgatcctcatctattgattatataaactaaagaagctaagaacaattaacccttacgaggttacacagtcaggagatgctgaactgagattcagtgtagaaagtctgtcttcagagcctatgcttttagtctttatgctaagtttaacttgtttaaatagcaagattatgaagcactatacagtgacctcgtatagacaaaaatatagtatattgattattagagaaactacatattagactgttgtacatacgtgggcaagtatttgttaaatcatttcagttgcctaaatttaagcaactgtgctgtttaaaacatgctcattcacattttttcttaatctagaaagtcacttctgaataattgcttgtttagattttctcatttggtgtgggaaatttatattaaaattttaactaatattctaacaatacagagtctgaacctaaagtccagaagaattttaagtcatgccgcagacaggatgaacagtatagcaaatcagaataatagactgtttgggggggttggggggaacccatgagaatttcaggatttcaagataaagcttggaattgaggtaaaggcatcagataaggaagtgtttcatttcataactttttttttgcttgaaatataatatattttaaatcacaaaagtagtataactgttatttttctaatgcacagaaccatgagactttttttttttttttttttttttttgagacagagtcccactctgtcgctcaggctggagtgtggtggtgccatctcagcttactgcaacctccgcctcctgggttcaagcgattctcctgcctcagcctcctgagtagctgggattacaggcatgcaccaccatgcccagctaatttttgtatttttactagaggtggggtttcaccatgttggtcaggctggtatcaaactcctgacctcgtgatccgtctgccttggtctcccaaagtgctgggattacaggcgtgagccactgcgcccagctcaaggcattattttataagaggctgagattttattcatcttactaggcatttatttatattatattgtttccaatatatgcctagtaagacagaaatatgcttaaaaacctttgtaaatctttacaagttgtactatattaagttaaaatccagatgaaaccattcaccacctctttgacaatgattcatatatcttattgtatgtcatgcttgtttgtgattttgagtattacatttcagaaattttctaggactaaaatttcagtagtttattttaattttttgtttatttgtaataattatcaataatgctgaaatattttagatctagtaggtagaatttttttcatgtgaatacattaattttaatgatgtatttaaaaatagctcacactattctttttaagacttttgttatatgtaattggacaaaaatttgaccatgtaaatataagaatcgttgattctattttgttcatgatatggcataaagagcatgtttgctctcaaaaaacatgggtttgagaagatgaaatttctgggcatactgggtatttagtagctatcagattgtaatcctgaactcttaagagatgtatctcggatgggcgcggtggctcacgcctgtaatcccagcactttgggaggccgaggcgggcggatcacgaggtcaggagatcgagaccatcccggctaaaaacggtgaaaccccgtctctactaaaaatacaaaaaaattagccgggcgtagtggcgggcgcctgtagtcccagctacttgggaggctgaggcgggagaatggcgtgaacccgggaggcggagcttgcagtgagccgagatcccgccactgcactccagcctgggcgacagagcgagactccgtctcaaaaaaaaaaaaaaaaaaaaagagatgtatctcaaatattagaattgatcatgttatttaaaatactccatgggaaatataattatttttatggaacagttcatttggatgaatggtagcttgaacagaaactttcgataccaatagctagtgttataagtgtcctttcctgaaactcttgccacgcattgtgttttggcgattttcatggttgtacgaatttagtcagacagccaattagaaatatatttttagaaaattaaaaatgaatttatgtggattcaatgagatcagttgggtaaatcccttaattcagtgtcatgctcatgtaaatactccataaatggtagccattagtattgattgttcttatctgaatgccagagtttagtctaagttatctttcttcttatgggaggaactttgtcttaggtcagaataaagattgttatatagattcaaacttggtatgtaattcaaacttattttatgttcaagactaaattgatcatagggaaaagtgactggtgttccttgtcctttcatttcatttctctggacgctttcttcattggtttacattagctatagtgtaactttttattgtgttttggtattttctgagtgtctagattggcctgtatgctcttttctttgggatgaaatttgtaataaaaattattttgtagcaaataaatactggcgacaggaataatgacaatgtgactaccagtggttttcacttcattcccagtgtcacgtttagaattttcatcaaactaggatcttcagaataattgcaaaaagccacatgaaaaaatgtgcaagtgaaaacttttttttttttttgagacggagtctcgccctttcacccaggctggagtgcaatggcacgatctcggctcactgcaacctccacctcctgggttcaagcgattctcctgcctcagcctcctgagtagctggaattacaggcgtgcaccaccacacctggctgatttttttttatctttaatagagacagggtttcaccatgttggccaggctggtctcaaactcctgaccttgttgtctgcctgcctcggcctcccaaagtgctgggattacaggtgtgagccaccgcgcccggccaacattttattttttatggcaaagaatcaagactttgttaagagcctaaaccgtggattcagctggatctgagtttgataccatagtgacttcctagtgacattgtgccaatcactttactgtcccaagctggtttccttatctgtaaaacaagtctagtatcatttgctttcaagatttgtgaggattcaatgagatcagttagatataaatcatttaatgtagtgtcttactccatgtaaatactccatagatactaacggtagccgtttgtattgttcttatctgaatgacagagttcagtctaagttatctttctcttatgggagaaactttgccttaggtcatagtgaatgttatttgtcattatgcacattgcactacaggtctctgtgttgtttgaaaaaattaaaaaggacttaaccttgaatgtatataagtgtgcacatactagcttatttatttacctgttatcaagagaaaataaccccttaacctcttaacatatgtatgacttgactactagctaaaccagtaggtattaatggaataattcagaatttatattgtctgtacctgaaaattcattttgtaaatgcagttaagtatgaatggaaaaatggttgtagccatctgttagcaaatctaaattcatttaaaactaatcctatttagctttatgctggtctacaataaataattcatacttgatatttcaaatgctgtattatttatgtaaattttctcctaaaagactcacctaagacttttctagaaataaaattgtttattcagcaaagtacctgcacagattagaaggttaaatattaaagtttattttttcatgattgcactattcttttctatttttttatacctatataaacttaattggtcaaatatctaccactcacttcctcaaatgtgtaaagaagcatccaaatccataatactctgtttatcacagctttttttttttccccctttcactgtcactcagaatcgatagggatccaattctagcctgttgaaatggtccgttttgctccaagactttttttttttttttgaggtgggagtttagctcttgttgcccaggctggagtacaatagcgtgatcttggctcaccgcagcctccacctcccgggttgaagcgattctcctgcctcagcctcccaagtagctaggattacaggcatgtgctaccacgcccggctaattttgtatttttagtagagacagagtttctccttgttggtcaggctggtcttgaacttccaacctcaggcgatccgcctgtctcagcctcccaaagtgctgagattataggtgtgagccaccatgcctggcctagctccaaaattttaaaaagcatttgcctcatttatgagtttgagacttttaacatcattagaaataggagagcatgtactttttccagcaagtgtaaagggggaaacaaacaccaaaaccccatctccctgatttttttggcttttcagaaataatacagcctagtcctatggccagttctgggtttttcttgacagcgtctgtaactgttcttgttatagtctaattctgggtatgagttatgtgtttacagtttgatttactgagccatgccactgcattcttgttaaggttattgattattgcccattctgttctgctgtgtattattgatttagtgtgtgacaatgagttaattgtattacttgatgttgaagaaggatcaaatatctgttcaaaggggatgcttgtagcctgtgtaattgagttggctatttcaggcttttaacatgttgtgaaacaattaggagaaagtacaggaggacctctgagggcagggaacataaaatttgttttcagctttttcgcagttgccaaaaatggtgccgtaaggctttcctggaattaagtagtcagttggtatttggttagcagatgctttgtaaaacctaatatattcccactatatttcctttaaaaatcaagggggggttaacacctttagattgtcatgttttattgagaaaaatccacttctctgaaactccctattactggatataagaaaaaataacaagcaagatgtgttgtgtatgttggtgcccacattttggaggaaattacagagatagaaaattaagctaaattattaagaatctgatgagttctttttgcttactacagttttgtttcgtatttgataaaaaaatttccatgtaataacatttaagataaagccagtattattttctttgacattattttgcagtttgaattttctaagctttagacaattcacacttaatgtaaaaaaaaaaattaaccttcagaatgagatcatggtgccatggttctctaatgaatgttaccttttgttttagcagctcagttggctctaatccatggaaaagtttttatttcccatcagctccaaagtaggagccaaaccaaagtttaaagaaacgttttccagcagacaagtttctacagataatagtgaaagcgtgtgaacacacacacacacacacacactctctctctctctctctctcactcctctctctctcacacacatatgcgcgcgcacacacccacacgtcttatggaaatattaaatcaggaagaatttctgaagttctcataataaaaataactgtaatattaataaagtactccttatcagttatttctcgtcacattgtggccccaagggtttgcttgacttttcaaaatgtatttgcttcaggataaattgaagaagtaccactctctccctgtattaatacctttcagggcttttgatctgtaacctcttgtcacctctggtttatctggcttagcatatgaattttgaagaatgagggagcataaacaattatgactgccttttaaaaaatgcacgttaaacctgcggcctcaaacttgtcagttctgaactttaacagtagaaaagtgaaaactcagcgttgaaagtagagagtgtaagagattttgccagttggaccactttgctgcaaatacctattagacccaaacctttcttttgcctagtgatcagctatactaatagcaagatccacttaattccatgtgagtcaacagcttgcatggcatgcccactgtgtgcaaatagcttctcaggtacttttccaagcgtcctgcctgcacaaagcagaagagacttggaatatatttatttattctctcaccccactgcttgctctatcacctagaccttcatgctccatcacctagtcctgcttgctccatcacctagttggaatttctaaatcaacagacatgggcagatatatattttaaaagctgtgtgcctctgattaacaaccattcctttaatactgctgagaggttctgggaacatagtatttttgccatgacttctcaatctatagagaagatgtatttatctcctaaggataaaaccatctggaaattttcacatgctccagactttcagatagagctggctttgccttctctttttcttcctcctcttccttctttttcttcttttatttatttatttattttgctttgcttattaaaactatggatgaatttttaaaaagattaagaagataaaataaccttctcacctgcttagtaatttcttattcatagttagaaggtacagtaactgtttcataactgtccccattaaatttctgattcaaaaaatatatatttttctttataaataccgtttcctatgatttttggtccctaaaaagcaaacaaaaaaaagctacttgatggtaccttggttgtagttagcaggtctccattttctacagatcttccattctgctttattaacttcctttattaatgacaaatcagccagttgataaaataatgtgttaacttttaaaagattcttataaatttatgtggagttctgtgactacctgatatgactttgtgactattttagttgtataaagaatttcaaattatttattcctttaaaaaaatttttttttcagagacagtctcactgtcactcaggctggagtgcagtggcgcaatcttagctcactgcaacttccacttcctgggtttaagtgattctcccgcctcaatctcctgagtatctgggattacaggcatgcaccaccatgccgggctaatttttgtattttttgtatagatgaggtttcagcatgttacccaggctggccttgaaatcctgagctcaagcgatccacccaccttggcctctgaaagtgttgggattacaggcgtgagccaccgtgcctggcctattttttgttttatttttttaatcttgaaataactccacagttatctccaagtaagtctaatatcttctctttgaatttctaactgattcttatttataaacccatagaatctgtaaacccacaaacaaatgattcttcatcgatcaagttctgttttcaaatagatgttcaacgagatgttcaaaaagacgataaaggatacattgtaacctaaggactttatttcgttcatttggtcatttaccttttaattgtagtggacttaaatgtatacagattttcatgtacaacaagtagtatcctttagctgcaacaaatgaatagattagcctatgtgaatatagttttgcaaaatattaatgtatgaaagtagtcctaagactgcaagtactgttgctttagaacttcatgcataaattgggtgtgttgttacaggatacagagaaaattgatggtcaaccttagcctgtagtatattttgacagtgtgaatgagtcaagcaagcaattttccagactgtttaatggtacaaaggaaagggctgctaaggaagtcattcttatgactagctgaaaaatatttttcttagtgactgttctagagaaaaacaggtcaccgttggaagaaaaaagcagtctcacgttacaagcattttgaaagtggtttgatcattaaaatgtatttatcttacgacaaaacttaaaacggatactgcttactatatttgcaatgtcttgaaactcaacaagaaattatgtagcatcattacaagttttaattcatggtagaattttggagattatatttattgagctatgttttttatttcattagtacaaataaaactgcattttatttgttctaatgataaaatgttttaagtttataaaattactgcaaatgtattccactgtgtggttctaaactgcatttgaattaaaataggacttgattgatggagaatcatttgtttgtgggtttacagattctcttctaggtagtttgaaaagattcattgtccagcagcaactgttcacccagagacatagtgcttagcatgagcttgatggattcaaaccactgggtttatcattactacatagatctttgaaaagacaggctgcaaatcttgtttctaagctgtgactagctattattatgtcaatttgaagaacagaagtaaaatcaatccagattcaaaaaaagacactctacagtcattcacagactgcaaccagttcaaattgtaatatcctgcctatttaaagtcccctgattattatgattattcaatatcatgttaatatttaaaacttggaatacaacctactaaccttatttttatttgtactactggaagttcctctagcatttttgaagtagcttggaaaaaaattgagattcagttgtggttctacttacatttttactagagtaagttggagagacaaatcagtgagtagtcaagtcttcatataatcaaagcttttaaaatatgataacaaaaacttcaggtgttagatttagcttcacggaaaacctttttttggggggcctaagtttaaaatgtgttttttctttgcattttaaaagattgcttgtgcagtgttcaatggttttgtttagcatttagagatgattttttcctttgtcactttccacattgaactctgctgatttagtgtgttagaattgccgtcagaagagtccttagaaatgatgtcatgcagttcattagttttacagatagggaaccaaggagtggtgaggttagggtttaatcatatccataaagatcttgaggtcattaggaccctttaaatgtgactagttaaatcacagcaaaaactagaatatattgtcttcatttcaggaaaatggcatcattgacacacctgacagatgaaaactgctattaaggtcgagtccaagtgacaaaactttcttgactgttctgaggccttggttacggtggcattaaagttctatactgtttttttttttttttttttttttttttggctggacaacagactctccaaaaaaatgcatgtgtatacattatgcttattataaaatttactaataaaatgacatggaagacaattaaaattataataaaatatacaatgctcaacatttaaattctatatggccaattgattcttacagaatgcctttttgatttttgtccaactcttgcatctgtagtcaacctgtggtcgcaattgacagaagagtttaattctttctttgtgctcttactcctgggtccctcattgtacagtgatcatcaaatgcaacatccttcatgaaaatgaatagcttcactttttggcatttccttcctttttatgtgtcatagaatacactacattattcttgattttacagttaatttgtaaattgtttctaacccccactagtttataaactccttaagaatgagaagcttgcattaatcacttctatatatatagtgttttgaatatccttggcattcattaaatgtttagtgaattgaatgcgatgtttcttccagactatgaccaataattgtgagaagattttatgtgtttttaaattcaactttagagaatttctttttgtgtaataggacatttgttggacagcaacatgtaattactcataaaatgtttctctgcggagtccagcatccttcatttgtgataggactcatccagttaaattgctcaggcactataatggactatttatgttctgttgatgtaaatttctagaacaggcctttccctggactcatgccatgttttgtatgttatcttgtgcaggcagcacatggggacctagtcaggcttcctgatatgatagctgtatatacagcccatgtctcagaggggaatgataaattggcctgtgcagtgacacaatacacagttattttggtgacagtattaactctcttttcataagggtgctttgttggaaaactattcagcttaacacagaatatttagctttcaaaggttgcatagggagaaatgatactgccaggatagaaacattatcagttttttctttctttttttttttttttaatcttttttgactctaccgagaatattgaaaagagttttgattagtattggtgtttattacgagaggaacattctgggaaccagactattagtataattattattgtttttattatcaaactaatagcactaacaaggacatacggtatttgtcaagggattcctatatctctgttacacctaaatttctctatactctaattttagaaaaaaagttttgtcttccaactgtgaatactttatagtgttgcaacttctgcttctaatctttaatctgaagtagaaaagagaatccaagcttccaagaagtatgtctctagactctgccacttattaacttgctccttattttttctctccaacaattattttaagatctgtatgatataagctatttttagaagaactgaaaagttctagagagtaaaaaaatgttccagattgtgtgttggtgccagtagtactgacaattaaatatttgattgaggagaaacctacatttatccactttgaagaggatcatcaggggagttaaaaatttagtacttcaggctcattaagagttagaatagagtaattatgtagctggtaacaaatgctacaatcaccacttgagcattgtgatatgttactcattgagacttactggccttcttcagggaacttcagattttataaaagtcatttgcttagagagtaaagttctgctaatccattattttagttctgtcatctttttctgcaaatagggtgagttttccgagagggtaagtccctggtaataatcttaaaaatgatacaactttacagaatatctccccttgccatgaagcaatacttaatgtcttgaacagtgagcctcttgttcatgcagcatttaaaagagatgagtgtagaggtcttccttctacattcattttattcgttagtaattgagaagcaggtctaattttctaatcttgcaagttgggaaattattaaaatgctcaagagacagtagatcaagcctggtgtccctttctccatcaaattttaaaggatttttttttcctcagtaattctgcctttgtgtatttccaatcttgcttcctatttgcattgcacacagtggcatgtcaatttcaaaagaaaatgtattcagatctactttcaaactaactgaaagagatagtggtatttattttatcctgaggttttgttgttgttgttatggttgttctttgttttttaaatctggacatatcagtaatctcctaagagaatctattccaaacacagagactgtttattcttgttttagatactgttttaaaagccaggttatgttattatagtatagatattttaaaaaataatgaaaacagagttttttttaaccatatttttgtactgcataaaaatgcagtgacaagagaaaaacattagaactctgtcatactcctaatatagaccattgctgttaggtttctaactccatgttccctgtctggaagctttataaggccgtgccttagtcttcttaagcctaacacattgtagccttccaataaatattactttatttgtattaaatttaaaatggaatagaatgtggtacatcaccagcgttcatagctcctgacccatgccataactttccttgccccatccccaagattaaaaaaacacaaactattagactaattatagtcattacagttgtaaattaggtcatgcatttcattaaaaattgacgcagctccctttttgaaaggctatgtcacggaaatgcaaactagccttgtatatagaacactaaaatcatttaacttgaattattctaattacgataccacaaagattaaaaaatacatctatattatctcagtctgataactgggctgggaaaaaatgtcagttttgatatgtaacaagattggtatgagttattttacgtgacagttttattgattgatttttttcatttataatcactaattttgtgaggttttctcccctgcagcagtggactgaaaaagttaacatttttctggcattttttaagcgctaagagtagaaatcaatagttaaattgacctaataaaagatctgtgcatcctactactgtgacaagaagagcaacagaaagcaacatgtatagactcttaacaaggctcaaggcacattttggatttgttttgcatatgaatttaataagcatgagacagtgctagtgaattacatttgttttattgagtctatttaagccaggatactgttaagtaatagactgacggtttgtgggagccagattcagtaacaggtcagcaacagacttgccacatgccaaaaatggggttatactggtttcagtttgctaactgcctaagtaaacttgtgtagaatttgcattttttgctttgcaattactggttacttctctttaacattacatttgcattctatgtaaaaaatagattttatatttaattcaaaatttatccaaatgtacttactcattggacattatttttaaatgataaaggaacttaaaaaagtgataggatcaatatagtaataattctaactcccttttatacccatataaaattcatttaactagacttattcattcaacaatattgttaaataacctaaaggaatttttttaaagaaatagtgtaaacatacaaatatgaataatttgaactcccttttatataaatatatctgtagtcactaactgtaaataatttaaaaaatatatatgtacacacacgtgcgtgcacacacacacacacgtcatgccttaacaatggggatatattctgtgtgtcattagggtatttcattgttgtgtgtacatcatagagtatacttacacaaacctaaatggtatagcctactacacatctaggctgtatagtacggcctattgctcctaggctgcaaacgtatacagcctgttatcctattgaatactgtaggcagttgtaacataatgttatgtatttgtgtatcaaaacatactcaaacgtagaaaagatattgtgttgtgctatgaggttatgatgtctacaaatgtcactgggtggtaggaatttttcagctccattgtaatcttatgggaccaccatcatatatgtgggtcctttgttgactgaagcgttgttatacagctattgactatagttagtgaaaaaatctagttctatgattggttttgttccctcctttcttatgatcactattcattcaacaccttttatatgacatgcagtttgaaagcacagggtatgcaaaaattatccccgttttcggttgcagtatctgttgctgacccagataacttcatttccttcagctgtgctttcattttcaacttctctagttggaaataaatcctcttgtgttgccccttgagggagaaatcgtttagcaggaaatcacttactaatcacagttcattaatcacatataaagaatactttataaatgtcaactgtcattcatagaaaatgtatgttaccttgaggaatgtctatgaattacttattcattttcattgcctttcacacattatattccttaggagtttattaatttcaaatataaattgactatgacttatacagagtcttgcaaacaagagagatagcagttttgcaccttttctttgatttacttgttatcttcctggtcatgtagttagtctgttaaagtcactctgcctgtatagcttgttgaaggttacaggcagtggagtgctggaactggcttatgtcgagacctcttcccaattccatgttcaatgatgtctttgttgatagcttaaaattggctatggtgagagcgtttacactttggaaattggcagatggcaaccatagttctctcctagacaaccacttattaaacctttagcagcactcactgtttatagtgttctttttcgttttttaaaaatacttttattatgaggaatagccatgtagaattttatttccagatattttgttgtttaaaaccctaagaacatcactcactataccaattgccaactgagtaactgggaaagttacttagcttttctgtgcccaaatgtccttatctgtaagacggggatgataataatagcacgtaccttgggattgatgtgaggttgaataagaaacacatttatttcagtgaatacataatgacctggaatgaatactcaaataatgctacctgttatctctctgtactttaattaatagatatttattgatcccttactaagtacttagcattttgccatgtacagtgggtcatctactgagactcagtacctcccacatcaagttattagccacattgacctgtggcaaatgacttcttttgatgttcccatgtaatgccacatacccgcccccccccgcccgcttttttttcatttgtttttgtttgttttttggtctttctgcctgggactcttttttcttcctacatgagttttgcagaccttttccatgtttatatatggctcatacattccctcctctagaaagcttctcctcactctagacctggccacataactgttttgcctctttgcttatgtagtttggagtatgaatcataataattatgtatcttactccatctctgcatttgattccacagcctacgacttacacctttgtgttcttaacctcttagtaagaaatgcctgacacgtagtagactgactagaagtgtacattgaatgtttgctggttaaaggaatggaacatggacttcactcatagagaccttactatttggttgaagagataatgcatacacatgtgacatgaaggtaaacacaaaatatattgaagatatctgtattttattttttttagtttatagttaatttttacatactatatatttttgtagtaggtaagtcaattattttcatgctacagatatggacatttatgtatttatgtacaaatacattgatttaggttatctaggccagattgtaagtagcaaagccctgtttgtaaaccaggttttgtgacttcaggttagaaatattaaaaaaaaaaaaaaatccttaattgctcttccagatatgaactcattcttttttttttttcccctgtgatttctgtcttttttgtttgttaagtttaaaaaatttatggcaatttttaaatgtacataatattagagaaacaatataacaaccccctccatatatctatcagtcagcattttgtatgcatgtatccgtatgtgcatcagccaacattttgccctttttgttacctttcacactccttttacccctgtagcatgttaaaagaagtctcagacatcctatcatgtcacttatacttcttcagtagtatctctgacagttaagaacttattttaaatataactccatttccaaatctatgaaaattgacgacaattttattgtatcatttgatagccactttatgttcaacttttcctgattgtcacagcaatgtccttttttaataggtacgtttttccagttagcatctatggtgtcatttagcttgttcttccatcatccttattttctgtaaactgaaaattagagtcgagtttaactttaatgttatttattattatttggggggaacatttcctggaaggttctgtatactttctatttcatcatatcaagaggacataattttagtaatccctgcttttaatgatgctgcaatctatcagtgaatcagattggcctgggccaatccttataaagttctccatcagacttggatccaatgatttcacctcattgttgatcattttgtagccatgatattttttagagtttgcaaaaatggtgacttttaattatataatttctgctgcgtttattatcaagaatttttttcataaagatcttttcatagtaactaatggtcaacttcaaaatatagtttatatcagaaaaagggaaaaaatgcatgatatttatcaattttcagaatcagatattctcttctaacataagatctaaataagcttacacatataatcaaggatgccagtaaatttttctaaaaaatttttcccttggaaaaattatttatttatttatttatttatttatttatttatttatttatttatttattgagacagagtttcactattgtctcccaggctggagtgcagtggtgcaatcttggctcactgcaacgtctgcctcctgggttcaagtgattctcctggcttagcctcccgagtagctggaattacaggcatgcaccaccatgcccagctaatttttttgtgtgtatttttagtagagatggggtttcatcatattgaccaggctggtcttgaactcctgacctcaaatgatctgcctgccttggcctcccgaagtgctgggattacaggcgtgagccactgcgctcggctgataaattatttgaattgcttctcctaattttttttgattaatatgttttgataacattgttcctatggtaatattatcaaaaaagttttctttccttcctttttgtttatcattaatgtgcctctgtatggttgaatttatttactcagaagatatttattgggcatctgtctttttttatcaagctctgtgctagtccctgaggatgtagatatgagccctgcttttttcttttctttctttctttttttttatttgagacagactctcactctgtcactcaggctgagtgcagtggcatgatcttggctcactgcaaccgccgcctcctaggtttaagtgattctcctgcctcagcctcctaagtaggtgagataacaggcatgggccaccatacccagctaatttttgtatttttggtagagatggggtttcacccatgttggccaggctggtctcaaactcctggcctcaagtgatctgtctgccttggcctcccaaagtgctgggattataggcttaagccactgtgaccggctgcttttttcctagaatatatagtttgggtttcttttccactcgtgatgtgatttaaaaaattgaacctgttgtatatgaatgtggttttgtaaactataatatttggtatcatatactatatttttttctatatatatatatgctactatatagtcatatagtagcatttttttttatagctttctttggagttcttggtcttagtgtctaaaatagtggccataaaggaatttggaagttaagttgttcttgctgacccaaagaaaaatcagatgtttctgtttaggacactgtatgtgacaaacaaggaagtttttattaatttatttttttgaagaagaattgatgagagaataatgagaattcctccaagattaaaagtaaattataagatcctgtgctattttaatgtaagccaacatttgaatttaatttgacttctattttcagtaaattagagtgaaattttagggatgtctttatctcctatagtgtgtgttttgccaagatttattaagggtaattttggattttagaaaatgtacagtttctaaaggcttgtgaacgttttatattgatagaaaatgtaagtaagactagtaacacattattttctccaaaggatcctgtgactgacacaaaaaatatgatataatattgaatctgccaaaagatgcactgttaatctagggttatgttatgttgttattttattaggtatgtgatactatggtgtgaattttagaatataggtaattatttaagtaattactgtaattctaaacatcttctgagatgttttctctaaagcagaaactcagcttttactcatgtttagataatgtgatatagctgttctagatatttgagattagggttgaggcaaattgttgacatataattaaaatgtattttataactaaaatttagaagaatggaaaaagtttacattgtatttataagactttgctaacatgctttatgacattacggagaagtactaggaagaaggagatctttaaaaggagtgatattctgtttgctttgctggagtaccttatcaggaaatttgaaatcttagccctttaattgtgatatctgttaattctaaaacttacactgaatttaactttgaaggtcaacatatggatttttttaaaaacaatatttactctatcaaaagattagttgtatttttgacttgaggaaatagcttaatctgaacagcacgaaacttgacaaaaaagtttgctaatacataaatattggctattttaatctgttgaaaacggaaggctagtaccaagggagacggtagtaaaattatagaaggagctagtgaaaagtaaacattatgcaacatgaaaagaatactaggggaaaaactgacagagtagaataacaggaagattagtcacttctggaaggaaaaaagtaggtaggggcagggggatgaagtactttaaacaggaatgtggaactggaagtgctagggctaaaagacagatgtgagcttatttgggagctaaactgggctttgaaaaaggaataatactggtagcatttaatatcaaaatttaaattttatgttaacaataagaaaaaaatggagaaaaatttttgttagggattataaaatgcctgttaaaataaaaagacttatatttactcctttgtggagctgaattggtttcggtcagacagcaatgtcaaatgcaaatcaagaaaatacatttctgaggccaaggcaggagatttcttgaccccagaaatttgcaacaaccccaaggaacatagtgagactctgtctctaccaaaaagaaaagaaaaggaaaagaaaagaaaaaaaattagccaggcatggtggtgagcacctgtagtcacagctactcaggaggctgaggtgggaggattgcatgagcttgggaagtcaaggatgcagtgagccatgatcagccattgcactccagcctgggcaatgaaacaagaccctgtctcaagaaatatacatatatattttatcttatatatatatatcttatatattatatatatatataatatatatgtcatatataatatataatatatataagaaatatatatataatttctttcaaaaccggtcaaagttcttttactttcaagtgatggataaaataaaaccattgtggatatcatgggatatatgtgctattggtttgaaataattttcacttttgcatttatttatctgacaaaggagtaccaatctctaaatattttaaggattatttctatgaattctctaaaaaatataaattgtaactgtctatatcatacaaaaatatttagcaatccttataacagaaaacaagatagtaaacattgtgtgtatgttcatgtgtgtgtatgtgtgtttattggtagtctcattaatccctagtctctactgacgttattagggacattagtggaacagattttgctgaacacattttcagccactctgagtgttcttaggtattttatttatttagagactgaatctgtgttgtcctgcctggtctcaaacttctgggttcaagcgatccttctgccttactttcccaagtatctgggactacagatgcacaccactgcccagctaaaatgtactttaaataaagtagataattctggggttatctcaaactcctggcttcaagtgatcctcctgtctcagcctcccaaagtcctgggattactggcttgagccactatgcttgccacctctggggttatattagcatgacaccaggacaaaaatctgcccatttttatatcaggaaaaaaaatgctactttcatttaggtgcagaaaatggcttatgcctattgaaataaaaaattcagtctaatttagacacctaagattattatttgctataacgacatggaatacatcactgtgtgtcactgaattcatggaaatgcagtacagaatgcaatacagtaatccccccttatctgcaatttcactttctgcagtttcagttacccatggtacaacacgataagatattttgagacagagaaaccaagagagagaccatattcacataacttttattacagtataattgttctgttttattatagttattgttgttaatcacttactgtgcctaatttataaattaaactttattgtaggtatgtataggaaaaataatagtatatttaggggttgttactgtccatggtttcaggcatcctctgggggtcttggaatgtattccccatagataaggattatctactatatacagtcaggtaagccattcccattgattttattacaaattgcagtgcttccatggcttgcttacacataatttgctgaggtaacttttgcagaaagtaaccattttacgtgaacaccaaatactgattaaaaaaatctctttttctccttttccctctctttctctcccttctccctctctccttccctgtcttactccctcgttcctgctcttcttctcttttcatactcacacagacactccttcccctacacacacacacatacacacatacacacacacaccctgcccctgggcataactgaataggaaatgtttattttccaaactacagaaaaaaaccttatctcaaacactgaaagtccttccttttcctggtttggaaacactaagtcatactgagtcacttgtagattttctttagccagttttatttaaagcataaagttgtgaggacaaaatgactcaggaatttgtaatgtaccattagagcttttcacttttaggatgctagttcatattcagatgacttagtattaaagattgatgggttgtttactttctagaagaatctgaggagctcactgtaacttcacttattttgacctaagtatggcctagagtttatgcttattaattcatttatttctcggtaaagccatgtccaaggaattaaataaaaggaagcggacccagtaagggttgatgaataagaagctgttaccttactcatttacatgtattacttcaaatgttattgattgattgattgattgattgagatggagtttttgctctgttgcccagactggagtgcagtggcatgatctcagcaacctctgcctcctgagttcaagcgattcttcagtctcagcctcccaagtagctgggattacagcctccccactaccacacccagctaatttttgtatttttagtagagacagggtttcattatgttggccaggctggtcttgaactcttgacctcaagtgatccacccgcctcagcctcccaaagtgctgggattacaggtgtgagccaccgctcccggccttgatacctctttaaaaatgaagtttgttaaaatgatcagaaactttaatgcagctgattgcattgccattgacatcagtgagaaataaaaactatagctataatggttaagttgagcagttggaatctgtatgtctgtatctatctatgtttatttagatgactggataaaagagtcatgattcctcctagtctatcacgtggtaatgccaaggtcagaaaaatcatttgttatgatctatcttatgtaaaagcctgtggagttactttgttttcctcactcataagatgtcaaaatgtgctttctagaatttttgaataatttttgcttaaattcagtgttaaagttggagactgaaacaaatttaaatctgttgttagccaaagagtaaatcaagcttatgtgggtgcaatatataacatgactacccaagaaattctgcaaaaaaatgtagttgtctagcaattaggtacagagttgtcatcttccttctatgataacttttgattataaaaataattgaaggtaaataaactgtaaatgacacaccacctcaagctatgccacatgggcacctaaataagttctttttagtaaatgccaccaaatggctgtatttcttacagcttatggctaaattctgacagaggggaggtgccttcaccataagagtattttctctttgaagttttcatggttttgtgtgtgtgtgtgtgtgtgtgtgtgtgtgtgtgtgtgtgtgtgtgtgcgcgcgcgcatgcgcacacactagtttatattaggttagagtttaaaaaaagctgaagatagccaaaattagtccagagagttagacttgctgccaaactaaagaaatagcttggtttcagtattcttctggcttctcagtcttaacatttggggacctgagtgcttgatttgagctgactgaaattaacccagatggcccactttgggtcctcaagagctaattaaaggaagtcatttcagttgctgaataatcaaggccgtaccttcctccaatgttggtttcagcccacaccttacagatgatcgctggctttctgaagctctctctaaactcataattattgtttggaccctgcatgtaactaaattaatttgccaaggatgggaatgaaatgtaagttttattggcaacaatggtaatcccccaaaacagaatgacagatacagtgatggtaataatgttactgccctgttaatgcctccgaagataagatacacttgaaaaataatgtgaaaactgaatttgtccttgatttgaaaaatctgagaatcacataaaatgtttgttaatttcttaagctggtaaatatcattaagagaaatggacacatataagataagtttgtgtgcatatttgtacacagttaggtttttggaaaaagacagggatatcagatgctcctgccaccagggttctggccaaacacgacatttcctactcttgtttttgaagagttctaacacttcatcagttttcaagtgtcagtagagagtgggcataaaaccacaatttcaggagctgcattctctgggtccagatttcatctttgctacttattagttgtataacttttggcaacttaacattatatgcctcagatttatcagatataccctattaaatggcaatgtgtctaccttgttaggttattgtgactcttaaataagttaatacatgtaaagaacttgtggaatttcagggcacacaatgttaccttaccattgatattatttgctgttattaaatcttaattttatgtaaacattttaaaatgtctgtctcgttaacaataaatgtgcaatatacaaataaatgaaaatcaaaattagtggtggagttttaatgaaataatttagagctccagctctggaactgtataatcttcattcaaatcactgtgaccttgaagaagttatgtaacctaactaagcctcagtttccttgtttccaaaatgggagcagtactaatatctaatccttagaggagttgtgaaaattaaatgggataacacgtataaagcacagagaacagtgcttggcacttaatgagtctacagtgtgtgttagctattgttttattaattctgtcatgatgaagtgaacactgtgatgcaatacttttatacttagaatctgcctatatagggttttcagttttgctaatgaggagtgttattctctgctgtgtaaagaacacatgctttggtgtttataatttttctctaataggtaaatgattaggaaaagaataacctgttattttacttatcctttgttgagatatttaaattatacaaaaaaactgtagatggctttttatatctataggattttagctctggataaatcagttaggtaaatgcattattaatgttggaacctgcttaactctgttgtccagccacattgtagccactggttaagtcgaacgccactagaaagaaaagcaaataatcaaaaacatcaaaatggaaatgaaatatggagcaaggaagtcattacttctgtaaaataaaggtctgagacctaatattttcccattggttggaagtattgattatgaaaacattagaattttcagtaaaattgtttctgtgccaagatggcagatagaatattatgaaagaaatgaccaaaattgcatatgacatttattttatatggtaacattctttctttcattaacaggaaattttagggcaattatttgcttattgggaatgagaaggatgaatgaaaatttaaaaaggattcatcaagtcttccttataataaagtaaacttttaagagcatgtttttccatagaattagaaacttagaatttcatagtaacagtgtattcatcacctcgtttggggagcagattttcagtatgatcacaggaaaacacctgttttgacactctgaaaaaggtgcagacgtacgggcaaactctctgtaggtgtaaataagaatgctttggctagcatcctgcaaggagatgggtctaaatggtctgctccagcttctgctgctgctgctgctgctaatattgctgggaaggaaaagtggctgacctggcatatccattactcttggtgctgcagcagtcactcaggaaatgttgtttaaggggaaccttctggatccttttcatggcaccatggcaagaagaagctgtatcttatctatggaagataaagcatggagttggctaatggatgctggtgagtgaataaggcaattggggagccagtttgctaagataccatttgggtaggcctgctcgctcaaggcctgagatgacatccatgggaaatggcttttggtattctgtacattagaaactgttttagagaggaaccgtggttttcacattggtgatctgatctgtgattctgtatatgttccataaagttctcatttattctctgcttcactacttgaaatactaatattgaagtttgttcagtacttcagtagatggagcatagttttccatgtaacttcttagtcactaatctctactcttgtttttgacttgccctacagtgatttttaaaaataactctgtggtatatgaaagcagttgttcctcctttcaattctaattgagcaccttttttttttcacaacagtagattataggattttaaattatcttcccttttatgatttacatcagacacaaacatgtcaatagtttacttttgtccaattaaaaattggaagaaataagaattttaagttaatcatagagatgtaggtcaaattttcttagaattattattctgtggttaataggtatcccataaaaacggtaagagctatgtttgggaacttacagtggcatagtaaaggttctgccaagtcatgggggaacagacttgtttaacttcaacttttaacagattcatttgaccaaccccctctcctcaactcttcttttttcatgaagagtgcctttccacatgtggcactaccggacagtaagtgtttattgagcacctactatgttgctaggcaaactaggtgctggaaatataactgtgagcacattcatcaaaaatttttccccttgcgatgcttaacaacagttatgaaaacctttgtttagatgatctgatcttatgtaagatactttaataacaacataatttttattcaaaaatgtaatctgaagagcttcataagtgaataaacctacaatttctgattgacaatgtttatttacttctcttccacttttttgggggtttgtttcatttttgttgtttagattgttaaaaactggttttcaccaatgggattaagagcataggtgcagaatacaaactgcaattgatttttaattttttatttaaagtcaaattattacctttaaaaaaaggtcagcctccatttggattctgccatagaggcttacacaatctttctgcattcaaacctatcacattgacatgattatatttttaaaaaattaagtttagtttaagtcaaaatctaaccttaggcactgtctctaagatgaaaaagtatttttaaaggaaaatttagattcctcattctcttataaaatcccagttccctcaaatttaaaatactaactgcttaggcagtacttaacatgtcataaggtgggagttacttcattttataacaatgtctaactcttagtgacttatcagacagaagtaaaccttgcacaagctatttgatagcttttatttcctgtgtcacttagaatatatattttgcaggtgaggggagaaatcaattttcccaacacaggatagtttgaaccatttgtctcaaagtaaaatagactactgttactattttagttaccttagaactaaataccttggaatagaagaaattagatatccgaagtcaagaattacacacacataactgcttttaggcaatagcttttcttcttaactaattacaagtataaagtccatggttaatttgcttcgagtcttgaaaaattgagagttcctaaatgattttgaccattttcattttcatttcatacatattaggaattattaaagtcctgtcagagtttatactgaacctctgacttgattttatccagctcatcaaagcaaaattgtcttagtagcactcttttgtagctgtttaatatttaatattcagtgggctccttaaggtgagttcttgaaggcttgtgagtagttgaagagctgtgaatggtggttaacaagctattatcatctccttgaaaagcataacatgaagcagagattcaggaaaatcttagacagtgattagtctatctgacagtgcatcaaaactaaattagttggccaagcacggtggctcacgcctgtaatgccagtactttgagaggccaaggcaggtgggtcatttgaggtcaggagttcgagaacagcctggccagcatggtgaaggcctgtctactaaaaatacaaaaattagctgggtgtggttgtgcacgcctgtagtcccagctacttgggaggctgagccaggataattgctcaaacccgggaggtggaggttgcagtgagccaagattgcgccactacaatccagccttccagcctgggcaacagagtgagattccatctcaaaaaaaaaaaaaaaggaaaagaaacaccaactaactaaattagttatattttctgtccttcctcttctttatcctttttctttttccatcttttgttcttctcatctctgcactgcttatctacttgcttcttctttgtattcttctcttatctcattgaatttcttccgtctgcctcatctgatcataacagaaagtgataagtttgataaaatgtatattgtacttactaaaaacaattttaattatttatcaatttaaaaatcagttgtttaaccttctctctgtctttccgttttctcatctaattcccaataatgttgccttttaatttctgctgccttgcggatcagcaccctgggattttttttttgtatttgtaaattaaatattgcgatgacaagatataataattttatgtcacttattagatttttaaccataaatgccgtaggcatgctataatatgtattccttacttttctttctagaactaaatctccatacccacttcatccgtgtttttggcttatgtatgggatgctagaatggcctatctccatgtattttgttgcatttctccattgcttcttgtgttctggcgggaatcttggtgattcttttcaagcactacctgagctctgtgccaattgttcctcttctcccagggtgttgtgctgcgtggtcatgtctccacttccttagccctgtccattgacagaaccttgggttctgtgatggctgcctctaaacccttgtgaaagcggggaatattcctccccctgctgctacagttgagcaccgtgctgggtaccatgttgccctctacacttgctttcagttgttaaggcttcccaagctttggctgtggctcagtgatcctgctgtcaaaaccctgaaactttcctagcctggacactcagtggtagcagcaggtgttgggatttctccaagcccctaagactctgggaggaagagaatggctgtttgacatagacctcaggagttttcaaagcaccaagaaacctctccagaagatatgtaaaggtaagattctgatttctctaggaagccgttctagaagctaaaaacaaaaccctgtagctatggatttaatataagttagtagttaaagaatgtccttgggaaactctgtgtttgatcaaaccaaaatatgagtcttagggaactatttattaaaaactcttataggaattttgtgtgagattcacattagttttatttatattaaatttggcatggaacagatttttaaatattcaattttttttattcggactctgtgaagcactttttcacaatctgcattgtatatctagtaagagaaatcttgttgagaattaaaatggttaaagataaaatagaaattattttttcaaataccgatgttttatttgcctctgtgttaatatttaaaaccaaaaacatttaatgaatatatcttcaaattcttcaagctgaaattcttaaatccataattaattcaaaaggaattagaagagcagttcaaatcttagttggtagtgctagggatgcattactgtcctttgtcaaaagttactgcttagtattctaactatggtgatttcttgctttatttttagattttaaagggaaaaaaattaaaataaaaaaactttttgggaaaaaaattcactacatatggatataaataacctgaatggaggatacttgtggagaggtggtaagggtgtgtgtgtgtatgatgggtaggggagagagatcagcagcatcttaagttaacaatacaaaacacctcttcagtgttatgagtttgtgacagctgttattcagtgcccccttccttttcttttttttcccccgcctctattttcaggcagtaatctgtgaagtgatattaagacacctcttctaatatgagatcattgttggccttactgtcagtttaggtcttctttttttcgcccatttgttttcttttcaatattaacttaattccttaaatggtttccccttgttgaaattaacgctattagcttactaccacattggagccctttaatttcaatggccaaaaatgcaacttaatttttaaaaatgaaggaaaatgtttactcatagctgaacaaaatgaaaaatattgatctttgacagtgtttattaaggatgctttttatttttagtaaactttatttttattgatatttcatttaacataatttcagagtagctctgtgctgtaagatgagcaaaagaacagataccctaaatctcaaagagctttttctttcgtgtttttcttctgagtagggcatgaggtttcagattccccagtgttgacatctattattttctaccttgagattttacctatagacacagaaagaggagataaaaaggccaggcatggttgctcatccctgtaatctcagcaatttgggacgtcaagaccagaggattgcctgaggctgtaagaccagcctgggcaatatagcaagacattgtctcttcaaagataaagaaacgaacaacaacaacagtaaaaaactgggcatggtagcaggcacctgtagtcctagttactcaggagactgaggcagaagtattgcttgagcccaggaggtcgaggctgcaggcatcactgcaccccagcctgggcaatagagtgagaccttgtctcaaaaagaaaaaggggagataatatcaacatgcaaaaactgaacaatagtaatctcttgtggtgtatacttgccacctctgtaagattgtaatgacaatgactgagttttttcctgccaagttcagttccattttttttttaagtaaaatatcagactatgtgaatttatagacttatttctcagagtatattaaaaatagtggaagttgggagatttttaattcttcatgagtccaagctgagacatagctacaactgacaggatctgttcaccatacatacttccaagtttggaaactatcagcaggcacctgcaactaaacccacaagcgtaaatgttccagagtgttagaatcttattcgcataatacctagcaagatcccagatgtaaacgggagaactcaaatgttcctttggattccgtgatggctgagaagcatccaggcctgctaactcactgaagaagaatccagcagaaggggactggacagaacctacttttgcataaccactgatcccacctaaagcagccagtgctgcatagacaaagccaagccagtataaaggcacctgtgggccagggtccatctgcattgttctcttctaattctctccagacaggagactgcagcaggcctgcacctataccactttcctgaaggtctgggtaaattgatgaggggacacaaactgtacgatgcttattttttaaaatgaaaagatgtttaacaaagcattttattcatatatgaaaacattcaagtttattccctctagacttcaaagtataactaaatgaaatgttttgaagtgcattaaaatgggtaattctttcatatataaaaacagaaaagtgaaattttcatgcttttattaacacttatagtgagtttataattttttaaaatgtgtggcacagtctcaagctagtggttagcattatttgcaagtttgtctatagagtgcattttgtcttttctatttctagaactcttaaattcccttgggacaagaaatgaaacaaatataagaatgtaaattatgaattctctttcttggaagtttaattttaaaaaatagtttaagtacttttagagtgggaatttagaacacttaattcacaaacagtatgaagtacttaatcactgaaagtattagaagtgagtgttaattctcaaaataaggtctcaatcgcagtcataatttctataagaatttctgccatcactctgttcataagactagtactgctcaattcccattgtttcctctctcccttctgttctgttctgtttttggagagcatgggagctgtccataccggtaggcaatgaggagaatgtttataattgagattgagtaatgtcaaatataagccttttatgatacgattatttcctttgttgtaataaatttctcagcctcattaggcatatccatgtagaaaataaatttaaaaataaagtgtgtacagagcagctaaaagaggtggcaaatatagggatgagcccagatagtgacatttttggtactttaagggactgtttcacttcaaaaacaaaatattcctgtttattatttttaggtggaaataaaagctcactgaatcagaattattcaaaattaaaatggtgtctttagttaatggtagtaatgtatggattaccttttaccttcagtcccattacaatgattattttatttatttttcacaaaaacaccttgaggtgtagttagcattatttcacctatacaagtgaggaaactgataccaagagaaacttggcctcacagctggacacaggattcaaactcaggaagtgtggctccagagtccatccatccttagaggtccttgttagttgtaaatctggcagtgagtgccagttctcaaatcagtcctaacccttttcatagcctggtaccagcaaggggattctgtctgcacctccttccaactcaattttgggttgccattcacttgctggctatttgacctatcctctctcagcaataatcccaccctgtctaaaatatgaataatattgtctccttctcagggtttttatgaagatttaattttacgagacagagtatgccaagcacttagcacaatggctagcatatagaaaatagccaataaattattgatgttattatgtaatgtttccagggtcacacaactagaaaaagattgagtcagaattcaggcccaactctgtcttactgggaaactaaacaaaacacacacacacacacacacacacacacacacactttccacaaacaacaggacctacaaagcaaaactcgtgctctttctggattataacactacctctcaactctaaccataactttttagatgagtaaataaggatgtcatgtatgtgctgaagggataagtagcatagtttagtggcttagggcaaactttcaaattgaggtttccattgtgtgacagcaggcaagttaacccctctgaggttcgttaactacacatattaaactaaaaacagtatcagttgtattgcattatcatggataataaattttaatacaattaaagagctccaataaatgttggcttttagtaattgatatagatataaatgtttctttaaaaatatattcacaaaattgggatgcatagttagtgaaatcataaacatgtaaagtcttagagatggatataatcttagtagatgatcttccatttttgaacagtctgtatgctttctctgtcaaatccatttaacctctctgaaaggtcagtggagaaaggggaagaaggcatcagagatcaggactgacccaaatatggggtggttgtacctccagagatgtgggcaaattttctcagtcttggcttgatgtcagtgactagcattggaaaaccagatggtggaaataacccctgttaagcagatgatgggattatcaatcttgtgttctttctcttttgaagcagaacccaaaccaacggttgggactccagtcctgaagagagagagagttacctggactgagttgaatgccagagtttaaccttgaatgctagtcacagcagggacttcttgaattcttggagctcaagtgtctggcctgccttactagattctgaacaccttgaggttgaggatgtgtatcataatatttatttgcaactttagaacagtgtctgggaaatagtgggcacccaatgcatgtttgataattaaataagagcataagatccagaaacggtacagaagatcttgtttaaggatcccaagccatcaaaggggttagaaatcgaggctgcagtgcagaaagcataggatgtcctggggatgggggtgggtgccatggagctgagggtgcataacatttgtaatgacgggtttaggaactcagtaaactgaaactgtcagtgtagcctattcaataaatgtaggaataaagtattccaaattgtttaaaaaatgttgtaagcagatgacatatttaaagaattgaaagccattggaatccatttatattagtttttcatacagtgaaaaataatatttctggcactagaaactcaatttggtaccagagacttgaggaaaaatgtatttataaatgtgtcattgatatattcccttataaataagttattaaatagggttttatgtttataatattataaaattgtaatttgtatgtatgaacgttaagaacttacatggatgatgggggaagtaagagtggaagtgtaaaagatgacattttttggggggtgactggtataactttgaggtttgttttttaactataattttactacttgtttgatatatgtttcccagaaatatggtgaaaacatctttcagtcagaatctaagttaaaaaacataaaacatagtaaaaagaacaaagagaattaactatgtttggtctattgagacaacaaaagaaaacacaaagcacaaactcatactttttttcggactataacactacctctcagccctaactgtgccttctctgataaatcaggatgccgtgtgtactaatgggagatgtagcaaagtttagtggttgccacaaaggtgattttaggtagtcctaacaggtattgcagtgatttggcgtggtatatcaaaagccagagacactggtaccttgtattaaaaccctggatattgtgtgctggcacctgaaggaaggttgtttagaaaacttaaactgagagtaaaactcaaaccaagtgtttccgtgaacatttgtgtcttcttaatttgaaaaaggccatgtattaaaccagtgctcctgtcagtgtggaactttctggtttctcaagaagagtctcttaaattaagcactaagttaatattacacatttaaacattttcgctttcgaaaacatacattgttgtgaaagtaaaatattaaatgtagagagaaattatcacttacacgtgtaccttattttgtagactatagagtccatttgtgctattattattttcagatgtgcctgtaaagtggcttcttttgctgttcttttcttcctgctctctctgtatacacaaatgtccatacagatggaaaggcacacaaagacacacagacacccatgcttttgcttttactgtaaaagagtcatactagagtagaaattacgtgacattaattctctgtaattctctatttctttcctttcatggctatgtatgcctgaattgtatgtaggtctagcataccatttgggcatgaaaacgttgttttacttcacttaccctgggagacttttttttttcctaaattcctaatgcctgtttttaatttattttggcaattcactgtgggagttttaattaggtagtatgtttgggttactattgaagcagtatgtattaactaccaaaagttaaactcatcgtaaaaccctttacacatgaaataacttagataccttgagtaccagcttttcttttccctgcccttatcctggatgtgtccttggcagtttaatctgctttattttactcctttaaaagcgtaagatggaatggctcaaataaaatcagtgggatctctccctgaggagaattttgtcatcagaaataaaagtgacaacaccaagaggggaagtgttataaataaagtgagtagtgtttggtaatcatcaccattcttgatttcctatgtggaaataggactttgatatatgcattttttaaagcatcttgcaatttaaaaaattacacatggaacaagccaaataaatatttttaaaatactgtttttatttagagagagagacagctgtataaactgctctgtgtatgtgtaaaacattgataatacattagacataatttgcagaaactactaattttcacatcatttccaagtagaactgcaaaggtacagtactggtttagctttatggttaaaagcattggctctagagccagataacacaggctcaaaccctagttctgccgtttactggttgtgttaccttgggtaggttacttgacctttttgagcttcagatttctaatctttatttaatgagttttaataatagaataataggattgctttgaggatcaaataagttaataaaccacttagaacagtgttcaataggctggatttttgtttgtttgtttgtttgttgctattctttttgtgttatgttttgtatccagcagaagtggttatttagcttcctattttatgaggtaggactgatgggaattgacagtcttaggaaaaagtacaactgtaagtcagtggaagtttttcctagtcaagatgtcaaatgccagaggtcggattcatgtggcaggatggggtccaaactgtacaaaagcttggagatgaatgaggtgagacagctaagcttaagacaaaaaacaatgtgaagttatgtccttgggcagtgtttgcagtagtatagtgccgctttggaaaacttagaagatgatcctcaactgtgtccactcaaaatagattgtgcatctcaatgtcatagagtcagaaatttctaccactatctgtttaaatcatcgtttatttatattccttaaatattcatacctttcacataagtgagatacattatttttaaaaacgcagttttccttcttgattttttcatattgtcccattattctgagaagagtttattttatgagaattaagttattatcttacagaataaatctgattactgactagatacaagataaccacatatttttcctagaataatttaattccaattttacttatttgtaccttatatgacttattttcaggttagaaaaatgtggtcctacagttttgttttgaagtttgcctgggccatgtgaagccaccattatcatttacgtcaaaaatgaaggttatctgttgcccaagagaaaaatacagcattctcaatttaaaacactaaaatagtgagggtttcataagctgtttcagtgatttctgaccttgggttggaaagctctcatgtctcagttacctcagtgggtatagtgacattgtcccagtctgcattaccaaattgtttcaaatcactttaattaaaaaaaaaaaaaaaaaccagtcatggtgactcacgcttgtaattccagcactttgggaggctgcagtgggaggatcgcttgagtccagaaggtggagacaagcctgggcaacatagtaagaccctgtctctacaaaaatttttttaaaaataagaataaattatctatattgtaatttcaaagtttaggattgagagattgagctcatgctttttagtgtaattataattttggagctatgctgacatatttgtaaacaaacgcttagtgaaaactcatataacaatagaacagccaactatactgtattaagattgctacatgagaagagttccctttaaaaaggaaatttcaactcagaggaaagtttgatttgtgttcattagagaaccaaaaatatttaaaaatattttccatgagttgaaaagtaacatgaaaaaaatggattattttaaaagcattaattgacactttaaaaaaatatatttttatagaacctcaaattgagttaaaattatacttttagtcacttttaggttatagttttcatatcaaatgtattttaaatttaggttttatgtcttttaagtcttcaaataggccattttctgcctattgctcaaatatgtcgacctttatagcatcaggtcagtttacactgaaagctttcaatgtgtttggcatttttaatggaagtcaggagctttacaacaaagaacacagaaaatcatgtaagaagacagtgtgaaaaagcactggacttggagtcagttatttggcttcctatgacaggtccccatttgatcaccatgttactctgtgcgtgtcatgttttctcggaagcatacctgccgccatcttgactccttggttgaacaaatctaataaagataatgcacagcacagtactttttgtaaactgatactcatctctgtgaaataattcatttatctgaaaagcaatataaatgcatgtttaaaaatatactgtgaaagtcaatatttttatgaattctgctcatgaatcccacaactgtatgttgttctcatgaacagtaaaattgaaaatgtaattattgtttttataaggataattggtagtataaattttaatctatttagaataacaggtgggtgaaaagaatacagacttttcctccaggatgagtcatagattttaaaaattaagatgatatttaccatttagtctacagttttgagaatgatagttctattgcttgaaagagttagataccttccaaaagagaaaaggaatgtaatgggaggagagataggcaacagaaaacaagcatctgtcccttatggagaaaaatgtatttttaacagatactagagaatatagaagttgctatatcaacaaaaaatttttatttgctcaaacaggtggataagccaatgtgtatttactgaataaatgagtatgtgctagtggaaatcaatgagtgagtgaataagtgaacaagtaaatggataaactcagtaggtaacacattattcttcctgtttattatttttaggaaacaatacttatttgaaagtattacaaagaattcacttaaagaaccctggtgaaattcctcattttctcttgtggtaataggcagttgttatagtacagtcataatcttttggttgtaatttattatgtaggttgaattactctacatttacagagcttttgggaatcaggagatgagaaaacacaaataataagcaaaagggcagttagtactatcctaaaaataaacattggcccatgtaatcacatcctaaataaaataaactgaagtgggttaagaaaattatagcggtttagaagaatttagtgtgttttctagccccattttcatttgattttgatagtaatgattattaaaggaagacagagtactttgtacttttaacatttagccggcagcagcaattgcagcaatatccaaagtgtattgaatgtctttggtgtagaaaaaggcactggacttgatatgatcatagaaggtttttaagtgcttgagaaaaaggttggggaagcaggtgaaatatgagattagggcttgttggaagtcttaggacattacagagagcataataagtcttactgcctcctgggaacagaatgcatggttacaaaaataaactgaggtggaatttgaagagaagggaagaactttggctgacagggaagcaagatcaggttagcaaaaattctggctatcaagacctctcctggggcccattccctaagaatgtatcccttgtgctaaatagagtatgtatgtacaggcacactgtacatgtttgaaatacttgaataacagttcttcagggattactgtgtaattatttgtatctattgcctttatcttagtgctgatttatggggctagattttgacttaagttacctacaatgtcttgtttcatagtttgagaaagtacataaacaatattgaaaaaactaaacatcagtggtgttatttagtgaatagaacagttggaaacatatcttatttttaaaagaatagctgaatgtgacatatccatggcatgttaaaaaatgaaaaaaaatggaaactgactttgaacagattattgaaatgctagtgtataatttttctgagttgcactataaaaaatttttactcttgcaactagaggaaatcactcaactggaagtgctggatataatttctgacttatccattagtcatcctaataataagaaagtatttagttcctttttttcatagcggtccatcttaaacaataaaattacatagcccactcaaagatatttcaggaaaattgaggtgttgctttcaaaaaagtattaaaaagtgggcacagtaaattgtctgtgtgtgtgtgtgtatgtgtgtattttaatgctactgtttttatcattcatttctcatcatgtagataggaaggttagcagaaaattaccttgagatttatagttgggatgactaggcctggagcattgccctttgctaagataagaaatataggtgttaaaattgatgttttctctttctttttagggagaacatgtaattggtttgggagggttgaatttaaggaaaaacatctgaaaccctcttacacagactgatagtgctgtgataggaagaaaatacccagagagaatgtacagtaagaagaaggaatctaaagacaaaccttggcgcatctctctataaccagcagtcagaaaggagggaaatcaaaagaaagtgtcagagaatgagtaggttaatacatagcaggtaaatgaggatggtgctttgccaaggcaaaagagaaaaacattcagaaagtaactagttattctatagagaagacaagaaatgagaaaaaaatcactttggctgttaaaaggacagtagtaatctttgaaagcagatgagtagaattgggagagaggaggtagaattcagattgtaaaccagattccaagaagatgagtcactagtaaattgggaggtaatgcatgaggcctcaacacatgtagacaactctataaagaaattcaataataataagagaagtgggagtcagctgaaggattcagcacagaagaggttgttgtagagcagtgagggttattccactgcagaatagtggaagcatgtctttttcactaagggaaggggcagccgtcagtggagagtgaaagaatgaatgacaaatcgctaaaatagggaaatatcagagaagatgagaagggattaagaaaaagtgagttagagagattggccttgaatggaagattaaccaaaaacttcctgagagacagaaatgaaggtgcttagccagattccattccctaatactacctgcattttggtcatccttgtcatttgggtggttccatgccttgggtccacactcctttctttactctttttaaaaatattttattttaactttgacttatagacccatctcgatagaatttcatgagggcagaggacatgttttatccatgcatgtgttctaatgtgtttcggtaacccccgaagtcagtgctcttaggggaagaagtttcatagccctgcctatcgatcatagtacaaggctgatgactaattagctacctaggtgaacctcaaaagctgtttccaaaacaagtcctcaatttctaatgaatggggcagattattatgtatcagacttttttttttcctgtttttggttaataaagttactgcataacaaaacataacttagagttcagaagtggatatatccaaagccagatagaagttgtaactataattcattgtaataagtagaaacatttaactgaaaaaaatgaaaagacaaaaatttgcaaggcaaatagttgttaaatgccatggtttataccactatgtcaaacaaatgagatttcattatgtcattatattttgtctgatccataccataagcacaaatcccttgattagaatagttggattgcattttctgattcttacatagcaaaaataactctaagcaaaagttaactaaatgttgtctgcctctcatgtagaaaacatgttttatgttagtgtttgttttatggttgctattttttctgtaagttattagttttcgagttttattaaaggtgtaatttcacagttggagtatatttgtcaaatcctgaccctttttacttgtacatatatggtacaacaattttttaaacacctttttatgtgtaaacacttataggaggggttttaaggtagtgggcttgaagtcagactgctagtgtgttgaattctggcctcaggaatcactagctatgcaatcagatacaagttactataagctgtagttgtgtcatctgtaacactgggttacttaaaattctttgctgaagtgacttttaagatatttaaatgaagtgaaacacaaaaagcatgcaaacagggtctagcacatgataaagccttattaaatgttagctactattattatattttcagattatattttggagattcaaaagtacttagtaaatgtccagcattgctctaagcatatacttggtctctactaatccactttatttatttttttcacaaatgatcgataatctatttttcaaagtacagttagacatagaaacattatgaactgtctaccatttttatggctttagactcaacattatatttgaagtgaaaaattgtagctattttaattcctaaattatgtaaagctataaaatgtgttatgttagccagttgattttattcctcctgaaaatactttgttttatttctcttcagaaggaaaaatagaaagataagacagtaaatttaggatgagcaaaatatggccgatgacagctttcatgtattcattttttcatgttttaaaaattattactatcactaatcacttaaaacactggttgattatgactgttgtacagttgcacagacatcttgttttcttctagagagtcccaggaaagcatgagaacatcatttaactacactagaattgtaaattaaaacaattttatcctggctcacgtctctagggctgccttgaaccactctttagtgtagactctcctgtccaacctccctggagtttttaaaacacatcgccctgtctcacatttctgtcttcacacaattttcttttcataaaaattttcccaccctggtttttttttgctgttgttgtttttttttggttgttgttgtttttaaacttacgactcatccttttagactcaataccggagacagctcctctggggagtctcccttgatcccctccatttcctaagctgtgggaaatgtctccgttagtaacccacatcagttcctgttgcagtcatttactgacctgagtcctctgggatgcagcagagacacatcatttgccctgcatgtactgtggctaacactgttgtgtcagtgctcacttagtgttggttgaatgactgcatgcaagaatagctgttttaatttggacattaggctaagttttatcctttttagggaggtgcatggatgtaaacttcttggattatgtagtacgttatgaaatgaacttgtttaagtctattttatgatgaatagtttacaaacatagaaacaacacttgtagtaaactctcttaaaattaaatccagacagatttaaactatgtgtgtcagatataattttttgtcttttatatgagagtacaaaagtcagagtactctgtgatcagcgaacaaaaacacacctcagtctcagaagcttatcctagcaaaggtgtctttctttctcctgtaaagtcaatggtgtactctttcatccaactactcaggaatccaagcttactctgccttcctctgatgtgtggcttccaaagtgtctgaggctgtgtcagagagagatgggaaaagaacattggtttccaataatctcttctgggaaatcaaaccaccatttacgcttagtgtcttttggctagaataatgtgccaccaacttaatgcaacagaggctgaaaaggttgccttttagagtagtcaggcagaggaaatagtgcgtaggaattgaccaagccactaggtgatttgtctccttttttgtgtttctatttttgatttatttaatttttttgtgatacttgagggcctggatgaatgatgtgaggtagataccactgggtaaattcaagtataaaacataaattctatactaattatcaagcccttgtcatatcttaggcatattaattattgaagaagagtctatctcaacaaatccttttttttttttttttttggcttatagtccattttgaaaatgtggtagacattttaaaacatagtgcacatcagcatgtaacctcaaaatctggcatgcaaattcagaggttcacaaaatctctgcagcccacccactgtagccttcccagagttaagagcacctggcctgtgctacatggattggtgaaatattagaaaagatgagagaaaatcagtatgagcataaattttatcttctttttggtgagtactttgaaagaaaattaggacctaatcccctagtttaagtgaaagaggtaatttggttgctacatgatagagattcattgaaggagaaagaagtagacagtagacaaagttgttgttcaaagtataatcaagagtcaggcatccaattgaggtctgaacaatagcttttattcatgttctctcaccagtctgtgttacatgaagctttaatgatatttgatgattgaattcattttttaaaatagctgcattgcagaaaagtggtttgctattaaaatattacgtaccttaggagactgaggtggaaggattacttgagcccaggagtttaagacaagcctgggcaacatagcaagaccctgtctctaaaaataataataataataactgagcatggtggcttccgcctgtggtccctgctacgtgggaggctgaggcagaaggatcacttgatgccatgaggtggaggctgccgtgaggcgtggtggtgccatggccctccagcctgggtaacaaagcaaaacctgcctcttaaaaaagaaaaaattacgtacttgagtttggatcatacagattaatgaaagaactacaaaagatttttactgcttaattctgtatttggggtctcttcatttttaaaaataataaagcaatttgcttt

SEQ ID NO: 1574 - DNA, 5940 bp, Homo sapiens
cttgccggcttccttgcaaagcccggtgcaagggcctctttcaaaatgaacccactggtgtgcctagcagtcggtagaagaagcgggagggcgtccggtctgcacgcccgccgcgaggttacaatgctgaacgcatgagatggaagataccaacgggaggccgaggggatccacggcgcccgcgcgggctccggcttcctcctgctctcggcgccgctgggcgaccgcccatgacccgctcttgcgggctctgtccggttgacaggcgaccctgtggcccggggaagcgcgggagggcgccggcggaaagttgaagagcgtttttctcgccgccgcgtgcattaggagctcgacgagtccgccctgggcttcctggtggggctgggcgggcgggggaggggccgcgcagcagcagcggaagccagacctcggcgataagaggctgcacagcgacatgcaacagtcttttcactgcagctgaatgagttgtggcgcccacaatgctcccatgacaaggagctgacaagttccattttccgtcgcgggcatcttggaatcatgactcccacaatgccttgggcacttggtcgacagtggggccgcctctgaaaaaaaaaatgtgagaggttggtactaagaagtgcctttcctgacgtctctgctgcttggaaccgcttctagagcagtctctgcttttgccttgcttgctgccagctagactgtgacgacagcacatccaccctccacctctagcccagacacccccatttctacttataatcaagagaaaagctctaagtatctggcattgccctaggctgctttagtgttaaaagaaaagtttgctgaaaaagtaagatatcttctgccaggaaatcaaggaggaaaaaaaaaatcattttctcgattttgctctaaactgctgcatctgtctatgccaaactaatcaataccgattgcaccaccaaactccattgcaaattcagctgtgaggagattccctttcagacaactttgctgaaagcagcttggaaattcggtgtcgaagggtctgccacgttttcatgcttgcattttgggctccaaattggcactgggaaggggttactgagagcacaaggctgataccaggccctacttttaaacgttcatctacttacaatcctagtatttctctaaaaaccaaaacctctttgaattaacagtttcatgctgtgaatttctagtgggagatcttttccttgatattgacgacacaattttccatgtacttttaaagcagggagtggggaaaagtattttgaggggacattttcatcatcagttcagcttttttttttggttgttgctcttttttgggggggttgggtttgttggtttcactgaaacatttaactacctgtaaaatctaaacatggctgttagtgtcacaccaattcgggacacaaaatggctaacactggaagtatgtagagagttccagagggggacttgctcacggccagacacggaatgtaaatttgcacatccttcgaaaagctgccaagttgaaaatggacgagtaatcgcctgctttgattcattgaaaggccgttgctccagggagaactgcaaatatcttcatccacccccacatttaaaaacgcagttggagataaatggacgcaataacttgattcagcagaagaacatggccatgttggcccagcaaatgcaactagccaatgccatgatgcctggtgccccattacaacccgtgccaatgttttcagttgcaccaagcttagccaccaatgcatcagcagccgcctttaatccctatctgggacctgtttctccaagcctggtcccggcagagatcttgccgactgcaccaatgttggttacagggaatccgggtgtccctgtacctgcagctgctgcagctgctgcacagaaattaatgcgaacagacagacttgaggtatgtcgagagtaccaacgtggcaattgcaaccgaggagaaaatgattgtcggtttgctcatcctgctgacagcacaatgattgacaccaatgacaacacagtcactgtgtgtatggattacatcaaagggagatgctctcgggaaaagtgcaaatactttcatccccctgcacatttgcaagccaagatcaaggctgcccaataccaggtcaaccaggctgcagctgcacaggctgcagccaccgcagctgccatgggaattcctcaagctgtacttcccccattaccaaagaggcctgctcttgaaaaaaccaacggtgccaccgcagtctttaacactggtattttccaataccaacaggctctagccaacatgcagttacaacagcatacagcatttctcccaccagttcccatggtgcacggtgctacgccagccactgtgtccgcagcaacaacatctgccacaagtgttcccttcgctgcaacagccacagccaaccagatacccataatatctgccgaacatctgactagccacaagtatgttacccagatgtagaattttcatcactaaacaatcatgctaaagaggaaaggacagtgtgcttggttagagtaaaggacgaggtcattagccatattgtatatatcgtcaagcaacacacacaaaagttcctcagccacaagacatccacatattgcatgttaaccagaagaaaagacaacattttccggaaatccactgcacactgttgcctatacactttgtacatttaattgatatttgtgctgaggtgatattcctgtctaaaagaacaacattgtctttcttttctagcacagagttatgcattcaaagatgcatacctagttagtttcctatatattcatgccatcttgaaaagacagactatggtgtaaccatgattctattatgtattggtacgtctgtagaccaagatataattttttaaaaataagtttatttctttcaaggtttacaaataacaaaggtgcaccttgtatttaaaattgccattatagatgagagcgtgcatgcacagtcatttttgtttaagagtaatatttttaatgtaatagattgtaagacgtggtgagggagggatctgacagagatgaatgtgccaagcaaaaccacaactgtgtatattttaaagcacatcatggctttaagtaccatgttgttaaggattctcatgaagtgccatagactgtacatcaaattagagtattatttcttcagtgttattgttttcagagccacattttgttgcatatttgctagtactaatcagtcaaagggcaccattctttttttttttttttgaaaccaaagctgtctcagaaatggccaatttaactttacagtaacaatagacagcacaacacaaactctctcaatacagataaactcacacatactggagatatatatataatagatatatataaaattattttaatgcattgtagtgtaatatttatgcatactatactgtataacatgttattcaaaagggattgccatttctgagacacagtaacaaaaaaatgaggaaattattttgcttctatttatagcctctgtcaaaagtcaaaagactataaatgctttgcaaaaatggtttcacgtttgcttaaatgcttcatcacagtcacattcaaaatagtgactctaaacaaagaagaaagcagcactgtcatcagatgcatgataaaccaaaatatgaaaatgggaaatgtttaattaacctagtaattgggtgggttaagtacatgggtgaattttatatgtgatttttgttttgttttgttttgttcagattaactgcttatagccttagaaagccttttacaaaattaaaaaaaaaatagatgtgcattcagtttttaagaatggaatcatccaaaggaattcctttttttgaggtttggatgttgcagctagtaaaggatatttttgctctgttcagcagttctaaaaattgctgaagtaggggccaggtcactggtagttatagtatggaatgggagaagtgaaagttcagttatagaactttccatacttccaagtttactgcaagtttttatgcttgagagagatgctttctaatataagactgatgtgttgattttactgattgtactgtacatctattaaagccttagattattacattacgggttggaacccataccaatgtaatttcaatcgtgttaagaaagtaatggtgacttcacatgttattgtagttagttacattatagaatattacttatttttcttgttaaaatgtagtttttcatttcctacatttattagattttcattttctattaacaattgaataccatttcagtttatagacttgttttattagattttaccaatgaatttttcaaaatacaaaaaaaagtagtttttccttcataacatactcagttttgaattacatgtagtgtcacatgaatattcgtattgttaactaaatgatttatattttactgatttaatattacagtgtaagaatgtcagtcattgttagttcttgtctagttttcattaaaagaacaaagatcttttatatggatatcttataaatatataatcattgctaagtaagaagttaagttgttgctatcgcaacaatcctggcagacaattgagtaatattttgatgatttattttgtttgtaattagttattataagaagatctagatcctagatattagaataaaatttattttctactgtatccatttcaaatgttaaaatattgtttaatatttttgaaatccctgagtatcaggccttgttataaataagctgcataatcaataaatagaacaagggactttttgttgataatccaaatactcaaagtttacgtaatgaaaattatagcgtgtgtgcaaactcttgagggttgattatgctgcaatttagcatgttggaacgtctagggagaaggttgactttttgcacttctgtatatagtcaaaagagagaaacctgtataatagtaagatcttattttgaataaaaacgtctataattacaaggagttttgttaaggctaatacaatgacagactgagcaaaattgcttgcaaaagtggcacagagttagcactccataccccttcaaacatgttgctttgctttcttgtggacagcttgtagtttgccaggattttttcagctggaaagatacgccatcctttcaaaccctcatgactgacaaaaactccatggggccaaatctgcctgaagatcattaccaaaaatagcaggtacttctaccattaaggtgaaatcatggatcagatattccttacatttttcaaaactactgcatgtttaaaacttcaacaaaaaaagagagaaagaactatactaagaacatatattattcagatcagtttctgccaatttcagtggtttattgttcacaaaaaaatcttcaaaacaagtattgactttcacaaaatttaaatcataaacaggcaaaccaaacagcacactgtagctatagttgttatgtgattgttttttaattgctgtaggatcctgttctttcagcaggtgaaaaataaaacgcagttcaaatttcatggttttaattttcaactcagaagcactcaaaaatgcaaaatgtgataatgggcacttgtttaaaagaattagtgtatccagccttcactccagctggttaaaaatgttgcacttatcagcaaccctaccactttcatctgctgaaaggacaaatgtgcttggttttactattatgtaatcacaacttactttctgcttgtagttgcttaaaattatgtattttgtcttgggctgcaatttgttttatgcttattttattattactgcagtagttgactttgctgtatggaaaaataaagtgaaattgccctaataaaacttctctttcttaagt

SEQ ID NO: 1575 - DNA, 1113 bp, Homo sapiens
atggctgttagtgtcacaccaattcgggacacaaaatggctaacactggaagtatgtagagagttccagagggggacttgctcacggccagacacggaatgtaaatttgcacatccttcgaaaagctgccaagttgaaaatggacgagtaatcgcctgctttgattcattgaaaggccgttgctccagggagaactgcaaatatcttcatccacccccacatttaaaaacgcagttggagataaatggacgcaataacttgattcagcagaagaacatggccatgttggcccagcaaatgcaactagccaatgccatgatgcctggtgccccattacaacccgtgccaatgttttcagttgcaccaagcttagccaccaatgcatcagcagccgcctttaatccctatctgggacctgtttctccaagcctggtcccggcagagatcttgccgactgcaccaatgttggttacagggaatccgggtgtccctgtacctgcagctgctgcagctgctgcacagaaattaatgcgaacagacagacttgaggtatgtcgagagtaccaacgtggcaattgcaaccgaggagaaaatgattgtcggtttgctcatcctgctgacagcacaatgattgacaccaatgacaacacagtcactgtgtgtatggattacatcaaagggagatgctctcgggaaaagtgcaaatactttcatccccctgcacatttgcaagccaagatcaaggctgcccaataccaggtcaaccaggctgcagctgcacaggctgcagccaccgcagctgccatgggaattcctcaagctgtacttcccccattaccaaagaggcctgctcttgaaaaaaccaacggtgccaccgcagtctttaacactggtattttccaataccaacaggctctagccaacatgcagttacaacagcatacagcatttctcccaccagttcccatggtgcacggtgctacgccagccactgtgtccgcagcaacaacatctgccacaagtgttcccttcgctgcaacagccacagccaaccagatacccataatatctgccgaacatctgactagccacaagtatgttacccagatgtag

SEQ ID NO: 1576 - DNA, 90100 bp, Mus musculus
  misc_feature (1696)..(5225): n = a, g, c, or t.
  misc_feature (10303)..(10322): n = a, g, c, or t.
  misc_feature (32410)..(32429): n = a, g, c, or t.
  misc_feature (34679)..(35400): n = a, g, c, or t.
  misc_feature (38214)..(43788): n = a, g, c, or t.
  misc_feature (45408)..(46631): n = a, g, c, or t.
  misc_feature (47453)..(47810): n = a, g, c, or t.
  misc_feature (49495)..(49572): n = a, g, c, or t.
  misc_feature (52976)..(53745): n = a, g, c, or t.
  misc_feature (59340)..(60268): n = a, g, c, or t.
  misc_feature (76210)..(76409): n = a, g, c, or t.
  misc_feature (83590)..(83609): n = a, g, c, or t.
  misc_feature (88024)..(88383): n = a, g, c, or t.
gggtcctttgacaaccccaaaaggtcatgacccacaggttgaaagccacagcaagctgacctcccagccagattgaacttgacctcatcaatctttattgtgttcatggaggtcagaggacagcttgtgcagttgtcagggaatgaccaggctctgaccttttccttcagacaagcagggaagtctcagccctaatccttgttcctctgtgcaaactcaagcttgcaggttggaagggcaacaggagaaagagttccttctcctgacttaaactcctagcaatcaaataaataaatatattgatagataaaagctaggcagtggtgatacatgttttttgtttgttgaggcagggtttctctgtgtagccctggctgtcctggaactcattctgtagaccaggctggccgcaaactcacagagatccacctgtctctgatgggattaaagacttgtaccgccaggcagaggtggcacaggcctttaatcccagagtttgggaggcatgggaggctctatagaaccagttctaagacagcaaaggctacacaaagaaaacctgtctctaaaaaacaaaagcaaaacaaaagaatctaagggcctgggacaacacaggtttcactcttctgacctctggaaacatacagacctggtttaaaatgctggctctgtcacctagttgccgacttgctgggtggtcttgggaaggtcagttacccggtatagtgttctgtaggcctccccttaatggaattacggtaggataatactttaagccctaagaaggagatgagatgctggtgacagtgtcagtgacaacacaatgacctctgcattgtgggtggcaaagacaagtcaataaaggtgtagggggtatcttctctcttgatgagaatagcacaggtgcatctgggaaatggctgctcttctcacaagctctctgaagtgccacagtggcatgggagaaacaataatatcgctgctctggccaaaggatccggtcctggccttctagcttgggtgggcaggaggcaggagcagattggcttctggaacaggtagcacccctgggatctctagctggagtcagctaatacatccacactgctgggatcttgtcccaagcaaggtcttctgctgcttctggccttgggaagcccttggaggtcattcagttgctttgtgttgcttctgatatcattacctcaacgttatgaatccttcttgtacaacatgttcaagatctatctatctatctatctatctatctatctatctatctatctatctatctatctatctatctatctatcggtatatctcatatccattttccattttctttctagaaagagccatacctgactgtaatgccatgtgcctgggttttcaatatagaccatatgggaataagactccaggctgattgattcacattcgttagtaagtgcggtctaggaaaaggcaacctaagtacagaggaagaacacgctctgggcagaggggactgtagggatccaagcaggaagtcttcgtacctgagtactattactgtcaggagtcgggtgaaaggaaaggaaggcatttaaggcagcaagcaaccacatggagttattcctgggcacaaccacaagtcattcaattttggaagcagagagaagggatttatcaaatgtatgacttaaaagtatcattnnnnnnnnnnnnnnnnnnnnnnnnnnnnnnnnnnnnnnnnnnnnnnnnnnnnnnnnnnnnnnnnnnnnnnnnnnnnnnnnnnnnnnnnnnnnnnnnnnnnnnnnnnnnnnnnnnnnnnnnnnnnnnnnnnnnnnnnnnnnnnnnnnnnnnnnnnnnnnnnnnnnnnnnnnnnnnnnnnnnnnnnnnnnnnnnnnnnnnnnnnnnnnnnnnnnnnnnnnnnnnnnnnnnnnnnnnnnnnnnnnnnnnnnnnnnnnnnnnnnnnnnnnnnnnnnnnnnnnnnnnnnnnnnnnnnnnnnnnnnnnnnnnnnnnnnnnnnnnnnnnnnnnnnnnnnnnnnnnnnnnnnnnnnnnnnnnnnnnnnnnnnnnnnnnnnnnnnnnnnnnnnnnnnnnnnnnnnnnnnnnnnnnnnnnnnnnnnnnnnnnnnnnnnnnnnnnnnnnnnnnnnnnnnnnnnnnnnnnnnnnnnnnnnnnnnnnnnnnnnnnnnnnnnnnnnnnnnnnnnnnnnnnnnnnnnnnnnnnnnnnnnnnnnnnnnnnnnnnnnnnnnnnnnnnnnnnnnnnnnnnnnnnnnnnnnnnnnnnnnnnnnnnnnnnnnnnnnnnnnnnnnnnnnnnnnnnnnnnnnnnnnnnnnnnnnnnnnnnnnnnnnnnnnnnnnnnnnnnnnnnnnnnnnnnnnnnnnnnnnnnnnnnnnnnnnnnnnnnnnnnnnnnnnnnnnnnnnnnnnnnnnnnnnnnnnnnnnnnnnnnnnnnnnnnnnnnnnnnnnnnnnnnnnnnnnnnnnnnnnnnnnnnnnnnnnnnnnnnnnnnnnnnnnnnnnnnnnnnnnnnnnnnnnnnnnnnnnnnnnnnnnnnnnnnnnnnnnnnnnnnnnnnnnnnnnnnnnnnnnnnnnnnnnnnnnnnnnnnnnnnnnnnnnnnnnnnnnnnnnnnnnnnnnnnnnnnnnnnnnnnnnnnnnnnnnnnnnnnnnnnnnnnnnnnnnnnnnnnnnnnnnnnnnnnnnnnnnnnnnnnnnnnnnnnnnnnnnnnnnnnnnnnnnnnnnnnnnnnnnnnnnnnnnnnnnnnnnnnnnnnnnnnnnnnnnnnnnnnnnnnnnnnnnnnnnnnnnnnnnnnnnnnnnnnnnnnnnnnnnnnnnnnnnnnnnnnnnnnnnnnnnnnnnnnnnnnnnnnnnnnnnnnnnnnnnnnnnnnnnnnnnnnnnnnnnnnnnnnnnnnnnnnnnnnnnnnnnnnnnnnnnnnnnnnnnnnnnnnnnnnnnnnnnnnnnnnnnnnnnnnnnnnnnnnnnnnnnnnnnnnnnnnnnnnnnnnnnnnnnnnnnnnnnnnnnnnnnnnnnnnnnnnnnnnnnnnnnnnnnnnnnnnnnnnnnnnnnnnnnnnnnnnnnnnnnnnnnnnnnnnnnnnnnnnnnnnnnnnnnnnnnnnnnnnnnnnnnnnnnnnnnnnnnnnnnnnnnnnnnnnnnnnnnnnnnnnnnnnnnnnnnnnnnnnnnnnnnnnnnnnnnnnnnnnnnnnnnnnnnnnnnnnnnnnnnnnnnnnnnnnnnnnnnnnnnnnnnnnnnnnnnnnnnnnnnnnnnnnnnnnnnnnnnnnnnnnnnnnnnnnnnnnnnnnnnnnnnnnnnnnnnnnnnnnnnnnnnnnnnnnnnnnnnnnnnnnnnnnnnnnnnnnnnnnnnnnnnnnnnnnnnnnnnnnnnnnnnnnnnnnnnnnnnnnnnnnnnnnnnnnnnnnnnnnnnnnnnnnnnnnnnnnnnnnnnnnnnnnnnnnnnnnnnnnnnnnnnnnnnnnnnnnnnnnnnnnnnnnnnnnnnnnnnnnnnnnnnnnnnnnnnnnnnnnnnnnnnnnnnnnnnnnnnnnnnnnnnnnnnnnnnnnnnnnnnnnnnnnnnnnnnnnnnnnnnnnnnnnnnnnnnnnnnnnnnnnnnnnnnnnnnnnnnnnnnnnnnnnnnnnnnnnnnnnnnnnnnnnnnnnnnnnnnnnnnnnnnnnnnnnnnnnnnnnnnnnnnnnnnnnnnnnnnnnnnnnnnnnnnnnnnnnnnnnnnnnnnnnnnnnnnnnnnnnnnnnnnnnnnnnnnnnnnnnnnnnnnnnnnnnnnnnnnnnnnnnnnnnnnnnnnnnnnnnnnnnnnnnnnnnnnnnnnnnnnnnnnnnnnnnnnnnnnnnnnnnnnnnnnnnnnnnnnnnnnnnnnnnnnnnnnnnnnnnnnnnnnnnnnnnnnnnnnnnnnnnnnnnnnnnnnnnnnnnnnnnnnnnnnnnnnnnnnnnnnnnnnnnnnnnnnnnnnnnnnnnnnnnnnnnnnnnnnnnnnnnnnnnnnnnnnnnnnnnnnnnnnnnnnnnnnnnnnnnnnnnnnnnnnnnnnnnnnnnnnnnnnnnnnnnnnnnnnnnnnnnnnnnnnnnnnnnnnnnnnnnnnnnnnnnnnnnnnnnnnnnnnnnnnnnnnnnnnnnnnnnnnnnnnnnnnnnnnnnnnnnnnnnnnnnnnnnnnnnnnnnnnnnnnnnnnnnnnnnnnnnnnnnnnnnnnnnnnnnnnnnnnnnnnnnnnnnnnnnnnnnnnnnnnnnnnnnnnnnnnnnnnnnnnnnnnnnnnnnnnnnnnnnnnnnnnnnnnnnnnnnnnnnnnnnnnnnnnnnnnnnnnnnnnnnnnnnnnnnnnnnnnnnnnnnnnnnnnnnnnnnnnnnnnnnnnnnnnnnnnnnnnnnnnnnnnnnnnnnnnnnnnnnnnnnnnnnnnnnnnnnnnnnnnnnnnnnnnnnnnnnnnnnnnnnnnnnnnnnnnnnnnnnnnnnnnnnnnnnnnnnnnnnnnnnnnnnnnnnnnnnnnnnnnnnnnnnnnnnnnnnnnnnnnnnnnnnnnnnnnnnnnnnnnnnnnnnnnnnnnnnnnnnnnnnnnnnnnnnnnnnnnnnnnnnnnnnnnnnnnnnnnnnnnnnnnnnnnnnnnnnnnnnnnnnnnnnnnnnnnnnnnnnnnnnnnnnnnnnnnnnnnnnnnnnnnnnnnnnnnnnnnnnnnnnnnnnnnnnnnnnnnnnnnnnnnnnnnnnnnnnnnnnnnnnnnnnnnnnnnnnnnnnnnnnnnnnnnnnnnnnnnnnnnnnnnnnnnnnnnnnnnnnnnnnnnnnnnnnnnnnnnnnnnnnnnnnnnnnnnnnnnnnnnnnnnnnnnnnnnnnnnnnnnnnnnnnnnnnnnnnnnnnnnnnnnnnnnnnnnnnnnnnnnnnnnnnnnnnnnnnnnnnnnnnnnnnnnnnnnnnnnnnnnnnnnnnnnnnnnnnnnnnnnnnnnnnnnnnnnnnnnnnnnnnnnnnnnnnnnnnnnnnnnnnnnnnnnnnnnnnnnnnnnnnnnnnnnnnnnnnnnnnnnnnnnnnnnnnnnnnnnnnnnnnnnnnnnnnnnnnnnnnnnnnnnnnnnnnnnnnnnnnnnnnnnnnnnnnnnnnnnnnnnnnnnnnnnnnnnnnnnnnnnnnnnnnnnnnnnnnnnnnnnnnnnnnnnnnnnnnnnnnnnnnnnnnnnnnnnnnnnnnnnnnnnnnnnnnnnnnnnnnnnnnnnnnnnnnnnnnnnnnnnnnnnnnnnnnnnnnnnnnnnnnnnnnnnnnatacagaacgctgagtggaaggtgaggaagagctgggagagttggagcagcagtcatatatggtaagctgcagtggttacagtaagcacaaaggcctgaagcaagagctggcttaacagtacacagaaggtaggcatggcaaagggggaaggatgctaggtactcgggccaagcatgcaggacctttgggccatgataaggatttgggacgtttagttttagtaatggggaagtatctagactttctgataaggtattgggcacctttactggggaggaccccaggaaaaaggctgtttgctgagacaaaagtcaggaatcaagacctctctgaggttgctgagtatccagttttgttagacaacagttcaagcaatttccattgctgtgtcatttaactacctagactgtagtttattcccccagggatgttactacctccagagaacatattccaattatcttggaaaacaaggtaattagaattatgataagtattcaccatctcagttctcacaatgaaaaaccacaaggacaaaagtaactccagatagctcagccctccttggcactggggtgggggctgacagcggatggagccactaagttatctgaaactactgttagtgtccagtcgctttcctttcaaggtacaaccctactggaaaggagggatttagtccacagctatttaatgagtacctactatgtgtaggcattcttctatagggatagagcagaaaacaagatttgatatgagggcagattcctgtccttcccagagcagacaggtatgcaagataaatatgtgaaacaccctagaaaaaagtaaagctggcagtggatatttgggattggagggactatggtagttttaaataggctacttagggtcggggccacaagctcattggaggaggagcactgcttagcatctgttggaccttgagtgagtccccctagcccctttcagattcattggacatctaatggaaatgaatggaaaggcctggtatgagacaagcctcgtgcgggggtgggagtaggagcttctgtgaatagtgggtgtgtgtgcagagtggaaagaggaggagctacgtgtcgacaggtaagggcaggggctagcacacatcctggagtcctctgcaattcgagctctacaagatgcaaatgtgcactttataattttttcccacatcccagagcaaaggaaaaaaaatggtgctcatgtggtcacttctttttttcagtgtactgaactagactctggggggtggggggtggggtctcgtcttccctaggcagcacacagaagggaagcctgtagcatcaaaggatacaaactgggctgagacccaggattcttgtttgttacttaactatgaccttggggggaaacccctagatatctgagctaggagaagagcattagatgaaggaaatgcttagtctttttgatcaggtgagcaccacatgtcatctgggtgaggactgcagaggagaaaagagctgtttctgagtcaaacgttatcagagtatggctgcacacacctataattaaagaatttgggagtggagacagaaggggcaagagtccaaggctgtattgagccctgtgtggttctgtctcaaaaccaaccaacccactgaccaactaaccaaagaaatggagaaatatgtcaggactcaagcaacacaatgaaaagcttctggcctgtatggcgtccattatcccattcttgtgtggcactcaggatcagggcaggggagcatttgctttccatggactgaggaggcaagagggtaaggttgtggtacagtcttctgggtcacaagagcctgaactctcctcaagataagccctagagttggcataatctgtcaatcatgatacaaggccccagaaggtagagagctccagcacagcgctgctaggtagtcacgtggctaactcaccatttcacttcataaatcatgtacttcttttcccactgcctcaccatgaggctggctacgatcctccttcttcagcttcctgactgcaggtgctacagtccgtgtatctatacctggtttcatgtataacttctgctacatttaagagtatccatacatgcagccgggcgtggtggcgcacacctgtaatctcagcacttgggaggcagaggtaggcagatttttgagttcgaggccagcctggtttacagagtgagtaccaggacagccagggctacacagagaaaccctgtttccaaaacccaaaaaaaaaaaaaaaaaaaaaaaaaaaaaaaaaaaaaaaaaagaaaagaaaaaaaaaagaatatccatacctatcaataaagttgagattattcctttgttagttgcagtgccagccttcctatataccctttcctgcataatgaggaggacagtctagggcacaaatgaatcccctaaaagccctagctgcatacttgatgcatattaggttcttgactcttgtgcttgtttatgacaggcaagtactctatcaccaagttataggccaagcccagttttcccttccatatctgaatccagactggcttgggatgcttaaagctcctaccttaaactcagaaggactgggattgctcttccctttctcacccatcctcggtggattacatgttgtggatctactatataaaccagtgcttgtcaaactctgatgtgtgaacccattgcctgggggactcccactaatctgcagatgtctggggttggggcgaggctgggaattatcccttcccagcaaggtcaagggttatgcttagatactgacatcgggtcattctttcagtagtaggaatttagacacaactaagttctatcacttaagataaggaccctataaagggtgccaaagactgtttctttaattaacctttccacttttgcttcactcagcttcaaaacccactaagtgcagaatactagcagggctaggccagaggatatttctcttggttttggaacctcctccaggaagatcttgcaactacccctctctacctcttttggctttttgatcttaccttttccctctgatgataattaccctctaattagcacccaccaccatgtcatctaaataattaacctaagtgcagactgcacctctgcctgccatcttcaaacaaatgataaaacaatatcctaagctgctgattaaaaagacaaaattggcccaaataggtcatatatgtataccatatatagtgcaagactggttccttagcataagttaagaggcgatggcctgctgtgaagtcagtcaggctgatactggggaaactgcaaatgcaagaatgtaagttatgaacttaggatcaaaaggaaaacaattcaagtgttgaaaatccaccttaaattcctattgggaagtgctcatgttttttatttttaagagggtggcagaagggagtgccaagggcatctaaccaagggcatgctggagaaaaactctactattaacttatcctctcagtcagaagtttttatttttcctttttagctttgttggaaaaatccattgactacagtggagggagcttgaaatttgaggagtctttaaaagcaaatctggcagaagaggttgtcttttcactaaaagcaattagtagttttctaatttctcagatgagtctccattagctgcaaggccaatgactgaccactcacttctcctaagggaaactgttttagaaagctattttctcattgaaggtttaaaataaaacctctccaagtttctcaaccaggtgattcactgacatgaaaaaaagtctctgcagaagaaaacttaaaaatactccgtccatcattcactaccttcttgtccgggactagttagttgaaaacccaaaccaaaacaaacaatccgtcccccccaaaccaaaactttattatgaacaatttgagacataaatactggtatgatagcatatgtgtacatatcccacagctccaacatcgaaggacatcctcagttaatttattcccttctttcccagtttccagaggcttagtctaaaacaaaataaacgtattggatcattttacctatcaacactttagtgtgtgtgtgtgtgtgtgtgtgtgttttaaatttaaagccacattaccgtaagcacgttcgataaggatgacgataattccttagtaacataaaatactcggggagcgggggtggggtgggggtgtggggtgtcattgctaacaggtaggggacagaactccgtagtggggactgaacaagaaaggagagagaggatgaagtggccggctgaagcggatcccggctgcgaggagaccagcacccgactgctccaggtttcgctgctcgtttacctgcgttggctctctcgcaccgtcagaccaggtcaaaggcggccccaagttccccgcctccaaggtccgggcggtggcccagcaggctcggcgcagctgcacaagtctctgtccctagacaccggagggtccctggaggggaaacgattgacacagctgcctgcactgtgccgcgagccttcccgcgctgcacctgcgtctcgtcgcgtggctaggaactgggactggctccggagtcggtgaagtccagcaggcccttagccagaacctataccgttcgccagctccggaaccgggctttagacaccaggaccttgcggaagagagaactacaactcccgtcgggccacgcggtccgaccaatggtggtagccggcgcgtgcggggcgcggcgcctgcgcggcggtttgagtaagaggccgtacgattggctgcggagtcgggcggccgcgcggggcctgtgggaagcggagtgacggagcgagcggctgttggaggaaggaggtggggggccgggagcgcaaatggcgttgagatggttcagggccctgttcaaactccagcgctgaccattcaccggcggaggcggcggcgcagaaggcggcggcggcccagcgggggcacgtagcgggctcggcaccggcggcggccgccagggaggcctaggccctgtccggccggcgcgcctgaggtggggagggaannnnnnnnnnnnnnnnnnnntgtcgcccgagcttcctatttaccgaagcggagccgcggactgtgacggcagcagagcccctcgcctctctcggtggcaccggtcggcactggtctctcgcgcggggctcccgcgcccgcccgcgggccgttgggagcgggagaggcggaggcggcccgaggccaaagcacccgccaggcgccgagggtaagtgaggtctcgggcggctgcctaggcccggagtgagttggggcgggtggaggcggcaggggcggcgcgaggctcgttgctcacctggcttctaaggaagttgggcaccggaggatcgcaagaaactctttcccttcccacctcttaattttgccttttgaattcttctccggctacttgatttgacttctctcttccaaacccggtccggttgatttgagtcccgaattctttttccccgtcgtctcctccgcctctagccgtcaccgagaggccttgcttcggggactcggtagcagaagcttccggggcgtccgaagcgacatccctttcctaggctgtgggggttgggaggagaaaagttgcgtgagtgtccagcccgaggggtgtctcggctccagcctccgggcgcactcgcagcctcaggtgagggtttctgtttgcccattccactctcctctctttattgaagcccccctaatgcattaccttgggtgtctttcctggaagtggctaggtttctttacagcttcagtgtaaggaggttggttggttgttttgtataccctttccctaatttaaatcgcagtgcacttccatcaaaagtcagctgggctttgggatgaagcgaaggcctcccaaatcgaaaacaatcagttgtgaaccttcttttcctttttagttaggactgttggtgaaatttgaagccagaacaagatagtgtgtctgaaatgtgcgtaaaacgtcatgccaaatatatatgctgaatttgtacatatgttaagcttagataatgccatcgcagtagtctgctgactttttaaaatggacgttatggaaaacagtaaaagcaatcacgtaactcttgtactcatatctcctggattctgtacataataactcaaccatattttctaatcagtacgctccccattccttaatattaaaaaaatcactgatatttcatcaatatttaatgatgttaatacatcagcgaatatttctgagacgtgatcttttaaaaatacagttgtcttattacttagctcagtatcatatattcatttgcagatcttaatcttgcacagtgaatgctttactgttttttacggtgagtttttcagatgtcataaagaagatcaagtctagattttttttttttttttggctttagtcagcatttttagatgattgccatgtatgtgtgcccaaaacattccaactttgttggaatgtatatatgtgtgtaggtctgcgtgtctgtagtcagcttaaagaaatgacttttcttgcctttggcagctgcccaattacacttggttttgtttaataggctatacttaacaagaaagacaatgaagcttgttagtgttcagaactacaaaatggaaactctctgaggaaagctaaaatttcttttagcacagatgtgtacgatgactaaattattattttatctgatcagagttgttttcctttcaaacattagggtggtggtgagttgtcttctgaatatttgctgaactaaattggatagtgattcgttaagttataagaacttaatagaaatactaaaagtgtagctcaaaaatatttgaaaatataagttaaatattattcttattgtaagtttccaagtaatgaagattttccaagcccttaagtaattgcttaccttccccctagaattgataaattgatatttaaactgcagaaggccaaagtgttaagaaatggataatgattgattgtgctataaaagcactataccttatattttttaaagtgtttgatttttttttttgacttttcttgtaaaattttttcagtatatttttgggtaaatcaggtaaatgagtttgtaaattgaagaggaaaatcaaggctatatatttctattttataataataaatcatgtacctttgtaaaatggagttctccaacttcagaaagatgttactcagcaatgagatacaggaagtagaagaatggtttcttgagtttagggagatgaccattgaaggagctttttaaagtcagttaaaatcactttagtctaagaatcagaatctttaagcttgggtagaagctacagattgtactctatgagaaaataagtttttctaaccctttatgaggagctgtaaaaatgtcaaagaactaagtttggccaactgacattgtttagatcctggaaaacttaatatattgtgactaaagattttgtttttgggtgtttacactattctgattaagttgtgtatgaagatatggaatttgcatgttttaagttagatttgtaggtattgcattgtgagttggttagtagtaagctttttttttttaaacattgtaagtttcatatgaatatgtccttattgtaaaaacaagccaaaacaccaccaaacctgatgtatggaagtaaaggatggaaaacgaacctcttcagctcacttattcagactagtttcaaagtttgtgtgctgaatgttgaaaactatataaggaagtcctagggtcttatttttatagagtgcttaaaacttgttaaaaatttgctgattatattttcttaaatttcttttcacagggaatatgaaacaggtgtcaaaatgacatccagatttggaaaaacttacagtaggaaaggaggaaatggcagttcaaaatttgatgaagttttttccaacaaacggactactcttagtacaaaatggggtgagaccacatttatggctaaattagggcagaagaggcccaatttcaaaccagatattcaagaaattccgaagaaacctaaagtagaagaagaagatactggagatccctttggttttgatagtgatgatgagtctctacctgtttcttcaaaaaatttagcccagggtaagggttcatcttactcagaatctagtgaggctgctcagctggaagaagtcacttctgtatttgaagctaatagcaaatgtagtcatgtggtgggtgaagacagttttgcttccgacagatgcttacttgtggaggatactttaattgggaaagagaagagcataagtagaattccagaagacaacgcaaacaaaagtagttgcactaagttgctaacttcaggtaagttttgatgttcctataagccaagaaggcctttttaaagctacttttgtgataatgaaattctaatttattacttgtgtgcatggagtgtttggaaaaaaagggcaactttgtatagttgtttctttccatgtttttgtgggttctagagataaatgcaggttgctaggcttgcgttgcaagcaccccaactgagccatctcattagcaccctaaaagagccaagtgcttgatgggcattgtagtgcttgcttttaattccagctcttagggggcagaggcaggtggatctactagagttagacaccatgtgtgtactgggaactgaacctgggtcctttggaagagaagccagtgctcttaactgctatattatttctacagtccccttgtaaaagaacttaaaactttaaagagttggaggccagcctggtctgcaaaatgagtcctggacagctagggctgttaacaatgagaagccgggtcttaaacagccccaccccactcccttcccccaaaaagtgtgtgtgtgattaccacttgttttttttttttcctccctgcatttatgattagtagaggatattgataagtttgtttagtgtgtgtgtgtgtatgtatatatatatgtatatatatatatatatgtatatatgtatgtatatatatgtatgttgcctgcataccagtttgtgtgctgtgcatgcctggtgccttcagaagctaggagctactagagttagacaccatgtgtgtactgggaactgaacccaggtcctttggaagagaagccagtgctcttaactgctgaattatttctacagtcctcttgtaaaagagcttaaaactttaaaagagctcaatcatatttaaattttaattaaaacaacatcttagaaatttagtatattttgggaacagtcttttataccttatatttattggataatgtttttataatactgtaaattggttggctacctagggggaatttgttacagtcttaatgtaagatagatcaaataatataatggagtgtgacttgcatagccttgttaaaaaaaaaaacgctgagcttttttttctacttttctcacctttgggtgagagtgagctagcttttgttgtcattcccttgatcctctgggctagtactcatttggttgttgccttgttcatatttctcctaaagcattgttcttaagttaagcttagattttcataggaaaacaagtcaaaagaagcctaaaattgtttccaaatgagcttctaaaatttatcatataagcccggtctggttgtgcatgcctttaatcccagcactcaggaggcagaggcaggtggatttctgagttcgaggccagcctggtctacaaagtgagttccaggatattcagggctatacagagaaaccctgtctcgaccccctccccccaaaaaaagttatcatacagataaaatttctgagctcaactgaatttttactcaactctcctcactttgtaaagtttgcagagattatgtgactttctaagatcagctagtagcaaaattggaatgaatttttaaaaattacttttaggtttattattttatacgagttctgcgtgcatttatgtatatataccatatgcatgcttgctgaccaccaaggctagaagagggcatctaattcccctggaactggagttatagacagttgggaactacaatgtgggttctgggaactggaccaggtcctctgcaagagcaaccagtgcacttaaccactgaatgagatttattgattgccaagatgttgagcctactatttgaattgtgtagtattttaattgctggttcttactgattccagatagttgttttacataggaggtaggtggcctgtagaagaagagtgtaggtggctagttgttaaattgtcctggaggaccaagggattatggggaataatactgcagaatgagtttgtttattcattttccccttttcattgactttctgaagatggaacctctggcaactcctatagggtaggaagcaaacttgaagtgtctttaattttaatttttgtaatgctgttagcctattctaaatgcgtacaaatcagttatttttataagccatgtataagttcatgtatttataagttggttctgtaatagagaatgcttttgggctttttagattttcttttctttttttttttttttcattttttgagacagggtttctctgtatagccctggctgtcctggaactcactttatagaccaggctggccttgaactcagaaatccacctgcctctgcctcccaagtgctgggattaaaagcgtgcgctaccatgcccggctagattttcttttcgttgccttttcatctaaacttttggttgtttttttttttttttttttggtttttttgagacagggtttctctgtgtagccctggctgtcctggaactcattctgtagaccaggttgccctcgaactcagaaatctgcctccctctgcctccaagtgctgggattaaaggcgttcgccaccactcccagtttgggatttcttgatttttgcatttttgtcatgttgtcagtgtccttaattttactctgaaaactattaaaaattttatcaacaacttgttcaaagtatgtagatgcacttgttcaacgtgtgcaggtttaagttgcattgtaacttttcagtgagatatttgttcaattactggtttctgcagaggaattatttcacaccaatgagaaaagcttatccaagcttaagagttttatcatttttttctaatagtacatattaagtacatgttttcttctgtaaagaattatgtcatttttttaaagatttatttatttatcatatgtaagtacactgttgctgtcttcagacacaccagaagagggcgtcagatctcattatagatggttgtgagccaccatgtggttgctgggatttgaattcaggacctttggaggagcagtcagtgctcttacccgctgagccatctcaccagccccttatgtcatttttttgattccatctctgggaaccacatagtaggagagaatggactcctgcaggttgtctttggacctctgtacattcaatgtgtacaatgacttgtgtgtccccacatgtgtgcttactcacacagaaataaatgagtaagtgtaataataagttttaaaaacatcagcagttgccattttgtaagtagatgcttaatagataaggaaaagagtagaaagtactacaaactatgtctaagaactctagggaaaggttgagttattaaagtactcaaaacaagaccccaaattttccactttctgaaaagtagtgaaagaaccttgggtattcagtagttgatatatggcaggacttgttgtctctccttgtgaatgttgtgggttgttctgatgctacttgtattctgatgttaattctacgtcctcagaagaggttgcccaggagctgtgtgatctctcctgaaccttattcccattttaactggtcaataaaagctagagcctgtgattgggcagtggcagggaaggaggaggactgaagaagagatgaggaagccaagatggaccagaaccacgtggccaggagaaagcacaggtagcaaagggtcttatagctggggaataagttagtatagtgttagatctgcccaatctaggcttatagcttataattgtaataattggattgtggtggtttttttttttttttttttcgagacagggtttctctgtgtcaccctggctttcctggaactcactctgtagaccaggttggcctcgaactcaaaagttggcttgcctctgcctcccaggtgctgggattcggttggttttttaaactagtcaattcttagacaggtgtggcattaaaatgactgaacaggagctagagttcatctttttgaggtatcagtatattatgaatcattttacttgaccttttatattttattatgatttttaaaagacacagtctcactatatagccctagttgttctggtaatcactgcgtagactaggatttggcctctgccttctgaatgttggggttaaaggaagcacatccatgcctggcttaagatttatctttaattatgtttatgtgtctgtctgtctgtgttgttatgtgcacatgagtgcaggtgccagaggcattggatcctttggagcttgagttataggcagttgagctatctgacacagatactgggaactgaactcaagtcctctgggagagtaatagtcacctttccagactcccccccactttttttttttaaacataaatatgtttgtgtgtgcacatgagcattagaatatggaagttagagtacattattttggagtcagttccgtctttcaaccatgtattccagcaaatgtattcactgtcaggcttgtatgacaagcacttcaacaagctaactcgtcttacccactggagtgaggggttgttttgctgagacaggctttgtatatcctagactggacttgtggacactgtgaacaaggatggccttgggcttctgatctccagcccccactttttgtaaatgtgaagattcaaggcgctctccaccatacctgggttttttttggtgttggttattgaaccagagccttttgtatgctagcaggcactatactaccaattcctgctagtattcaagtttggaatccgggactgtgcattaaaacgttatttattatttatactgggtggtgtgcacctttaatctcagcacttgggaggcagaggcaggtggatttttgagttcaaggccaggctggtctgaatgagctccaggacagcccgggctatacaacgaaaccctgtctagaaaaagcctatgtaccctatgtgggcagtgtctgtagagagcagaatagggtgttggatcccctgggactggagttctagtcgattgtgggtgctggggcttctggaagagtaaccagtacctctgaaccatttgcttaccccaaagatacttttaaaaaggttgcttttgctttttatgtggggttacttctgtttctcctctttgttaatctggactcttgaaaaaattatgtagagacttaaatttctgcttggcatactttctatgccagccagctggaattcagtctacatatcctgccaaatattgagataaccatagcataggctcttaatttgcatggttggtttcatagccaataaatttttttcgtttgcttaaagctgtattgagtgtgtgagctttctggggggtattatcaggacattctgagatttgattttagaaccaaaggtgtttttcaggaaaggggaatgaatagttctacttttgacagttttaaagtgggctgaagaggtggctcaggggttaaggatgcatatggctcttggagaagacctgtgtagcttccagcacctaccagtgattacagtcccaggggaaccaaacatctctggcctctgtgagcacctgcactcttgtttatttacccacacagaaggatataatatgaacatatttttttaaagaaacatgagctacaaacttatctgaggtgatagtcttaataatatcaggaagttagttatttgcctataggtagtgagtgtttgtataaaatgtacttgtcatttttcaagttttatgaaaagtagttaagaaatctgtttctagttccagctttgtgctaagccttttatatttcatagccttgtaaagctggcttaattcatattatataaagtgtaaagcatcattcagaagttggataacttgaattaaatggaatagttgtgaaacacccaaattgctcttttcatattatagtctggtattgttatattctggtagggatgaacttaacaggattttagaataaaacagctgtcataagatagatttttaatttaaaatttattttttattttttatttttggtttttcaagacagggtttctgtgtgtagccctgggtgtcctggaactcactttgtagacgaggctggcctcaaattcagaaatttgaggccagcccttgggcctcccaagtgctgggattaatggcatgtgtcatcactgcccagttcataaaatagattttatcttgatgttgaagtgaattacaagttctcattttttttctatttaagtaatttttaaaaaaagacttatttattttatttgtgtgggtagtttgcctggcatatacatgtgcaccgtgtgtttgcctggtgccatggattccctggactacagttaaagacagttgtaagctaccatgtgagtgctgagaattgtgcctgggtcctttagaggaacatccggtgttcctaaccactgagctatttctccagctcctatttttttgggggagggggcaaaataaggccagagtttttaatacttaccgaataaaatggatcttatttatgtagttaataaatacctttttttgtgtgtgctgtatacaaacaacagtatgcaaattttgtggtagatttttacatgcttttgtttgtttttgcagttgctggagattgtattcagggtcctctacatccagccacatccccagttgccctcctttactaagtagattttgatctctgtcttatttctgtctcgaggctagtacaggctgtcctcatattgaagacatacctgaaaatgatcctcctgcctctgcctcccaagtacaaaggattatagcaggtgccatcatccttttatttcttatctctgccatcatttctcccagcccttcaaggaaagccaaggttgttctcaaaggtcagacaggagtgcaggaggccattagcaagttttccctcacatccaagagaatacccgctttgtggtaattaatgaaattgtaaacataactgtcctcctgtatgctttttaggaggtgtaccatggacttgtgctggtcatgaataactacttttagcacaatgagattttttattatagtacttcacaggacaattgtgcccccccccccccatatatatattctagtcccttagacttagagccatgaacaaccacacctggtttttgagagggagatcaaggatggagcttaaataagcagcattgatttgaaataatacatgtgagactacgtataaaaatatttgaacatgaagtcattaaatatttgaattgagctgtgaaaaaagttcctatacctatagggtggagaaaagaaactaaaaaagaaagataatatgaaacagccagagctattgaaggctcaacttagttgaattggatttgttgatataaaagttaaataaatgagggtttcacagaatggttgtagtggcctgaggattgagaaaattcacatatgtaagtgtacatgttttaaacagaggaactgggacagctgggaacagatggcatgctcaaattagataatatgagaagggtttatttacaaaggtataggagggatataggaaaatcatgggagatgaggcctcatccttggttcttcaaagtgaagctattattaccctgactcaaatgaattaggacttgaagaagcctgctttataaggagctgaatctttctgttgaggacctaattatgttgtctcagggacagcagctccctcctgatagaaccctgtgtcagcctaaagataagggctgttttgttgattggaatgataggaagttggtctaattttagccattctgtatagtaggcctgctagtggttgtgctggtaatgtggtggtggtggtggtggtgattataataatgataacaataatgatataataaattttatatgtaattccagctcctaagtgctggattatagataggctgttttgctcagtttttgagaagtattattgaaatgacttttggtttctctacctagagcctgttgttacgcattgtacattgagttacatctctaatcctcatttatttactatattatctttaaaatgacatataatcttgtgtttcactagagtatttcatatgctagttaaaagaagatgctttacctttcaaattttgatgtaaagtcgattgaggaaattgggaggtttttaatttttttgaaacagtctctaaccaaggctgacttcagattcctctatagcagaaaatgaccttgaatttcttatcctcctatccccatccggagcgctaacattaaactcaggtaccactctgcctgtattgattcagtgcttgaacttgaaccaagggcttgatacgtgctaggcaagctatcaactaagttatatccccagctcctagttcacaaataatagttcattctctgtctttttaggtacttatggttgatatatccacatgttctttccacagtgaaaagtgttttccttcagatttcatgaatacttttttttttaattaggtattttcttcatttaccagatttcatatatactttctatttcttttttggaacttgaacctaagaccttgcattctgtcattgaactattcccctaaccttagcttgtatactgtgtatgaccctaaaaacctaaatatgtgctgcctgtagtagcatgattataatgctagcatttaggacagcaaggtgggggcaatctctaattggaaattagtccaggttacatagttcctcggcagtcttggttacgcagtgaggtcttgtttcaaaaaatacacacaatgtgagatataaaatactgcaatgtggggctggtgagatggctcagtgggtaagagcacccgactgctcttccaaaggtctggagttcaaatcccagcaaccacatggtggctcacaaccatctgtaacgagatctgactccctcttctggagtgtctgaagacagctacagtgtacttacatataataaataaataaataaataataataaaatactggaatgtatatgcatgtgtatgtggatcatgcttttagtacattaaagtactacattttagtacattaaaggatacttttaggatgtgcattgctcagtatttgtagatagatacactttgttctttttagcaggctcatagtttcccattgtgtaggtgtacttgaactgccctgtgtttttgttttcttgttgcaagtaaatgttgcattgaacatctttgtaagtttttgagtaccatgtcacctgtgttagtatactggtaggaattatttcttaaagtaattttggaagggcatatatgttttattaaagttttatttttattactttaaattatatgtaggtatatgtgtctgcatttgggtttgggtatgtgcatataagtacaagtgtcaaggaggccaaaagcataggaccccttgcagttgaaattagaggtggttctgagtcacctgatttatgttggggttagaatttgggtccttaggaagagcagcaagggctcctatgctggaccatctctctagccctggatgtatacagcttaaattttaattgataatgccacatttcttgctaatagtatgcatcctctttcccaaacttggtatcacccttctcctctcaaactttgtacctagctatgtaaaggtagaaaaatagctgctacttgtttttgttgttgttgttttatgttggattgttttcactttagaatatatagtatcttttacacatttttacttgcccttgttttataatagtattggctagaatcttcctacttagcccctttctcagccagccactacagctctccctagaatgacagtatattgttaattgttgtagctttttatgtatatactgtacagttatattgtaaagaatggatttggttcaatttctgagcataaaatttaagatcctagaatcttatatagtattatcttgtaatgaactaaaggctgactgttgtttgttttgtttgttttttgggttttcaaggcagggtttctcactttgtagaccaggctggcctcgaactcagaaatccgcctgcctctgcctcccgagtgctgggattaaaggcgtgcccggctaaggctgacagtttttaaggagctttaggatacatagtgtttactaggtagatgcaaccaggattagagggttgagactttcagagatactcctacctgaaacctcttaaagaagggaagagggaagccaggaagcagaggcccgcggatttctgagttcgaggccagcctggtctacagagtgagttccaggacagccagggctatacagagaaaccctgtctccagaaaaaccaaaaccaaaacaaccccccccccaaaaaaaaaaaaaacaacaaggaagagaagagggaacaagggctaagttgattacttgtggcagaagagccatcatgaaaaccataaaggacagctttttagagcgcttccagataactgatcatgaggtttccgggaggatgatacagcctttcccttatgccttgttcatttttctttctggctctatttacttgtttacttacttagggtttatgagacagggtcccatgtagcccagaaggctctggagtttgttatgttgccaaggataactataaacttccaatcattctgtcttcacctttcaggtgccactatacccagcaactattttcttctcctaatggatgatttgtttagaaacaggacttcctgtataaaattaagaatttgttaagtaaaagtggtcatttaatttctcttagagaatgtgagagttgagacagagtctatgtaacatgctggctttgaattcataatcctggttcatttgcccagccttgtgagggttagtgtctggttttttttttttcgagacagggtttctctgtatagccctggctgtcctggaactcactttgtagaccaggctggcctcgaactcagaaatccgcctgcctctgcctcccgagtgctgggattaaaggcttgcgctaccacgcccggctttagtgtctggttttattgtattgtgttatatatgccttgttcggttgatgaccctgggaggaggaggtggtgggtttgtggggtggacctggaaggagatgtaggatgaagggactgagagaaagggaaggaggggaagttgcagtcaagatgtattgtttgaaagaataaaataaaataaaaaaaaaaccaaaaatatctagccgtcatactgcccgccccaacccctttggtaaatggatattctctacaaatgggtttatctgttaggaaactgggttttgatgtgggagggcagttgaaaagcaattgtaagccgggtggggtggcgcacgactttaatcccagcactcgggaggcagaggcaggcggatttctgagttcgaggccagcctggtctacaaagtgagttccaggacagccagggctatacagagaaaccctgactctaaaaaaacaaaaaacaaacaaaaaaagcaattgtaatatgtaattttggataagatggtgataacctttcaaaagcaagttaagatttttttgctgttggaaagttaagtaatagaggataggacacaataaaatgctgtggagacagcattaaaatgtgtccttggtcagtttttcttttgtagaactcggttgattaaattcgcttttctgtaaaactatctaccgttttagaagtttaaaaaatgtacttgagtaataattcacttttgcttttgctatatataatttgtggattgtttgctgttactgtatactatttccttactgaataatgcatactgaaactactcccttacagaactccttatcactcttccttcttacaagtttacaaagataggctacagcagcagttactgcttaaatcacctgaaaggtacttctaaaatgtataactacaacacacataggagaaatgagggcaataaacttaaaatagtaaactataatgaagtttaactttagatctgttttgttgttgttgtttttgttctttttttttttttttcctgatacggtttctctgtatagccctggctgtccaggaactcactttgtagaccaggctggcctcgaactcagaaatccacctgcctctgcctcccgagtgctgggatcaaaggtgtgccccaccacgcccggctagatctgtttttaaattagaataatgtttacacctaaaacagaaagtcatttttgagaaattaagatagtagaagcctgctattatgcacatgaagcaggaagattactagtttgaggctatcttgggttcaaaagggaaccctgtttaggaaaacaaaaataagctgtgtgtgttagcatgtctttaattccagcagaggcaggtggatctatatgattttagggccagcatgatttatagcaagttgtaggccagtcagtgctacatagtgaaaacctttctcaaaatgaaaacatactacaaccccattaactacccccctccaaagtcccctcagtggaaggctatacagctataaaaatgagttgaagattggagaggtggttcccagcatcatggaacatgtgtacccacgtatatactaataaataaacatgaggtgtagtatagcttagtacatcttagacatgttaggtaagtgctctaactagagttaaattagttcactcctctcttttctttttcttttaaatcagtgccttaagtttcccaggattgtaattaactttgtatcttcttgctgagattacaggcctgtgacacagttaaattatatttaaactcattgagtagcatcaaaaattatatagtgaatttatccatataaaacattgcttttggctgtatttgcaagtgtgttctttaagacttgtaaataaggagagtgttgtggcatatgactttaatctcagcacttggaaggtgcaggcaggcagatctcttgtaagtttgaggccagtctggtctacatcatgagttccaggatagagttacatagtgagaccctatctcaaaacaaaacaaaagatttatttgtaaattgtttttcttagatttagatgtatttttcttgaggcaatattttatttggcatagagtaaatatttgccagtgcttacccattaattaatgttcagggaatccatgatattagtttgagtcatattgctgccttttacttggagggtaaaaaagtaattacttagccgggcagtggtagcgcatgcctttaatctcagcacttgggaggcagaggcaggccaacttctgagttcgaggccaacctggtctacagagtgagtttcaggacagccagggctacacagagaaaccctgtctcgaaaaaccaaaaaaaaaaaaaaaaaaagtaattacttctgatgttaaaaaatttaaggcaacaaaaatgaaattctcacatataaagtagtcattttaagtttgcagtactcgttgatattcataaataggcactatacactacataggtaccagatccactgttaagaaattatgtggcttttaggattatatgaaatatagaaataactagaaaagcttgtggtaggcaggtttctagacaaaattaacatactgtataaacagtcctatttcaggtaagtacaaatgccccttaaaggcatgtgactcaatgttaaatatgtttgagttctactaaatttaagcattgttacttgaaagcataaatgtcatttaatgttatcctcagttgattcagtttcttaattgtaaaatctcttctgagttcaacataacagttttaagaggcttgggtgtccagggacaggctactagaagacatggcagctgtacctactgacagtaggagagtctaatgtgtaaacttttttgttttttatttcaagattattttatactggggctggtgagatggctcagttggtaagagcacccgactgctcttccgaaggtccggagttcaaatcccagcaaccacatggtggctcacaaccatctgtaacaagatctgacgccctcttctggagtgtctgaagacagctacagtgtacttacatagagtaaataattaaattaaaaaaaaaaaaaaaaaaaagattattttatactactgttcagatagccctgctatttgttaatttgcatagtgatgacatttatgtttttaaccggacatatttttcatttttgtagataaagtggagaattttagtgaagaacatgaaaaaaatagtcaccactttcacaaaaatgctgaagatagtactaagaaacccaatgcagaaaccgcagtggcttctgaatataaagctgatgaaactaaagaaacaaatgatacttggaactcccagtctggaaaaagaacagagtctccatctgaaagttgtccagtcaaaggatctgtaagaactggtttatatgaatgggataatgattttgaagatatcaggtcagaagactgtattttaagtttggataatgagtctcttttggagatgaaagacgaggatttaaaaaatcggattggaggattggaaaatctaaatgaaacctttgaagaagatatcatacaaagtgttcttaggccaagcaactgtaggacgtactgtagggccaataaagcgagatcctcacagggagcatcaaattttgataagctaatggatggcaccagtcagtccttagccaaagcaaacagtgaatcaagtaaagatggcctgaatcaggcaaagaaaggtagtgcaagttgtgggaccagttttcgaggaacagttggacggactagagattacactgttttacatccatcttgcttgtcagtgtgtaatgttaccatccaggatactatggaacggagtatggatgagttcaccgcatccactcctgcagatttaggagaggctggccggctcagaaaaaaggcagatattgcaacctccaagaccactactagatttcgacctagtaatactaaatccaaaaaggatgttaaacttgaattttttggttttgaagatcatgatgagacaggaggtgatgaagggggttctggaagttctaattacaaaattaaatattttggctttgacgatctcagcgaaagtgaagatgatgatgatgacgactgtcaagtggaaagaaagaaagacaaaaaaagaactaaaacagctccatcaccttcccagcagcctcctcctgaaagcagcgacaattcccaggatagtcagtctagtactaataatgcaggtaagaattgtaagatgtatatataataaaaaataatatgtatttaatatataaaattttctcaggctttaattaaagggtaggctctttcctaaatattccattttagtttgaaatatataaaatttatttttaattacatgttgatgtgtgtgcctgcatgtggctatatgcatgtgagttcagggttccaaacccaatccaaattgcatgtaagtaagctctcccactgaaatataaccctaggctagcatatggtaatttatgtgataattttatactattgagtctttgggacagagataccaaacatcttgttttagttttgaaaatccaaatgtaatacagacataaggattgatttttttaggacatttagaactgtactgataacagatggttttatgagggaaatactcaaaagaaattaattaaaccctttggaagtagcacaaaacttgaaaaaaattgaaacattctcaaagcctcaaattgtggtctcataggattggaaagtactagtaggtaaggattctctcagttctctcaattctctctctctttgtctctctctttctctctctttttggttttcgaggcagggtttctctgtgtagccctggctgtcctggaactcactctgtagaccaggctggcctcaaactcagaaatccgcctgcctctgcctcctgagtgctgggattaaaggtgtgcaccaccactgctcacagtattctcttttaataataaaatttgtctcaagattgtaggctcaatgataaggtcctcttagtggttgagtctctagtgagagctaggtctatttttgtatcttggagcaatagaacttaaattctggagtatgaaacgttaagactcactttgagaaatgaagttgatattgaataacatttgaaaactataagactacttgaatgagaaacaccaagttacaggtcagtcttgatataacgtgtgaaccagcagtcatttttagaagatgaggttctcttccttctaaattagaagaaaatgtttataaccatttgagaagtaatctaatccttcagtagtttttatgtgaagactcacaggtcattgaactacattgtactagccaaggatagctatcttggttgtttctttgcctcctgactcagcctcccaagtgctaggattaggactgtgcaccactcccaaagattgtgctttttaaaattttgtcctctttggaactggagagatggctcagtggttacgtgtgtttgttgttcttagttcccagcacccacatagtggttcataacttcagttccagagaatctgatgccttaccatctctgcagtctccccaggcaggctcatatacctataccggacggttttgtgcactgtgtattcagatgctgatttctatgcctagacatctgcagtctggacaatggcatggccaagcatctccggtcttaatgttatgtaaaagttgtttcccatcacctctgattgggtaataaagagctgatcagctagttagctgctcagaaatagggcaggacttcctattccagtcctggaaagagactagagaggagagagggagaagatgtggagagaccatgtggataaaccaggaggattctccattgaggtctcttgagagagcagctatgaggacaaacatggactagagtgagccaaggcaagactcagatgtaggtaaaggaccacatagctgggaagtatacagcataaccaggttagatagaatagctctgaacctgcccagcttagtgcttgaagcttgttaataaaaataccaggtctctctgtcttttattcaggagctaaaatgggctagagtgggccctgcagttatatgagaacaaaaggggtgtaagaacatccccccaaagaattagttatgcaaaacactcatatataaatctttaaaaaactttttagagtagttatctttgtttagaagccatccagtgaattccaggccagctaattataagcacccattctcagtaaaagagaaaatgtttgatttttttgctgatagtacaaaaatacaactagaaaagatatgtaataggttttgaagtaagagaatagggttagagtacttcatcaaccactactatttttaatcctttattattttctccaacattaatgtttttaaaaaaccttgtgttttctgataacttgaaacactggaaagctagctagttttgattaccatttcagaaaacttggattttacagaggacttgcctggtgtgcctgagagtgtgaagaagcccataagtaaacaaggagataaatccaaggaaaataccagaaagatttttagtggccccaaacgggtaagtaaagcattaacactggtgttttttttttaataaaaatgtgtgtgtgtgtgtgtgtatgtatacatatatttatcattagagggctcaacccttaactttttattgggaagttaccaatgagccattgtgacattgtttatctcaggatatctgtaaatctttaaaaaaaaaccatatatatatattttttacgatgatatatatacatatatatatatatcattgtaaaaaatgtaatcatatgtctaaatatggcattaaaaataatttttctgggctggagagatggctcagtggttaagagcaccgtctgtttttccagaggtcctgaattcaattcccagcaaccaggtagtggctcacaactgtttataatgtgatctgatgccctcttctggggtgtctgaagacagcgacagtgtactcacttacataaaataaataaatctttaaaaaaataatttttccatgctctaaaatactggttgtttaaactgacatgaggctggttgggagctgagactttttgcttttctgtcttgtaatagtattctgccacatgtcactagtctagaaaaagaccagaattacaaaatacagtttctactaaattctagttgctttcatgtcatcctcagattgaacatttgtaagtcagggatcttctgtgtatctgtctttttgactttttccagttcttttagctatatacctacagtcataccatttgtcaagcttgctcagtaactgggaactgttttgcattccattttatattctcatcagcaatataggctctatcaatttccctcatgtcttggccaacatttactactagacaaaaattactataggcttgttgtgatggttcatgcctttaatcccaggcagaggctagcaagtctttgaatttaggaccaaccttgtctatatagtgaatgagttgaaggccagatacgtagtgagatcctgttgtaaaaaaagaaagttcccacaatagttatagagtagtcatgctttgatcttcatttctataatgaccactgagttagaaacttgttgcacatgctttctagtcattagtgagtctacatgtttgtgtattctgtgtgtgtgtatgtgtgtgtgtatatatatatatgtatgtgtgtgnnnnnnnnnnnnnnnnnnnnatatatatatatatatatatatatatatatgtttgtttgttctgcatgtgcctgtggatgtctcaagaccctatgaggcatcttcctctattgttccctaccttattttttgagacaggatttcactcagcctggagttcatagattcagctagactactactggccagcaaagcccagggaatcttcctgtttctacttttctagagtacaggcatgtgttactgtgcccagtttttatagaagtgctggaattgaactgaggtggtcatgcctgtatggaagtgctttactgactgagctgtctccctaaccctatttgtctgtattttgagaaattgctaattgaatctttttgccctttttaaaattaagggttatttttttatgtttagttgtaggagttcagtagatttttcaaaaaattaaaagaactaacatatgagcctgctgtctcactcctgggcatatacccagagaactccatacctgctgtggggatatttgtactctcaagttcattgctgcttttattgtagcagagaatttgtaatgagcatagttgtccatcaaaatatgattgaatatttggtgtgtgtatgtatgtaatagaatactattcagttgtaaagaaaactatgataaaaaatttcaggaaaatagatggacttagattaaaatacataatattagcctaggctatccactctcagaaagaaaaaaaccacattctctaaagtctagccaattgtgtgtgtgtgtttgtaaacaatgtgggcacatagtataacatgtaagaaagaaaaagaatgctaaatgttaggggatgagaaaagactgagtttctattctattatgtataaaagagcacttccctgagttgaataatgtttggggctactttttctgtgttttatattttttgttaattggcaatgttttgtataatgtaaaatttagttaaaaaaggaattccttattagatacataatttgcaaatattttgtctgcttcttaatgttacaccttcctctttgccaagtttaaaatttttaattatttttttcccttttgttgtctctggttttgatgtcacagccaagaattcattgccaaatttaatataggttttcaaaactgtttttcactcagggttttatagttttattcaggattttggtctatttgagtaatgtttgtttgtagatagggttttggttctctctgtgtaacagtcctggaacttgctttgtagacctggctagcactgcactggcaaagatcctgactccccagtgctgggactaaaaataagtgccaccactacctaacttgagtgaattgtggtgtgtgctataacgtggtgattgtggtccaccttcatttttatgcattgcagcatataatacctagcacaggtacagaatgtttcttgcatttaaaaagtctgctgtgttttgttcttgaacttgcagctaatagttttgtacttgctaattttatgtagctagaatgtaaactctttttattgtcttatatttctcttccttttatttctgtaaaagctcactgggtatcttcaaagtaattctagctgtttagatgcacttttagttcttacatacaaagtggtttttgatatatgttagttttcagagcattatttatcaacaggtgtgggggggtctcaatcactacttttttttttgtttgttttttttgtttttttgagacaggatttctctgtgtagaccaggctgacatcaactcagaaatctgcctgcctctgtctcccaagtgctgccctgctcatgacttctttacttactgataaagaaaatgacacacaaaatatgtatgtaaatttaaatgtcttgctgggtcctttagatttgctcaaatgtatatgtgtttagggttggttaatttacattctttttatttttttacgatttacttattttatgtatgtgagtacactgtagctgtatagatagatggttgtgagccttcatgtggttgttgggaattgacttttttgtgacctctgctcccttcagtcaaccctactcgctctggttggttctgctcgctctgggtcaattccgttcgatccagcccaaagatttatttattattatatataagtacactgtagctgacttcaaatgcatcagaagagggcgtcagatctcattacgtgtggttgtgagccaccatatggttgctgggatttgaactcaggaccatnnnnnnnnnnnnnnnnnnnnnnnnnnnnnnnnnnnnnnnnnnnnnnnnnnnnnnnnnnnnnnnnnnnnnnnnnnnnnnnnnnnnnnnnnnnnnnnnnnnnnnnnnnnnnnnnnnnnnnnnnnnnnnnnnnnnnnnnnnnnnnnnnnnnnnnnnnnnnnnnnnnnnnnnnnnnnnnnnnnnnnnnnnnnnnnnnnnnnnnnnnnnnnnnnnnnnnnnnnnnnnnnnnnnnnnnnnnnnnnnnnnnnnnnnnnnnnnnnnnnnnnnnnnnnnnnnnnnnnnnnnnnnnnnnnnnnnnnnnnnnnnnnnnnnnnnnnnnnnnnnnnnnnnnnnnnnnnnnnnnnnnnnnnnnnnnnnnnnnnnnnnnnnnnnnnnnnnnnnnnnnnnnnnnnnnnnnnnnnnnnnnnnnnnnnnnnnnnnnnnnnnnnnnnnnnnnnnnnnnnnnnnnnnnnnnnnnnnnnnnnnnnnnnnnnnnnnnnnnnnnnnnnnnnnnnnnnnnnnnnnnnnnnnnnnnnnnnnnnnnnnnnnnnnnnnnnnnnnnnnnnnnnnnnnnnnnnnnnnnnnnnnnnnnnnnnnnnnnnnnnnnnnnnnnnnnnnnnnnnnnnnnnnnnnnnnnnnnnnnnnnnnnnnnnnnnnnnnnnnnnnnnnnnnnnnnnnnnnnnnnnnnnnnnnnnnnnnnnnnnnnnnnnnnnnnnnnnnnnnnnnnnnnnnnnnnnnnnnnnnnnctggctttcccctgatttacgattttctaaaatgataaactaatgatttaactatttgtatgaaaaattattttcaaaccaaaaaagtagaagaataacaatactaaacctttatttttgtaaatctctgtagaggcagggtttaaaaaaaaaaaaaagacacttgaaggcttggtgtggtagccatgcatttaatcccagcactggggatgcaggggtaggtaaatcgctgagtttgaggccagccaggactacctgtgacttgggggagaacaattgtatttttctatctttgtattcagtatatttattgtgctatattggtagaaatatttgaagaaaatctaacataaatacgctatatggttacatttttaggtaagcttttgagatgtattttatatttggttcagtacaccaaaacttaaattttagttttttaaagattaacctatgtctgtaagcctttcagactgtttacattagaatattggttctccttacattttgaatatacattttatccatgcatgctttaaaaccatatattttatccatttggaaaatactagccaccctgagttgtgcaaactttctaaggtgacacattttgttaatgctcaatcaaatattcatgttaatatcaagccaaaaaattttgtcagtactaggaagcagtcaagattcacagtagtagatgaaggtttccagaattttagtttttgctagagttgatatttttttctcattggcatcaaatgccttaaagggattagctgacagtgatagtctcattttattcctttacagaaatatttttgccagataccaaagtcttaatcaggatgtttgtcagtctttgaagagtgatgtttctgataaacgtagatatatacagctcaaaaagttgttgtatgcaaaagtatttaatgcacatttgccacacagaacattgagatttaataaattgataattcttcttaggctttatatggagctcatggatatggtttgtggcagtgatgagaagtggtataatttgtaggtcatacagattcttgccaagacaacatcaaactggcttcagcaccatccacaggaatttcaacactgacaaaggcaaataacatcatactgtaattatgaaaatagttttgaatttgtagtctcctgaaagagtttgataaatctttagtgtccatggcctatactttgagacctgatgattgatagtattactttattctgttttcaaaatttttattgtgaaaacttcagatccaaaaagaaatatgaaacccctctactcttggcatgtatttatttttagctagtattttgctatcatgtattcttcctttctatataacaagtttattatacagtagtatcattcatatatatatatatatgtatatatatagtgtagtattaaaataatttcattgttagcataaatatttcttttattccttttttttttttttttttttttgtaaggctttctttgtgtagctctgtcctggaactttctccagaaatcaggctagcttaaaattcagagatcctctgcttctcagtgctgggattaaaagtgtgtgccaccactcccagtctaagcgcgtccctctctctctctctctctctctctctctctctctctctctctctctctctctctctgtctcaaatttagtgatttatttaatgtatgttgagtatactgtcttcagacacactctaagcattcttttttttttttttttttggtttttcgagacagggtttctctgtatagccctggctgtcctggaactcactttgtagaccaggctggcctcgaactcagaaatccacctgctttctgcctcccgagtgctgggattaaaggcgtgcgccaccacacctggccaccctaagcattcttaagaaaaaaaatttcaggctggagagatggctcagtagttaagagcactgactgctcttccagaggtcctgagttcaaatcccagcaaccacatggtggctcacaaccatctgtaatgggatctgatgccctcttctggtgtgtctgaagacagtgacactgtactcatgtacatgagataaagaaataaatcaatcttaaaaaaaagaaaaaagaaaaaaaaacttcctgtttactgataagattaaaacctataagaaaataaatgtattaaaaataattcttaatgctgatcatattgttttcatctaaagtcctcagaagtctttagttccccaccccttttaactaagactcttgtagcagttttgtatgttttgtttttatatagaccgtttcttatttacaaagaattccctttcacacccccccccccctttttttgtggtttttggttttttcgagacagggtttctctgtgtagccctggctgtcctggaactcactttgtagaccaggctgtcctcgaactcagaaatccgcctgcctctgtctcccgagtgctgggattaaaggcatgcgccaccacgcctggtgttttttgtgttttgctttgtgtgtgtgtgtgtgtgtgtgtgtgtgtgtgttttgttttgttttgtttttgttttcctttcacttatttttattaggaagctgtgatacttgtttttagggctgttccacatgtagaagttatctaattattttcttgatattatctgacttgctcttcactattggcttagaaagctgtacattaataaattctggattagatttaagttaattttttttccagagccagagacagcttcatttttgataattgctcatgtttccttatnnnnnnnnnnnnnnnnnnnnnnnnnnnnnnnnnnnnnnnnnnnnnnnnnnnnnnnnnnnnnnnnnnnnnnnnnnnnnnnnnnnnnnnnnnnnnnnnnnnnnnnnnnnnnnnnnnnnnnnnnnnnnnnnnnnnnnnnnnnnnnnnnnnnnnnnnnnnnnnnnnnnnnnnnnnnnnnnnnnnnnnnnnnnnnnnnnnnnnnnnnnnnnnnnnnnnnnnnnnnnnnnnnnnnnnnnnnnnnnnnnnnnnnnnnnnnnnnnnnnnnnnnnnnnnnnnnnnnnnnnnnnnnnnnnnnnnnnnnnnnnnnnnnnnnnnnnnnnnnnnnnnnnnnnnnnnnnnnnnnnnnnnnnnnnnnnnnnnnnnnnnnnnnnnnnnnnnnnnnnnnnnnnnnnnnnnnnnnnnnnnnnnnnnnnnnnnnnnnnnnnnnnnnnnnnnnnnnnnnnnnnnnnnnnnnnnnnnnnnnnnnnnnnnnnnnnnnnnnnnnnnnnnnnnnnnnnnnnnnnnnnnnnnnnnnnnnnnnnnnnnnnnnnnnnnnnnnnnnnnnnnnnnnnnnnnnnnnnnnnnnnnnnnnnnnnnnnnnnnnnnnnnnnnnnnnnnnnnnnnnnnnnnnnnnnnnnnnnnnnnnnnnnnnnnnnnnnnnnnnnnnnnnnnnnnnnnnnnnnnnnnnnnnnnnnnnnnnnnnnnnnnnnnnnnnnnnnnnnnnnnnnnnnnnnnnnnnnnnnnnnnnnnnnnnnnnnnnnnnnnnnnnnnnnnnnnnnnnnnnnnnnnnnnnnnnnnnnnnnnnnnnnnnnnnnnnnnnnnnnnnnnnnnnnnnnnnnnnnnnnnnnnnnnnnnnnnnnnnnnnnnnnnnnnnnnnnnnnnnnnnnnnnnnnnnnnnnnnnnnnnnnnnnnnnnnnnnnnnnnnnnnnnnnnnnnnnnnnnnnnnnnnnnnnnnnnnnnnnnnnnnnnnnnnnnnnnnnnnnnnnnnnnnnnnnnnnnnnnnnnnnnnnnnnnnnnnnnnnnnnnnnnnnnnnnnnnnnnnnnnnnnnnnnnnnnnnnnnnnnnnnnnnnnnnnnnnnnnnnnnnnnnnnnnnnnnnnnnnnnnnnnnnnnnnnnnnnnnnnnnnnnnnnnnnnnnnnnnnnnnnnnnnnnnnnnnnnnnnnnnnnnnnnnnnnnnnnnnnnnnnnnnnnnnnnnnnnnnnnnnnnnnnnnnnnnnnnnnnnnnnnnnnnnnnnnnnnnnnnnnnnnnnnnnnnnnnnnnnnnnnnnnnnnnnnnnnnnnnnnnnnnnnnnnnnnnnnnnnnnnnnnnnnnnnnnnnnnnnnnnnnnnnnnnnnnnnnnnnnnnnnnnnnnnnnnnnnnnnnnnnnnnnnnnnnnnnnnnnnnnnnnnnnnnnnnnnnnnnnnnnnnnnnnnnnnnnnnnnnnnnnnnnnnnnnnnnnnnnnnnnnnnnnnnnnnnnnnnnnnnnnnnnnnnnnnnnnnnnnnnnnnnnnnnnnnnnnnnnnnnnnnnnnnnnnnnnnnnnnnnnnnnnnnnnnnnnnnnnnnnnnnnnnnnnnnnnnnnnnnnnnnnnnnnnnnnnnnnnnnnnnnnnnnnnnnnnnnnnnnnnnnnnnnnnnnnnnnnnnnnnnnnnnnnnnnnnnnnnnnnnnnnnnnnnnnnnnnnnnnnnnnnnnnnnnnnnnnnnnnnnnnnnnnnnnnnnnnnnnnnnnnnnnnnnnnnnnnnnnnnnnnnnnnnnnnnnnnnnnnnnnnnnnnnnnnnnnnnnnnnnnnnnnnnnnnnnnnnnnnnnnnnnnnnnnnnnnnnnnnnnnnnnnnnnnnnnnnnnnnnnnnnnnnnnnnnnnnnnnnnnnnnnnnnnnnnnnnnnnnnnnnnnnnnnnnnnnnnnnnnnnnnnnnnnnnnnnnnnnnnnnnnnnnnnnnnnnnnnnnnnnnnnnnnnnnnnnnnnnnnnnnnnnnnnnnnnnnnnnnnnnnnnnnnnnnnnnnnnnnnnnnnnnnnnnnnnnnnnnnnnnnnnnnnnnnnnnnnnnnnnnnnnnnnnnnnnnnnnnnnnnnnnnnnnnnnnnnnnnnnnnnnnnnnnnnnnnnnnnnnnnnnnnnnnnnnnnnnnnnnnnnnnnnnnnnnnnnnnnnnnnnnnnnnnnnnnnnnnnnnnnnnnnnnnnnnnnnnnnnnnnnnnnnnnnnnnnnnnnnnnnnnnnnnnnnnnnnnnnnnnnnnnnnnnnnnnnnnnnnnnnnnnnnnnnnnnnnnnnnnnnnnnnnnnnnnnnnnnnnnnnnnnnnnnnnnnnnnnnnnnnnnnnnnnnnnnnnnnnnnnnnnnnnnnnnnnnnnnnnnnnnnnnnnnnnnnnnnnnnnnnnnnnnnnnnnnnnnnnnnnnnnnnnnnnnnnnnnnnnnnnnnnnnnnnnnnnnnnnnnnnnnnnnnnnnnnnnnnnnnnnnnnnnnnnnnnnnnnnnnnnnnnnnnnnnnnnnnnnnnnnnnnnnnnnnnnnnnnnnnnnnnnnnnnnnnnnnnnnnnnnnnnnnnnnnnnnnnnnnnnnnnnnnnnnnnnnnnnnnnnnnnnnnnnnnnnnnnnnnnnnnnnnnnnnnnnnnnnnnnnnnnnnnnnnnnnnnnnnnnnnnnnnnnnnnnnnnnnnnnnnnnnnnnnnnnnnnnnnnnnnnnnnnnnnnnnnnnnnnnnnnnnnnnnnnnnnnnnnnnnnnnnnnnnnnnnnnnnnnnnnnnnnnnnnnnnnnnnnnnnnnnnnnnnnnnnnnnnnnnnnnnnnnnnnnnnnnnnnnnnnnnnnnnnnnnnnnnnnnnnnnnnnnnnnnnnnnnnnnnnnnnnnnnnnnnnnnnnnnnnnnnnnnnnnnnnnnnnnnnnnnnnnnnnnnnnnnnnnnnnnnnnnnnnnnnnnnnnnnnnnnnnnnnnnnnnnnnnnnnnnnnnnnnnnnnnnnnnnnnnnnnnnnnnnnnnnnnnnnnnnnnnnnnnnnnnnnnnnnnnnnnnnnnnnnnnnnnnnnnnnnnnnnnnnnnnnnnnnnnnnnnnnnnnnnnnnnnnnnnnnnnnnnnnnnnnnnnnnnnnnnnnnnnnnnnnnnnnnnnnnnnnnnnnnnnnnnnnnnnnnnnnnnnnnnnnnnnnnnnnnnnnnnnnnnnnnnnnnnnnnnnnnnnnnnnnnnnnnnnnnnnnnnnnnnnnnnnnnnnnnnnnnnnnnnnnnnnnnnnnnnnnnnnnnnnnnnnnnnnnnnnnnnnnnnnnnnnnnnnnnnnnnnnnnnnnnnnnnnnnnnnnnnnnnnnnnnnnnnnnnnnnnnnnnnnnnnnnnnnnnnnnnnnnnnnnnnnnnnnnnnnnnnnnnnnnnnnnnnnnnnnnnnnnnnnnnnnnnnnnnnnnnnnnnnnnnnnnnnnnnnnnnnnnnnnnnnnnnnnnnnnnnnnnnnnnnnnnnnnnnnnnnnnnnnnnnnnnnnnnnnnnnnnnnnnnnnnnnnnnnnnnnnnnnnnnnnnnnnnnnnnnnnnnnnnnnnnnnnnnnnnnnnnnnnnnnnnnnnnnnnnnnnnnnnnnnnnnnnnnnnnnnnnnnnnnnnnnnnnnnnnnnnnnnnnnnnnnnnnnnnnnnnnnnnnnnnnnnnnnnnnnnnnnnnnnnnnnnnnnnnnnnnnnnnnnnnnnnnnnnnnnnnnnnnnnnnnnnnnnnnnnnnnnnnnnnnnnnnnnnnnnnnnnnnnnnnnnnnnnnnnnnnnnnnnnnnnnnnnnnnnnnnnnnnnnnnnnnnnnnnnnnnnnnnnnnnnnnnnnnnnnnnnnnnnnnnnnnnnnnnnnnnnnnnnnnnnnnnnnnnnnnnnnnnnnnnnnnnnnnnnnnnnnnnnnnnnnnnnnnnnnnnnnnnnnnnnnnnnnnnnnnnnnnnnnnnnnnnnnnnnnnnnnnnnnnnnnnnnnnnnnnnnnnnnnnnnnnnnnnnnnnnnnnnnnnnnnnnnnnnnnnnnnnnnnnnnnnnnnnnnnnnnnnnnnnnnnnnnnnnnnnnnnnnnnnnnnnnnnnnnnnnnnnnnnnnnnnnnnnnnnnnnnnnnnnnnnnnnnnnnnnnnnnnnnnnnnnnnnnnnnnnnnnnnnnnnnnnnnnnnnnnnnnnnnnnnnnnnnnnnnnnnnnnnnnnnnnnnnnnnnnnnnnnnnnnnnnnnnnnnnnnnnnnnnnnnnnnnnnnnnnnnnnnnnnnnnnnnnnnnnnnnnnnnnnnnnnnnnnnnnnnnnnnnnnnnnnnnnnnnnnnnnnnnnnnnnnnnnnnnnnnnnnnnnnnnnnnnnnnnnnnnnnnnnnnnnnnnnnnnnnnnnnnnnnnnnnnnnnnnnnnnnnnnnnnnnnnnnnnnnnnnnnnnnnnnnnnnnnnnnnnnnnnnnnnnnnnnnnnnnnnnnnnnnnnnnnnnnnnnnnnnnnnnnnnnnnnnnnnnnnnnnnnnnnnnnnnnnnnnnnnnnnnnnnnnnnnnnnnnnnnnnnnnnnnnnnnnnnnnnnnnnnnnnnnnnnnnnnnnnnnnnnnnnnnnnnnnnnnnnnnnnnnnnnnnnnnnnnnnnnnnnnnnnnnnnnnnnnnnnnnnnnnnnnnnnnnnnnnnnnnnnnnnnnnnnnnnnnnnnnnnnnnnnnnnnnnnnnnnnnnnnnnnnnnnnnnnnnnnnnnnnnnnnnnnnnnnnnnnnnnnnnnnnnnnnnnnnnnnnnnnnnnnnnnnnnnnnnnnnnnnnnnnnnnnnnnnnnnnnnnnnnnnnnnnnnnnnnnnnnnnnnnnnnnnnnnnnnnnnnnnnnnnnnnnnnnnnnnnnnnnnnnnnnnnnnnnnnnnnnnnnnnnnnnnnnnnnnnnnnnnnnnnnnnnnnnnnnnnnnnnnnnnnnnnnnnnnnnnnnnnnnnnnnnnnnnnnnnnnnnnnnnnnnnnnnnnnnnnnnnnnnnnnnnnnnnnnnnnnnnnnnnnnnnnnnnnnnnnnnnnnnnnnnnnnnnnnnnnnnnnnnnnnnnnnnnnnnnnnnnnnnnnnnnnnnnnnnnnnnnnnnnnnnnnnnnnnnnnnnnnnnnnnnnnnnnnnnnnnnnnnnnnnnnnnnnnnnnnnnnnnnnnnnnnnnnnnnnnnnnnnnnnnnnnnnnnnnnnnnnnnnnnnnnnnnnnnnnnnnnnnnnnnnnnnnnnnnnnnnnnnnnnnnnnnnnnnnnnnnnnnnnnnnnnnnnnnnnnnnnnnnnnnnnnnnnnnnnnnnnnnnnnnnnnnnnnnnnnnnnnnnnnnnnnnnnnnnnnnnnnnnnnnnnnnnnnnnnnnnnnnnnnnnnnnnnnnnnnnnnnnnnnnnnnnnnnnnnnnnnnnnnnnnnnnnnnnnnnnnnnnnnnnnnnnnnnnnnnnnnnnnnnnnnnnnnnnnnnnnnnnnnnnnnnnnnnnnnnnnnnnnnnnnnnnnnnnnnnnnnnnnnnnnnnnnnnnnnnnnnnnnnnnnnnnnnnnnnnnnnnnnnnnnnnnnnnnnnnnnnnnnnnnnnnnnnnnnnnnnnnnnnnnnnnnnnnnnnnnnnnnnnnnnnnnnnnnnnnnnnnnnnnnnnnnnnnnnnnnnnnnnnnnnnnnnnnnnnnnnnnnnnnnnnnnnnnnnnnnnnnnnnnnnnnnnnnnnnnnnnnnnnnnnnnnnnnnnnnnnnnnnnnnnggatttttaggaattagacttgaacataactgaatttaagtaaccttggttaagttttaagaattgatcatttgagctgggcagtggtggagcatgcctcccgcacttgggaggcagaggcaggcggatttctgagtttgaggccagcctggtctacagagtgagttccagaacagccagggctacacacagagagaaaccgtgtctcgaaaacaacaacaaaaaaaaaccaaccaaacaaacaaaaaaaaaaggaattgatatttggaaattgtggtgtaaattctggtgaaatgacaacctgtttctgatttctggataccaatttctctgcttcccactttttgcagctgtcgtgcctgtgctgaatcagagagaactgcttgctctgcctactttacactcaactcctccttacccctgtctgttgctaaggcagtgtttttataataattagccaaacttaccttcaatgcttggaaggttgcatttttcttggaatgttggctaccttgatttgcaattaagattgcttctgggtctttgaagaaactaatgtaagattagttgtggtttcaattttgaaatatttctaccactacttttcagtgttcctttgtagtttaaaactgggcccatctggccctatcttttgtctgactttctaaggaacattttggacttaatttttttctttccttctgtcattcaatatgacacttcatagtagcttctaggcagttggattaaaataatgttctctttataagtcaagagtacatatggctttctagtataagattgtaattgtatgagcttgtaattttaaagttgtatagatttataaattcttttttgttttctgaattagtttatataggttgttaatttaaaaacagaatctcgtaactgaagagactttaaaggacaagtactcccacatctcacccaagaacaaatgttcttccacacagtgcttgttttagcagttagaattcactctcccaaaacagcttgtttttgtccagtgtatttatttagtgagtgttgcttttctatttgaggatttacctcccatttttggatccagacatctaggtggtggtgatttctaaaaactagacacctgtgatgttaatgcacgtgaagcctgaataaaaggaagaccggaaccggcatggtgatgaggttgaggagtgtaaaactgcaaagtcatggctggctggctgtatttgatccagagtagttttattaagagttgggggatgggttctactctggctatggaagaaagtcagttcagttggctttcttcctttgtctttaggtaatgtatgctgctctgtgtgcaagctgatcaggcataccagaagaaatttaaaaaaaaagtctttaaagctcactacaatgtttctccaaactggaattttaaatagttttagcattatctttctcttataggaataatatttgaacactaaactaggcattctaaattcctgatgtgtgcaagtaatgaggtaaaatacttaggaaagttaaaatattttttctatataatccttttcttcattgtcttatttaaaatactactgaagtattactacttttagttttcannnnnnnnnnnnnnnnnnnnnnnnnnnnnnnnnnnnnnnnnnnnnnnnnnnnnnnnnnnnnnnnnnnnnnnnnnnnnnnnnnnnnnnnnnnnnnnnnnnnnnnnnnnnnnnnnnnnnnnnnnnnnnnnnnnnnnnnnnnnnnnnnnnnnnnnnnnnnnnnnnnnnnnnnnnnnnnnnnnnnnnnnnnnnnnnnnnnnnnnnnnnnnnnnnnnnnnnnnnnnnnnnnnnnnnnnnnnnnnnnnnnnnnnnnnnnnnnnnnnnnnnnnnnnnnnnnnnnnnnnnnnnnnnnnnnnnnnnnnnnnnnnnnnnnnnnnnnnnnnnnnnnnnnnnnnnnnnnnnnnnnnnnnnnnnnnnnnnnnnnnnnnnnnnnnnnnnnnnnnnnnnnnnnnnnnnnnnnnnnnnnnnnnnnnnnnnnnnnnnnnnnnnnnnnnnnnnnnnnnnnnnnnnnnnnnnnnnnnnnnnnnnnnnnnnnnnnnnnnnnnnnnnnnnnnnnnnnnnnnnnnnnnnnnnnnnnnnnnnnnnnnnnnnnnnnnnnnnnnnnnnnnnnnnnnnnnnnnnnnnnnnnnnnnnnnnnnnnnnnnnnnnnnnnnnnnnnnnnnnnnnnnnnnnnnnnnnnnnnnnnnnnnnnnnnnnnnnnnnnnnnnnnnnnnnnnnnnnnnnnnnnnnnnnnnnnnnnnnnnnnnnnnnnnnnnnnnnnnnnnnnnnnnnnnnnnnnnnnnnnnnnnnnnnnnnnnnnnnnnnnnnnnnnnnnnnnnnnnnnnnnnnnnnnnnnnnnnnnnnnnnnnnnnnnnnnnnnnnnnnnnnnnnnnnnnnnnnnnnnnnnnnnnnnnnnnnnnnnnnnnnnnnnnnnnnnnnnnnnnnnnnnnnnnnnnnnnnnnnnnnnnnnnnnnnnnnnnnnnnnnnnnnnnnnnnnnnnnnnnnnnnnnnnnnnnnnnnnnnnnnnnnnnnnnnnnnnnnnnnnnnnnnnnnnnnnnnnnnnnnnnnnnnnnnnnnnnnnnnnnnnnnnnnnnnnnnnnnnnnnnnnnnnnnnnnnnnnnnnnnnnnnnnnnnnnnnnnnnnnnnnnnnnnnnnnnnnnnnnnnnnnnnnnnnnnnnnnnnnnnnnnnnnnnnnnnnnnnnnnnnnnnnnnnnnnnnnnnnnnnnnnnnnnnnnnnnnnnnnnnnnnnnnnnnnnnnnnnnnnnnnnnnnnnnnnnnnnnnnnnnnnnnnnnnnnnnnnnnnnnnnncctgaaatcagaaatccctccctgcctctgcctcccaagtcctgggattaaaggcgtgcaccacccactgcccagtaggtaagcacttttctgggcaactataaggattagactttgaatccccatcatctgggatgggagaggcatgcatggtagtgcctataaccccctagcactgtggagttagaatttgggtacatcccaggaattcagttgacagccaatctagtcaattgttgagctcccggttcagtaaaagaccttgtctcctgtaagatggagctatagagaacacataacattgatttgtggtctctataaacatgcacacacaggcacacacactgcacatatactcacgttattcacaatttgtttacagacatacacttgccttttccccactaagatcaatggtgtaaagtcaaactgtacacaaattacttgggattagttctgtctgtctgccttttgatcagttagtctgtccttgatttatttggaatataagtaggtttcttggttcttctttgctttaaattttaatttttccctttgtttccattcttagtgaatgatataaataacattaacatttttcctaaagtaaaaactataaaaaaggtaaatttagttaaagatcaattcatttaagacctgttccacccaatttcctaccacttgtagggaacgcacacgcacatgcacacacgcacgcgcgcgcgcacacacacacacactctctcttgctttctattctcttctttctttctttctttcttttctttcttttctttcttcctttcctttcttacctttccnnnnnnnnnnnnnnnnnnnnnnnnnnnnnnnnnnnnnnnnnnnnnnnnnnnnnnnnnnnnnnnnnnnnnnnnnnnnnnnnnnnnnnnnnnnnnnnnnnnnnnnnnnnnnnnnnnnnnnnnnnnnnnnnnnnnnnnnnnnnnnnnnnnnnnnnnnnnnnnnnnnnnnnnnnnnnnnnnnnnnnnnnnnnnnnnnnnnnnnnnnnnnnnnnnnnnnnnnnnnnnnnnnnnnnnnnnnnnnnnnnnnnnnnnnnnnnnnnnnnnnnnnnnnnnnnnnnnnnnnnnnnnnnnnnnnnnnnnnnnnnnnnnnnnnnnnnnnnnnnnnnnnnnnnnnnnnnnnnnnnnnnnnnnnnnnnnnnnnctccctccctccctccctccctccctcccttccttccttccttcccctctctccctctttcttgctttcttcctcccccccccctctttctttctttctttctgtaaaattttagccaggcattggtggcccacgcctttaatcccagcactcgggaggcagaggcaggcagatttctgagttcgaggactgcctggtctacaaagtgagttccaggacagccaaggctatacagagaaaccctgtctcgggaaaacaacaacaacaacaacaaacaaacaaacaaacaaaaaacaacaacaaaaaaccaacaacaacaaaaagtagtaaaatttactttttttattttgttgtgtaatttttgcttttcttgttcactgggtagcctaagacttgtagagctctttctgcctttgccttccaagtgctgggattaaaggtgatagccactactgcctggctgtttgaatttggcgcatataattcttcagaatggtaattgtgtaagcatgtgactgtagagtgtgcttttactttagtaatttatgtgtatgagtattttgcctgtatatatatatatttgtgcactgtatacatgtcttgctcctgttgaggccaaaagagagcataggatctcctggaactagagttgcagaccttatgtgagctgctatatgggtgctagtaatcaaatgtgggtctttaggaagagcagccagtataatctttacctatgagctttctttccacacccagttgttgctaaataatttatctgttcagagtgatcctaacctcaaaggaatgttatttaaaattattatcttgagctttgatatgcctgctttaaagtagatcataatgtacatttaagtgggtagcatatttttctttgagttcctaatttttgtttatgtagacatcctccgcaatgttggcttctttttctccctttcttccccttctctttttttctgttgctagtaaggcactatacctagacacacacagttactatgtattgcaactctttgaacattattcagatggacttatgctggtagagttacattactttgttcatgaaatccttgtagataagactgtgtgaagtatagccagttcactgtttctgtcatcactgtagtcttgagttgattttgtaaaaacacaaaatcatactataaaaatggtgggaatcctcccctccctcccccaacatgcatacttttagaggcctactcagtggagaagagcacaatggtcttattctttgctattcaggaaggaactttacttaagggaaaaaaaaaaaagatttatttttatgtgaatttgtgtttgttagatcacctggacctggaattacagacagttgtgagctgccaagtgggtgttgggagttgaacccagttcctctagaagagcagccagttttcttaattgctgagctgtcagaactctattttctttcatttataattgtaattcagtgaattggtctgctaaatcacactcttgagattgtcttcatacaaaaaccttgtatttatgttttcattgacagtcactcatgtataattgacccacatagattgatcatgggcttattttttattttttggtttttttcgagatagggtttctctgtatagccctggctgaccaggaactcactctgtagnnnnnnnnnnnnnnnnnnnnnnnnnnnnnnnnnnnnnnnnnnnnnnnnnnnnnnnnnnnnnnnnnnnnnnnnnnnnnnattaatgatgtgcatcacccctgtctggcaggcttgttattttttttaaccgtagtaaatttctgcatgtaaaatttttgtttgttgcatatattcctggagaagtaaataagaatgaacataggatgttgtaaggtggctgttttgaaacatgcttacttggttccagctcttgagaatgttagcatattcatgtgagctgtccactccttgttctgcgtattctgtagattagagagcaaacagaaagcagaaattgtctaacaagaagtacattaagaaaagtgaccaggcagtagtggcacatgcctttcataccagcacttgggaggtagaggcagaggcagaggcaggtggacttttgagtttgaggctagcctggtctacagagtgagttccaggaagccagggctacacagagaaaccctgtctcgaaaagccaaaataaataaataaataaataaaaataaatagaaagaaaagaaaagtgattaatgtgctatatatctactttttaaactaaaaaaagatggaagtcctggtagtccagtataagtgatctaattaagactcatctagagggggctggagaggtggcttagcagttaagagcgcagactgctcttccaaaggtcccaagttcaaatcccagcaaccacatggtggcttgcaaccatctgtaacaaaaaatctgatgccctcttctggagtgtctgaaaacagctacagtgtgcttacatataataaataaataaatattaaaaaaaaaaaagactcatccagatttctacatggcatttatgatcctatttttcttgaaaagttgactgctctttttaaaactatttttagttactctacaaaatcacttgtactgtgtaaaattagaaagtggcctatcagatgctctggtgtttacatacacaattcatattggagcaagtcgaattcttgtaccattattaggatgctattatgagctcaggggtcagttcactgttctctccttctctccttccctatctaacactcatatgttatttctttagatgcatttatctttagtagttttcctacctgataataagccctgcaactggccagagagataatggctcagtagtttcatcgtggctcacaaccattcataactccagttcagagtatctagcaccgtttttttgccctccatgagcactaggcatccacatcatatgtacacatacataaaggcaaatactaatacacataagtaaatctaaaaattttaaagcattatgattttgtaaaatttggaaataaaagtcaagagaaagttctaattttctttaacactagcattaaaatggcaagcatctaaaactttacaagtctaggctcatcaagttcatgctaaagatagtgtactagttggttttctcactgtgacagaataccgtacagcaagaagcagtccatggaggaagggtttgtttggctcccactttgaaggtacagttgtccatcctagtggacaagtcctagcagcaggagttgaggcagcttgctagactgcatccccgttcaggaatcagaaggacacatgctagtgcttagcttactttctccttttcatgcagtcctacactccagtccttggaattgtgctactcatattcaaggtgggtcttttcacttggaattagtgcctcactgctatgtctggtggcttgtttcttagatgattctagatcctgtcaagttggtggcattaaccatcacacagaatacaaaatttttttgctttggttttgagaaagttcatttagccctggctcaccttgaactctgtaggtgagactaattttgaactctttgctcctctatctcctgagtgttaagattacagacatgctaactttaaaaaaaaagtccttctcctgattcttattataaaacactttagtgccggcattccctttgctggtctgagtccctgtatgacggattctcttttttacctgaaggtgatggacttgggtagaccagtactaaaatagctatagtacttaaaataataattagtgttttgcctgatcttacagtgttttagttaagaatcttgtatttcgggctggtgagatggctcagtggttaagagcacccgactgctcttccgaaggtccggagttcaaatcccagcaaccacatggtggctcacaaccatctgtaacaagatctgactccactcttctggagtgtctgaagacagctacagtgtacttacatataataaataaataaataaatctaaaaaaaaaagaaaaagaaaattctagctggaattaaaaaaaaaaaagaatcttgtatttcccctgttgttttggtctgtggagaattagcctttttcttaacccaaagattattacctagagttagtcccagctcctacatggcaactcacaactgtctgtaattcacacatatggttcacatgtctataagaaggctaaacaccaactcataaaaaattaaaaattaaaaaaggtaaaaatcagtagaatttttgcactttgaaatacttttctctgtctttgactttatttcaatgctagcaatggaaatcagggcccttgttcatgctaggtaggtgcactaccagccatacttacacacaggacacagatttataccaaaagcatggaattgtgccttggactctgagtgtacatgaggtgttagaagttgctcaaataaagggtttaatgatgaacaaggataaaacttgtatggtgcttttctgagataacacgaataaagaggctagtttttagaatttgttaaatctattgtgtgcacatgtgacccagaaaacctgatcaagtcattgcatgagttcataaattatttaggtataataatgaatcattaattaatgtaaatctagtttataagattaatgggaggggctggagagatggctcagctgttaagagcactgactgctcttctgaaggtcctgagttcaaatcccaccaaccaaatggtagttcaaaaccacccataatgagatcagacaccctcttctggagtgtctgaagacagctacagtgtatttacatataataaataaatctttaaagagtaaatgggaacaggagtaatttggccattcttgaagtaggtttttgtgcaagtacttattttgtatatgtagcataaaaaggaggaagattaccatcataaacagaagcattagtcagatcagagacttgagggttagagtgaggacagttagtgtcacatcttctttgaagaatagaaatggtgtttctcttgtcattcttttttgaaatcagtttccttttgaaaataaagtttcattttttttctttatacaaatgtagtcctatgcatttgaattnnnnnnnnnnnnnnnnnnnnnnnnnnnnnnnnnnnnnnnnnnnnnnnnnnnnnnnnnnnnnnnnnnnnnnnnnnnnnnnnnnnnnnnnnnnnnnnnnnnnnnnnnnnnnnnnnnnnnnnnnnnnnnnnnnnnnnnnnnnnnnnnnnnnnnnnnnnnnnnnnnnnnnnnnnnnnnnnnnnnnnnnnnnnnnnnnnnnnnnnnnnnnnnnnnnnnnnnnnnnnnnnnnnnnnnnnnnnnnnnnnnnnnnnnnnnnnnnnnnnnnnnnnnnnnnnnnnnnnnnnnnnnnnnnnnnnnnnnnnnnnnnnnnnnnnnnnnnnnnnnnnnnnnnnnnnnnnnnnnnnnnnnnnnnnnnnnnnnnnnnnnnnnnnnnnnnnnnnnnnnnnnnnnnnnnnnnnnnnnnnnnnnnnnnnnnnnnnnnnnnnnnnnnnnnnnnnnnnnnnnnnnnnnnnnnnnnnnnnnnnnnnnnnnnnnnnnnnnnnnnnnnnnnnnnnnnnnnnnnnnnnnnnnnnnnnnnnnnnnnnnnnnnnnnnnnnnnnnnnnnnnnnnnnnnnnnnnnnnnnnnnnnnnnnnnnnnnnnnnnnnnnnnnnnnnnnnnnnnnnnnnnnnnnnnnnnnnnnnnnnnnnnnnnnnnnnnnnnnnnnnnnnnnnnnnnnnnnnnnnnnnnnnnnnnnnnnnnnnnnnnnnnnnnnnnnnnnnnnnnnnnnnnnnnnnnnnnnnnnnnnnnnnnnnnnnnnnnnnnnnnnnnnnnnnnnnnnnnnnnnnnnnnnnnnactcaagacctggaagagcagtcagtgctcttaaccactgagccatctctccagccctgggcagttcttctatagaaataaatagtagggctccagatgcagttttttatgtgggttaagtctgagacttaactccatttgtcaggctggtactactagaacttgtattcaatgagatatttctttatccccaaggaagtactttataacaaacaaaaaaaaggttcacagtgctgaaatttgttaccattactttaggaagttagactcccattaagtgatgatttgttattagtctaaataatttatgaatttatgcaatgaccttattaggttttctgggtaatgtgtatagtgtagatgaaacataaactctctgtttttatgttcctcttagaaaactgttgtatatagtctgtgtgtgttggcaattttaagtcttttttttcttctggttaattggtttcacagaagagtagttactggttctgtgctaaaaaccaaagtgattatgtccagcataggcatggtaatagcactcactgtttttggtctaagaatgtgtgtttatgcatttcagttattttatataaatgagacctttttgtaagggatacaaagtgaaatggaagcagttgattttttttttctttgtcatttcactagtcacctacaaaagctgtatataatgccaggcattggaaccatccagactcggaagaattgcctggaccaccaatagcaaaacctcagcgtgtcacagtaagtaaatattttttctttctcttaaaataaattagaaattaatctagatagctattatcttaatttttgttcttacaagattataattgaaagctttacaaattaaaactttgtagtagctcaaggccaatgtaggttttatactgagacccaatctcagaaactaaacaacaaaaaaaccaaaccagagcttttaatcatgactcatgttttatagaatttatagtatttagggcttaagaaaaattattccttatatgaagtgttagtactgatatgtgtgtgtggtattatgtatgtttttgttttgttttggtttttgtttggttttttcgagacagggtttctctgtgtagccctggctgtcctggaactcactttgtagaccaggctggcttcgaactcagaaatccgcctgccactgcctcccaagtgctgggattaaaggcgtgtgccaccacacccggctttatgtgtgtatttttgtgagtgtgtgtacaggtgtgtatgtactcagtagaggataacttttatgagtaatttcttctagcatgtgggttctgtcaatcaaactcagcaggcatccttacctgctaagcagtctcattggccttggccttcaaggtcaaggtcaattttaatgacaaggtctcattaaatttggcttatttagctagattggtgagctccaagtatccaccagtctttataccataaactgctgtggtgctgtctgtctgtctgcctgcctttctttctttctttctttctttctttctttctttctttctttctttctttctttctttctttcgttctttcgttctcccccccccctttttttttttggtttaagagtatagataccaagtatccaaaccctcatatccttatgcttgcatggcagacactttacttactctcagcttattgatcctgagaatttataataaatctaggcatgatggccaatacctgtaattgtagtacttggaaggctgaagtaggtatcaccaccttgtcactaacaagtgctgcatagcaagacctcactctttctcccaaagctatatatagactatattctacaacttgtggacctttttttttttttaaagtttggggcctctgcctttttaagaattattttgtttttattttatatgtaagagtgttttgcctgaatatttattattgtatagctccttttttgtttggttggttttggttgtttttgtttttgttttttttggagacaggatttctctgtggtatctttggctgtcctggaacttattctgtagaccaggctggtcttgaacttaaagagcattctaagtgctgggattaaaggtgttcttcacttctgcctggtgactatatctgtatatcttaaagtgactttcattccttaatttgatttacatagagctaaaattacattcaattaatactttccaaaccttttgtaaaatattcttgctaggtatgctacccacaatctaggcaactaggagatgaagcccttggtcatcttgaagtaccacaggaatgagttcttagaacagtaacaaaaatgtgaggctcgagggtcatgtgtttgtgttgctaatgactgaacccaggccctgtgcacagacctaatgttcatcctcagctctaagaatggaggagctcttttggttttttgacaaggtttctctgtgtagccctggctgtcctggaactcactctgtagaccaggctggcctcgaactcagaaatccgcctgcctctgcctcccaagtatcaggattaaaggcgtgcaccaccactgccctgctagaatagaattcttaataaacactataatgttttttcttaagttgattatgaagtcaccatcatatatactagtaattatttgtgattctgacacacgctttgttctttttacaacttactatttttgttctgtgttgctttagtttcctatgcttctgtgattccctttgtcgtcgttttttgaagccctgtcttaactgcttatcaatgctacttatgcatgcagttgtggttctttattctgttaactgtcctggaagcaaagaaatgataggaaatgtgaagtttttaaaaaaccaaaagtatttctcaagtggttcttttgggtataaatcaaaatttaagtcttagtagtgcatggaatttaaattatttcttaggaactttcagcagcctccctcttccccctttaaaaaattttcatttacttttttaaagctaaatttgtcacatagacaagatgttaccttttaaaatatatttgcttagaacaactaatttaatacctttattaataggtgaggctgtcttcaaaggaaccaaatcaaaaagatgatggagtttttaaggctcctgcaccaccactcaaagtgataaaaactgtgacaatacctactcagccctaccaagaaatagttactgcactgaaatgcagaaaagaagacaaagaagtaagcagccatatactgtttcactgcacgtggatagatttctatgtgtaacaattagccttttgtcttaaacaaatatcactacattgctagccacattttgaaccacaaacgtaccttattctacttgtccaatactagtgattcaaaaacattttttttgttgccatcgaatgagtgattttataggcattttattaaatataatgagcctatagatttaaatatgctaaagttaccaagaggcgggcttatgtttttcttggcagttatatactgttgttcagcacgtgaaacacttcaatgatgtggtggaatttggtgaaaatcaagagttcactgatgacattgaatacttgttaagtggcttaaagagtactcagcctctaaacacacgttgccttaggtaagatcttaattgtactttctataatgttgtgcatgctatgtcattaagtttttcaactggatgggtttaaatttgttaataaagctaggcatgtaaaaaatcttggtgttgataattagccatatgcttttcagtttccagatgctacaagattaaataatatatactaagtaatctgagatgggttttttgtttttaatctcagaatttaagccactgactgatagattgatttgagtagtgacgtgggtcatcttttatatatggtgatagattgaatattgtatactttttgagttggttgtattatctatgatcagttgaaatatatccaataaaatataactacttctagttttaaaataatagcagtattatgactatgaaaaggaactagaattggtgattggagaaatacactacagaaactgtgctaatcatttttataaatttatgcccattcataatctaagccttggtacatgttttaaaattttggtttgcccgtggtttttatattttgtgttgtcaatattttaagccttctacttctttcttgtttggaattatggaaactacagctaatgtcttagcagtttttagctgccttaacatagtctgtttccttctagtgttatcagcttagctactaaatgtgccatgcccagttttcggatgcatctgagggcacatgggatggttgcaatggtctttaaaactttggatgattcccagcatcatcaggtaggtattttttaagtttctggggttgagaagtattattaaaaaaattacagtttttgtctatatcagaaaatactttcactagacattcatataagtgaattaaaggttgagtttattttatttgcttgataagtagagatgatagccatacatttttgctttatatatctcattttcttgaagacgtttttcttaagaaaagtttgtttatattaaaatactattcatttgtcagttagcatattatactgaatattttatactataaaatgatttcctttattcagaagttttaaaatattgtttgatagtaattgcatagaaaagggttttgaattacagccatggggctggagagatggctcagtggttaagagtactgactgctcttccagaggtcctgagttcaattcccagcaaccacctggtggctcacaaccatctgtaatgggatcggttgctctctgctagtattcgggtgtacatgcagatagaacactcatatacattaaataaatataaatcaatctctttaaaaaaatatagccataactttaaagtacttagctcattgttggatccggaaaaaagctgcattctcaaaagtaataaatggtaaagattaacgaaccaaagttaattcttaatgtcaccataagttagaaaaaaatagtcattaccaaacctgacagtgatatattgaggtggccttctatgaaaggaaattactttctaaatacaaattgagtggcacaaaattaatctaataccaattcttctgaaactaaaagttatgaaattaaagtgagcgaacattcctctgtacccaggttgtacttgacacagaataatgaggacaataaggcacaaggaatgtgttacttgctttattgactagttaggtatagtcttaagataaaactttttcttagtgacttcttaaggtcttaactgtgacattctaatttccagaaatacactttataaacgtttaatcagggggactgaaaagataattaagcaataaagatcctgatttggtttttacccatgtaagggagctcacaaccacctgtgactctagctccaagtttctggtctttttgagcaattacacctatatggtgtgtgtgcatatttctctctctctctctctctctctctctctctctctctctnnnnnnnnnnnnnnnnnnnnnnnnnnnnnnnnnnnnnnnnnnnnnnnnnnnnnnnnnnnnnnnnnnnnnnnnnnnnnnnnnnnnnnnnnnnnnnnnnnnnnnnnnnnnnnnnnnnnnnnnnnnnnnnnnnnnnnnnnnnnnnnnnnnnnnnnnnnnnnnnnnnnnnnnnnnnnnnnnnnnnnnnnnnnnnnnnnnnnnnnnnnnnnnnnnnnnnnnnnnnnnnnnnnnnnnnnnnnnnnnnnnnnnnnnnnnnnnnnnnnnnnnnnnnnnnnnnnnnnnnnnnnnnnnnnnnnnnnnnnnnnnnnnnnnnnnnnnnnnnnnnnnnnnnnnnnnnnnnnnnnnnnnnnnnnnnnnnnnnnnnnnnnnnnnnnnnnnnnnnnnnnnnnnnnnnnnnnnnnnnnnnnnnnnnnnnnnnnnnnnnnnnnnnnnnnnnnnnnnnnnnnnnnnnnnnnnnnnnnnnnnnnnnnnnnnnnnnnnnnnnnnnnnnnnnnnnnnnnnnnnnnnnnnnnnnnnnnnnnnnnnnnnnnnnnnnnnnnnnnnnnnnnnnnnnnnnnnnnnnnnnnnnnnnnnnnnnnnnnnnnnnnnnnnnnnnnnnnnnnnnnnnnnnnnnnnnnnnnnnnnnnnnnnnnnnnnnnnnnnnnnnnnnnnnnnnnnnnnnnnnnnnnnnnnnnnnnnnnnnnnnnnnnnnnnnnnnnnnnnnnnnnnnnnnnnnnnnnnnnnnnnnnnnnnnnnnnnnnnnnnnnnnnnnnnnnnnnnnnnnnnnnnnnnnnnnnnnnnnnnnnnnnnnnnnnnnnnnnnnnnnnnnnnnnnnnnnnnnnnnnnnnnnnnnnnnnnnnnnnnnnnnnnnnnnnnnnnnnnnnnnnnnnnnnnnnnnnnnnnnnnnnnnnnnnnnnnnnnnnnnnnnnnnnnnnnnnnnnnnnnnnnnnnnntgagttccaatgctacatagtgaaactgtgtctcaagaactccaactacacacctaacaaagatgtgtcaggtttggtggcacataagcaagtagatctccatgctgatttggtctccatagcgagttccaggccatccggactatgttgtgagaccctgtctttaaaaaaatgtcgttgaattaaaacattttttaaaaatccagcctttaagtccagcactgaggagggaggcagggataggttgacctctgtgagttcgaggccagctttgcctaaatagtggacaggaccaccagagctctgtcttgaaaaccttaaaaaaaaaaaaagggtatgcttgtttctttttaaaagttagtttatgagtgttttgcttgcttgtgtgtctggtgcttgcaagaggccaatagagttagaaatagttgtcagtgagccaccctgtgggtgcttggaatagaactggggtcccctggaagaacagctaatgcccactctttctgctgagtcatctcctcagcctcctagttaaatttatttcagtcccctgtattctgatggaaggcttaaattgtctatattttatggagggaaaattgtgttttgatacaaagtataaacatatttgttactttttttttttaaagaaaacaaaacttgacatacctttatgcacaaagaacattaaaggtatattgcaaaaggaaatatttataaattacataattcataaaaatgttccatatgtacctcatttaataaaactgttcaaagaaatgggtagcgaaggatgatagagaggaaagcacaactttaaatcagagttttatttatcaaatagctatgtttccctaggctattttgaaagagcagtaaatcaagcattatcagggtctctatcaaaaccatctataggaatattagacaatttagcttataaatgtcagtaatgtccttgtttctgaagttgttagtaattgctttcatgaatatttctcttttggggtctgttgaagaatctgtccctctgtacagctgctctcatgtacatattgagtagagaccgtttgaacatggatcttgatagggccagcctagatctcatgattcggcttttggagttggaacaagatgcctcttcagctaagctactgaatgaaaaagacatgaacaagatcaaagaaaagatccgaagactctgtgaaactgtgcacaacaagcatcttgatctagaaaacataacggtgggttgtaaaccttttatttttaagtaatatatattctgtttcaaatatacatgacaaggtggaaacttctctcttgaagtgtttaagtttgggttgggtttgggggacagataaaaacttcctttaagtctttgctaattattcttcctagattgcaagggattagcaggctgaaggataactaactaaatcactgccttcagccctgctgattatttcttctattagggctaaacttcctttattatatcaagaattagattactctctgttgagaagtggctttaggcttttttctccacttctctgctcattttttactttcgtaaagttggctcttttttaatcatactttgccttaaactttatactatagtgtggctcactgataagtatgtgggaaaattttcatgtttactatgttctgaaactataaatccagatggttagcactctaacttcaggctgttgaaactaatgaccgttgagtttgaacatttagggccactgacgttcccatactttcctccttgaagtttatcttactacattctttttgataggtcaatccaatatattgatttatagaaaagaaagtcgggtgtggtggttgcaagccttttaatctgagcacttgggaggcagaggcaggcaggtttctgtgagtttaaggtcagcctggtctacaaagtgagtccaagacagccagggctgagcctctgtattgccattatatattatatgaaactaacaaaaagtagattacttttaaatgaatttttttcatgaaagcaagctgtatagttaaatcaccgtttctttagtgtacactgattaaaattagtttattcacctataaaagcacatactgttctatttttgacttactggaatcttaataaagaaaaataaatcctaaaattaatgcatcagaattattctaaccttgtggtggcgcacacctttaatcccagcattctggagagagaggcaggcggatctctgagtttgaggtaagcctggtctacagagtgagttccaggactgtcagggatacacagagaatcctgtctcaaaaaaatcagaaaaaaaaaaaattattttacacctcagtattcattaatggtatttctgaattttagactggtcatttagctatggagacattgctgtccctcacttccaaacgagcaggagattggtttaaagaagagctccgacttctgggtggtctggatcatattgtagataaaggtctgtatacatacatgcatacatactgtagataaaggtctgtgtatgtacatgcacacacagagtgttatataacttgagtcccagtacttaggagacaggcaggtggatcttttgagtttgaggccagcctagtctacaaaaccagttctaggacagccagggctacatagaagagaaatactgtcttgtaagcacaaaattggagacactgtgatcaaggcaatttatagaaaaagtttattgtgagctcacagtttcagaggatgagtctagaatgagcatggcagtaagcaggcaagtgctggagcagtagctaagagttcagatcttgccgggcgtggtggcacacacctttaatcccagcactcgggaggcagaggcaaggggatttctgagtttgaggccagccgggtgaaacaaagtgagttccaggacagctagggcttatacagagaaaccctgtctcaaaaaacaaaacaaaacaaaacaaaacaaaacaaaacaaaacaaaaaatatataagcaccgaggagggagatgactgggaatgtcctgagtgctttgaaaccttagagcccatccatattacaggcctcctctgacaagcaaatatctcctaatccttcctaaacagtcacacagctattgaccaagcctccagatacatgatcctgtggggtccattttcattcaaaccattgtacttaactagcatcaggcataaaattatgttcccattccagcatatacgtattcatagcatgtatgtaggtaacgtttggtgttagctaagaaataattattgaactttcatatactaacttttgtctatttgttcttgcctagtaaaagagtgtgtggatcatttaagtagagatgatgaggacgaagagaaactagtagcctcattatggggagcagagagatgtttacgagttttagagagtgtaagtatgggcagctggacggggagttatctctacttgagattgtatgaccacttgatgttttaaatatcccgggggttttttacctttgcttatctgaattaaagttgtaaggattcttttcaaaaccaactgtcagtaaatgggcattttatcattttaagaatgtattgttttgctgtatatgctgataaatacttgtgatcctaaagttggaaaggaagattgtgagttcaaggccagcatgggccacataaataagaccctgtctcaaaccaaaagcttttatttgtatattattgctttaaatcaaaggtgcatacaagtttttttttttttacatgtatgtgactatagttttcttaatacagaaatctgtttttgttaaaacacgaacttgtttatcaaacaaacacagtcatgtcatggctttgttttagttagtacgcttttgtttgtttagtttttaagtcagattataagcacagctaaaaatgtttatttgactttggaaaataacactgttgggtgacagtacgtatgttttggtctttgattttaaatgacttaacctagttcagcacaggctacaattttactaacagtgaattttagaatttataattgctgattaagtagattggttaggtacttttaaaaacatggaagagctcttggcatatataaataaaattgctccttgtagggtgctgtttactaggttatacattatttctttatttaaaatacttaaatgactggctaaattggcacacatctttattctcaacacttggaaggcgggtgagtttctgtgagttaaagatcagcctgaacttcatagtaaattccaggatagccagggctatgtagagagatcatatctcaaataaataaacagacattaaaaagtaaaatatttcaaatatatttatgaattttaaagtatcaaatctgtatattggaggttttctgcatttcaaagtacttgacagttatgtgtaagttattatgagagtggtgtctttattgtatgataaattagtagtttttagttgggatcgcactgtgtaactttagctcacgtgtagttcactatgtataccaagatgtttttgaactcacagatgagcctgcctcatgagtgttgaaattaaagatgtgtgctacattctggttagtagttctcttattttaaatattgaagctataggttgtacaggtatttctctgcatcagggcttcataaactttgccatctatagcccatttttgcccagtaaattttaatgtgacccccaatatattggcaatactaaataggtacataatacaaaaagttttaaaattaaacccaagacagaatcaataaataacaatttggttttagttttggttggttggtttgttagtttgttttttgagacagagtctttatatatagtcctaactgccctagtacttgctatgtagaccaaccttgcctcagactcagggatgcacctatctctgcctcctgagtgctaggattaaagctcgtactaccatgcccagctattaaacagtaatttttaaagtcagtcattttgacacagtatataacccatgggtataccagtttgatacatactgaggaaaccattaagtctttgttatatttaatcaagtgactcattttataagaccagataattttgtgtatattataatatatagcataaaacagacgtgtttcttagctgtttgagcagtgtttgttggtgtgtgacatgacaacacacatgatgcaaaatgttcatgttgtgtcgtagaactaagtgaattcattaaatgagccatgggtgataagcatttctaacaacattttaggattcattatgcatttgatttttaatgaatttggttcattaaaaatgagaaattttctatactgcctgctttttcagtcctcgcatttaattacacctctgtaggtcagaactggagtttaagaaattgtgcccttagatgacaagatctgtttcatctttttatattttaagttatcaggtaaagtgtggtattatttatataaatgaaaattatggattgttagagtcattttatatccatcccttctaggtaacagtgcataatccagagaatcaaagctacttgatagcctataaagattcacaactcattatttcatcagctaagtaagttttataaactctcatttatttaaaactcaggaaataaagatgtattctattttttcttaaaatgttttgtctgttgagttttgtgaatatgtacattataggtaaaaagttaagagtgaagattcttgaggtaaaatggtttggtgagaattgtacatcctttatgttagctataatccaggacaaatgacttgttacaaggtgtttgtgggcagggcaagaagcctgggtactaggatggttttcatcactaaacaagtagatatatcttagcatatactaccatatatacattttttacagtgtatatataatacatgcaaagatgatgtttgttaatacattttaagtgattttaaggtgtatgtacaatatatataaaagaatcaaattctttaagcctactagaacattgcttagtatattgtcaatggtaaatattttaggccttttgtttgaagtggattgtaactccatttctgccacgtatttatatctcattttccagatctttgtctatctccctgactagccttcacaattaggctagtgctgccacctcagtgctctgtgtctctagtcctggttctgtctgattacaacagctgcttcttgctatcactgtcctagattttgctagctctgtcctagttctctggcctttatcttagccattatgccaccgggatttaactttctctggatctctgctttgaaaaactaatcttaagttgcaattctatatgacccttggctgtctttgtaaatttccttatacaagaacaactattttagtgtgaatggtccggtttatttgtgtattaaccttttatttggagagtttcaaattaagagacatatagactgaataatgtgataaactcttatacttagcttgaataatacatgggtgaaccttgtttctgtctataacctcatcttttgtgttattttgaagcaagctatatcatctccatttcctgttttaatgtaattttgttaattttatagcacattattatccttaacataagcaattcttccttatcaaggaacttccttgaagattaaatatgttttgcattgtattttatttggcgggtggtggttggggttggttgattgatttgtttgttttttagtagcagtagaaatggaacctatgcttataccagccaagtggtctgtcagtcctagtccctggttttttgtttgtttgtttgttttttcatttaaaaatattattcgtgattttaaagttgttttcttatgcttcttagtctctgagaattgccttagtaaagaagtatttaatgtgacatatttcatctcttgcatggggttttcttgtgaaatgtttgtagaagtggtgataaaagtcagaattgggttttgggaaatagcattcacctatagctttcaagaaaacacttatagatacttagtaatatttagcacagacagtttagttactaatagcaacagggaaatgttgtcaacatcctcaaacattaaagaagcaaattttttaggtttgacagtaaaagaacatctttctaaccaagaactgtaaaatattaggaaccttacaggatttcctcattgcatattaaaaataagctaggaatagattaaatatgtagaatttttctttacgggtttgatgtggtatgcaattcatgaaaaataaactgacaacgccagtttacttgatctgtgttagacttgaaaaaaaaatagtggatttgatggttgaaagatgccttggcagctggagcgatgactcagcaggtaaagaaacttgtagtatagacttgaccagaaaccatgcaaagctttaagacgtgcatctactctacaaagttgtcttctgacctccatatgggtgatatggaatctttgcttacacacatatcatacacacttattaaaaataatcagaatttacagatagacttgtgttagcattctacttccttgttagtgtgtgtcagacttgggaatcattggatgtagctgccagaagacctgttaatgttcctcaattaaaaataatgatttgtcttaacatatgtcaggcatttatttgatagtcatctttatcgagtaactttttttttttaaagatttatttatttattatatgtaagtacactgtagctatcttcagacactccagaagagggagtcagatctcattacagatggttgtgagccaccatgtggttgctgggatttgaactccggaccttcggaagagcagtcgggtgctcttacccactgagccatctcaccagcccctcgagtgacttttatatatgatactctacctgctaagaaagcattctcttatttgctaaataacaactaactggaaccgagaactggcattatttcttcagggtttatgggcgggagcatcatggtgatatattttgtatttgaggtatctgtaaaatgtgacagctcctgtgagtaacacgtttgttttgtgagccccccccccccattgttgtggtgctaattgttggtgtgagacaggatgttattcttttgtcccagctagtaaaagtaaactcctaggctaaaacaaccctttgccttagccgcctctatagtggggactgtaaacatgatgcacaaacatggaatgaacttacaaccttaactgtctttagagagaaattgtaatgatcaagtatactaaaattttgcagttagcaaaattattagcatgtgtggtacattaacattgtaactttaaaaacaggaaaacaaaacaaacttagtatttttttaggccccagttaataaattataccataattatttacattttattttctcttaagagcattacagcattgtgaagacctgattcagcagtacaaccgtgctgagaacagcatctgtgtagcagacagtaaccctctgccttaccagaatgtaactaaccatgtgggcaaagcagtggaggactgcatgagggctataattggagtattgctcaatttaactaatgataatggtaagtaataatttcttatgttgcatttgcagataagctattctgtttttcatgtactgatttacaatattccttaatataattaacttgctcctatagtcataagctacttttagaactgcctagtaaattagtctttgaatatcaaaactctgtatttcattaaagaaatagttattttaaaataaaaattttagatgaatacttcgtagccgagtatagtgtttacacctataatcctaacttggggcaaggcaagggaggctcagtgcatgaggttaaagtcagtctgaactacgaagtgagtcaagcaggattagagtaaaactaggactaagaaaagaaaggaagggaaaacaaaacaaaaaaatcattttaatgtgattattagtgttatcaggaaggtttttgtttgcattcttcagagtggggcagcacaaagacaggagaacaagaaggactcataggcacagcgatgaactgtgttcttcaggttccaaagtacctacctcaggagcagagatttgatattcgagtgctggtaagttcaagtgtggtcactttgtaattgtacttatcatgtctttagatgatgaaactttgttttaatttggatttaagaatctgtcatttattataatctgttttgttttggtggatccttatgaacatcttcatatttttctgttcttaaaacatttttcatagacatagaagtataaatgaaatggtggttgataactcagggagctaagtggcttgtgcctgtcctcctagcactgtaaagagtagagtaggaggatggccgtgagtcaaggccaggccagactgtgccaacaataagacaggtctgcggttcatggaagccagctaaaagaaagaacagtgtctgtcttacatagtggttgcaaatggaaaaatgctgcttgacattttatttacactaagttatatatattacattcattaagttcttgtgtgtgatgattatatttttaaatgttttatagggattgggtctactcataaacctggtggagtatagtgcccggaatcgacactgccttgtcaacatgcaaacatcctgttcctttgattcctccttctctagtggagaaggcgatcatagtttaaggctagccggacaagttcatgctgttcaagctttagtgcaggtgagcagcagtgacataattgcatatcgtatggattctataaggtccactgtgcacttgaagtcagctgagctcctcagcctgacggtccagattccctgacagggtccctaggatcttcagagggttcttggaccagttttgagaaatgttcttttgttttgtcaaagttactatgctgtacatactgtcttcaaagtctgtagatttagcacaccttttaatgtctgcatttgatacttggataattctcattagtaacttggtacttttcccaaatagtgtgattgggtatattaggtgctttttgtgttgaacatcatagcaacgaaaagaaaaagtcattgaagagaagggatttggtatgtccgcttgtttgtatggatacctgatagatagtgaactatgaatagtcttccttacacacttcctccagcgataagaatgctaaggatgtaaagacctagttctagagcttctatatttattgtttatattttagctttttattggtcttccggttaattcatccagtatgtgtaggtttgtctatttctttggtttttaattttagaaatgggtagggatttttaaatttgcttttgttttgtttttgtttcccctttaatttccttggaaatgttacctggattaaagataattaatggagacttttaatcttggaattacaatataaatcattactagattacttaaaaacagtatttgtgccaggcgtggtggcgcacgcctttaatcccagcactcgggaggcagaggcaggcggatttctgagttcgaggccagcctggtctacaaagtgagttccaggacagccaagactacacagagaaaccctgtcttgaaaaaccaaaacaaacaaacagacaaaaaaaaacccagcatttgtacttcagttttggttttcagtaaatgtaggacaaaagctttttaaaatcagataattcttatttcaaacactatcacactatgtacatgttagtacttgatgtctactttttttttttttataatatctttctagggactcctgtgtccctctcacttctttaattataattgttgtacatgtgtttctttaattacaattgtaagtttatagtgttgttcatgtgtgtttagtgctaacctcaggattgactaacctcgtagtatctttttaatgattttcaaaaataatttttatcagctatttctcgaacgagagagagcagcacaattggcagaaagtaaaacagatgaattgattaaagatgctcctaccactcagcatgataagagtggagagtggcaagaaacaagtggagaaatacagtgggtatcaactgaaaagactgatggtgcagaggagaagcagaagaaggaggaggaggatgaagaacttgacctcaataaaggcatgttaacctgaagtagtaatagagtcacagtgagaataatggtttttgagttcttttttagcatttgattcgcatattgttataatttagttaatgcctttatagtttgtctaggtaagctttggaattacagtagttcttctgtctttgagcatggtgtgtcagtgagagatcacttttcttgtttggtgcttctcctttactctgtacagagcagcagctaagttgggcatgagagtgcacagcttaattctagcatgaggtaggctgaggcagaggaatgccacttggaggtcagcctgggttttttcaatgagactatgtttctaaagcagaagggtatgaatgtctgaggttcttttatctgcctcaccttaaactgaggcgttccatcaaaatttacagggagtagttctcagagcttactaggcaaagagtaataacatcctagctagaggcaataaatatccttactagtgaatttattgactacctactgtttttacgaattatatttgctgtatatatgtacattctgcataataactttttgtaactaaacctctgagattttgggggtttcttgtttgatttattgagacaaaaatctctatatagctctggctgtcttagaacttgttctgtagacctgtctggcttgtaatgtccaagaactccctcattagtattgggattaaggcctgtgctaccactgccccataaggctttgaaatttaatatattcaacactttccacttagattgatgctgagcctgttttctttctgttcggctattccttccctaagttctgatactcggtctcttacttgaagacctgtggttcaatctatcttatcaacttatttcagttggatgcattttatggcatttgttagaactatgtttcttgtttttatagtcacatgtatgtatgtgtatatatatatatgcatatgactgcatataggcacttcatagtcattttgtttatctgtttgtgcattgatgaatccctttgggttgttttaatactttttcactagtacagtgatattaattgttttccagtgtggtagcaccagcccatcaacaatatgtgagggttccagtttattcacaccttcaggactaccttgaaggatatttttcttagtcattttatttgatgaagaactttttgtttcatttacagctctctaaaaactgattgtttgtaacatctttgttttttggtctttttgtgtatttgaagaaatgtctatttgggtctcatgcctactttttaatctggttattggtcttttattatgaaattgaaagaattctttataaattctaaacatcttaccagattaatgtttatgtacttccacgttgtgaactgtcttccactttgttattggtgaccttctaaaaaccaatcttttaagtatgttgcactttcgtttttatatttgggtcacttattcttttttttttttaatttgagatactgaattgtacatgcatcatttttagtagcttttaaggtgataacagtataattgatgttatggggtctatatcagctttgcactgtaataactacttatttaactgttttcagcccttcagcatgctggcaaacacatggaggattgcatcgtagcctcctacacagccctgcttcttgggtgtctctgccaggaaagtccagtaagtagataatagttcagaagtgcctcttgtatctttgaagattttttgcaacagcttcatgccattaattaacctgatgcacttagtttaaaactttccctgttcatacatgctttttatttcagaagagcggctgactgtttagacagttttatttatttccctgtagaagaaaatgtcaagaatatttcaataacttcctagtggtttcctttaaactttttaaaaatagaatgtgaacatctttatttcctttgcattacaggcttttatagaaagatcggagatgtagtggcttgtttgttggtctttatgattttttagaactgatatatctgtcatactcaaaactgtttaagatgttaaaaagcaagctgggggagggggcctcaggatgtaactcaattactaatgtgcttgattagtgtgcctgaagccctgggtttagacccttctgccacgtaaactggttatgacagttatgcctacaacccagcatttgagagatgaaggtagttggatcagaaaaattattcttggcccacctgggcctagagacctggtctcacaaaaacttaattagatacttttaatgtcataccaaaggatttacatacaagaaattaaaatagtttgggatgttaaagactttaaaatatttcttgacctttttaaggatacattctaaagaaagaatgatttttgttataacagggaagttcttggtatggatgattaagtccctgctgttacctgtagttgatgtaaaagaagggagggtttaaaacctatgctcagctggccaagtcaaatttggctcattttagtggcgcagtggagtaacttgtcctgcacaggttttattgtcctttttcttggttaaaagcactcagcatgggctggagattcgggcgcagctcttaaaagcacttgatgcttttcagaggattgggagttcggttcctagcactcatgtcaagtggcttataaccatttatgagatcagctccaaggtatccagtgcctctggcctctaacaacacctgcactgtatgcacaaacccacatgcgcacatatatacacgcatatacacatatatacacatagttaaaaaccgtcaaaataaaatatttttatgtctataaaagcacttgtcatggtcataagtgatcatacttaaggtccaatctagtcaaataatgtcccacaggacctcctcctcattttctttttaagacatcatccttggacttcttaaccatctatctggctaagcattgggccacatgcttcaggctaggaatatgttggtagcttatgttcatcaggaattatccctgagaaatatgtgtctatttaactctgtagtcacacagaaggggaggttataggtattgggacagtctgttgccattggaaaaaacaaatttgaacatcaaatccacaatgtgaacaggatcttggaagcactgttagtgttccctttggaatatgtgccacaggtagtagtaggtaagtgaaaggtcagtagtagttgcctttatttctaattgttgtgattaatacattgggacagtcatgtttaagtgtattgataatagatcttgaagttgtattagtctgatgtgtgatcattatggataatctgtagcttttgtgtccctaaaaaggggtttctgaatttgttgacagtattgtggagttgttacagccacagatatggtatattatggcatattagttgttttgtcaatccttataattagaaaactagatattaccacaagtacaaagtgaattggctttcccattgtggaagtggaagagataaagcacacatataattacgggcagtaagctgtccctgttctgtggccccatgcttaggaagtgtaagaacgtctgataccattttctgtttacctaccttgactaccaatttgcactcactaccaatttgcactcactaccaatttgcactccctgctgttgttggttcttgcctctctgtattctttgactctagcacagtttcacaagatctagctttcttaatttatctctgtcttgtcaacggcaatggaatggtggattgacttgtcactttaagaacatacagttacgcctgcttctcttgtttaccaatgccagcatgccttttggatagctgttatgcttttcaaatagtccatgctatatttttcctctttgaacctcctgtactatgaatgttgtaatgtcctttccatggccactataaatgtctagttctatatccaagtaaagaggaatttgaactaatgaagtgctttcattcacatcatgggagctatttattattgtagagacatacttttttactgagcagtcattcagagttacctcaaccattcttttctccaccattatggatgtttacatgtgatgatgattggactacttttgtagatcatggttattttagcaggcctttaaatttaaacttctttggatggatgttttgtctgtataatagttttctttttattgctgtaaaaagatcatgaccaaaaggacttggagaggaaaaggtttatttcatcttacagtttatagtccactatgatgggaagttgccagaaactcctaggaatcctgcttactggcttgctcaactttttctacaatctaagaccacctgcctagaggtggttgtctgccccatcagttatcaatgaagaaaacaccccatagacttgtgtataggtcaatctgatggaagcaattcaattggtgttctttttctcaaggtgactctagtttgtggcaagttgacagaaaactagccagcatattctacatgtaagtctgtacatggagtgtcttgtgcctggaggccagaagggtattagatccaatggaactggagttaaagacaattatgagccattatatatatgtagatgctgggaatcaaacccannnnnnnnnnnnnnnnnnnnnnnnnnnnnnnnnnnnnnnnnnnnnnnnnnnnnnnnnnnnnnnnnnnnnnnnnnnnnnnnnnnnnnnnnnnnnnnnnnnnnnnnnnnnnnnnnnnnnnnnnnnnnnnnnnnnnnnnnnnnnnnnnnnnnnnnnnnnnnnnnnnnnnnnnnnnnnnnnnnnnnnnnnnnnnnnnnnnnnnntttcctggaatttgccccataatttatcacaaatgataagttttaaagatttagttaatttttgtcttctaatttacctttgtagcatggagaattttctttcatctttctgttttataagcacctctgtgtgtagagtctgtctatatatttaattaactgtgcagtttatttcaaacctttctctgcattttcaaaactaaatattcacagatgtttctttgtacctttggctttggctagctttgttgtttcccctttgtttctgtgggtagggtggtatggagtggggaattgacccgaatgtttctgcacaataggtaagtgaatgtggactggaaatgacgtatgaattttggggtcctttgtagatgactacgggatatgtagcagagccaacagcatcaagtgagttacagtatcattttttaccagcttgactgtttttaatctgtttcttcagatcaatgtaactacagtaagggaatatcttccagaaggagatttctccataatgacagagatgcttaaaaagttcttaagcttcatgaatcttacggtaagtaacttttattgtatattgcagtttatatgagtttttgattattttccagacaaagtcttaacactgtagcccaggctggcaatccacatgtttcagccattggaccagtgggacctggctagtttatgtgtttttcaatttaaatgtaatacatcgaaggtgaaaataataatcccatagtgttgttcttccctgtggcaaaatagttaacataagcagcttacagaaggtacattttggtttatagttctaaatttttgtgtgtgtgtttttttttctgtttgtttttgtttttttgagacagggtttctctgtgtagccctggctgtcctggaactcaccctgtagaccaggctggcctcgaactcagaaatccgcctgcttctgcctctcaagtgctaggatcaaaggcgtgcgccaccaccaccaggctagttctaaaatttttagtcatgtgtggcaagagcagcgtggaagagcagagtggccagctaatagagaatgcctgtgtatctgctttctccttttattccagctgtgcttctaggctgtgggatgatgccacccacaaacagaaaactattgtggcagaatgttatattactaaggcaatgatttaatttcagtgtactctttactacgtagactttgatacttttttttgtttaccattttgttaagtattaactctaatttctctccttcccctcttagtgtgctgttggaacaacaggccagaagtctatctctagagtgattgaatatttggaacattgctagctgctttacctttgcttcaggtgcttggtaatgctgaagctatccttagacaaagaaaagacatgaaagaagtccttgaagatataccaagaacattcatcagtatcattcattcgtgtttggatttttatgatcacccgatttcttcatcatgcattctgcgtttgctaaatgacagttactacatcaatctgcagctatcaaaaatgagggaaaaggttcaggctgttaacaatcccatgcagtatttaaatacacttacttggcagagtctatacctgcccctgtttccttgctgtatttcaggcaaggtttaaagagggcaatttgtgctgctgttagtgcaactgctgtgtatgttgagccactgttgtcatgccagtcaggtgcaaaggcagcttagctactgaggtattgaatgttctgaggacattctagacaacagcttagatcctttttcaggctcatttgcttttgctttttgttgaatgattccaatcgtaaataaagcttttaataattttgtgaattttttggttgttgttccctgaactactgtctatatttaaaatgagatggaatccaaagacacaagggattaatagtatatttttttattcttgattaggtttgggtgttgaactatttttcacttctgagaccatgaccatattcaatgtcataccattatgtgtcatagctataggcacaagaaaacaaatagcagtttgagggaatattatgttatataagataatgtgccctgttaaaggattaagcaaaaatagacaaacccagggtagtttacacttaatgctggggaggctcttgaaacattgttacgttttgagggacgttctctagatatattttctaatgttcagttcagtaaatataataaggaagctaaaacaccaatgtggaatccgtttttccagatagcgtgtatattcttctatagagtgacaggatcaattgcataagcgcaaagccttaaaattgctggtgtagagaagacccttttttattcagattctatgttcatagagcaattgtttagaaaatggttgtggaacacacagaacatggtttatagggtaaatttcatagattgttttttctttttttttttttcttttttttttttgtattgttcagaccactggttatacattttctcctttttttattaattggcctgaggacaggctttccagagatgtttcattaatacttttaattacctttcagatagttacatcatgtttcttcattggatttgtaaaacttaaagccataaaaatattagtttggtgtgtattggggaaaatagctaaaagtctaactttgactcattttagactttgttatttccttgtataaagtaacaaaccggggctcttgtatccgtgccagctgtaatgtttttaaatgcagtggctgccttctattgtcttcctatttttgataatgcagattgttgggaaatctataaggaagtaactgactctaggcaaattgttttcttcctcctacccgcccaaccccctacccgtccgtcaccttttaggaacacagtatgccagtgtaatgtgggaaccattgagactgtatttgccctgagtaccaaactaatttagtgaatttttttttaaacatactggtaaatgatgtccacaaatttccttagatatattttaattaattgtcttaaaatacattgatatttattaatcattggatttggggacagatttttgactgtggcagatggtagggaacagaacagtaaacagttggatgagatcaatcagggcgaattacatttttctgttacactggtgatcatttgagaattgatttacctcagtgtttaacagtttttgttttgtttttaaaatactaactaattgtcaagcactgatgagatgcaggtttggtggggtgggctgtgaggaagacctcaccttaccaactgcagtgcgtctctgtgttttagcctcagagaactctcattctagggtacttgaggctgacttgcaaagtgactaaagttttaaggtaaccttttttccattgtaaatacttctgtaaatactaccagttggatattagaacagtaggatacttttctgaatccaatcctatttttattttatacagtatttctcagctgtgatctttggagcaaaagccaacggcaggaaaaaatagtttgtaccagtttcatgaagtatgtctttgggtttttgtaaataattttaactcaaataaaattgatactttaaatacacacgttgtctttaacataagtctattgacctgttttggaggaagaagtctcagaacttgttaaggccagcacaccgtgtcatttgagcataagtgtccaatttttcttaaatattttatatacttgtaagtactggtctgaatggatgtagccgcttagcactttgggctggttagggatggtggttttctgagtgtatagttaaatccttagaatgccctctatgttacttgaaaacttttggctttctgaatatgacggtaaatttctttgcttttgaggtttgatagccattttttaagcttttaacttttttttttcttgttagccttaaagatttttaagatttacaagtatagtctcaaccttgccttacttgatttagtcgcaagagtagattacaggattttcccctgaattttgcagttcctctccccatttatacacatacacaagtgtaaagccacctgtgagagtggacaaatggtgcaggtgctagacttggaaagacctaaatcacacacgtggagtttgattcccagctctggtagttgctgttaagttggagcaaattctttttttttttaaagatttattttctgtgtgtgagtacaatgttgctgtcctcagtcacaccagaagagggctttggatcccattacagatggttgtgagccaccatgtggttgctgggaattgaactcaggatctctggaagagcagtcagtgttcctaaccaatgacacatctctccagccctgaagcaaattcttaaaactataatttacccagtttccttcattgaaaaatgggagacagtacagacctacctgatggttgtatagattaaatatgtgtgaaacattattataatgctccaaatttaatgtttattagtaagtgctagtttttacagttttttttttttccttttactatttctctgtaaaaaggtaaaaatgctctggaaatgaaatagagtgcttgtgactattaagggcattatatgtaacactggtgcctcacatcactgcagttgatggtttgtgcttttgacaccagattctccaaattactatttccaaacttggccttgttaatctcttcatgatgaatcataaagcagagggaaattgagcaaactttaatgctttctaaaatgtttcaggtctttttttttttttttctcccccttagaatgatcaaaaagaggtttggacaactctgttgatggcttccagatggagatataattaagtaccctatgtagaatgtctttgaacaaactcttgagtgttttggtcaaacctctttctctctctgacttctgtatatgtgtagtttgaattccccaagtgccatgtgctgctttaaggaatgttttcattctacctaggttgtacatctctaagaatttgctggctaaaatcatactacagagagtacatatgccaaacatgaccagaatgtctattgataatgactgttatagtgaatgtagacactgaacattccattgttaaggcagagattttgagattgattcaggagatactaaatgaaactacacggttacaggatttgttgatttagtagtttgtggtgaaggtgggtatcatcatgctcagagcaaacagcacagaaactgtagatagagcttgagttgctagagtagtcaaagcagaacactagacagaaggagaaacagtaacaaaaactagcaagaaatagcaaaatgggcttgtgtgagttttcctctggctctcacaaaagtaaaacatatcagaacaggaaaagtaattctgtctctgcaagagaaatagccaaagatgtcccctaaatgtcgtggtgactaattgtattaactcaaaactagttaaaaggtgagactgcgaaacaacctagagttgctgaatttaaatgacacattaagccgggcagtggtggtgcacacctttaatccagatacttgggagttcgaggccagcctggtgtagagtgagttccaggagagccagggctacacagagaaaccctgtctcaaaaataaacaaataaaagacacattaaagtggaaaaaaaggaaaaagtaaaaatacacaatgcaagtgctaatgaagtattgatgtaagacataatttagggctgagtaatgtatttctccaagagcattttgtaatcacgaggtgtggggtgtatacagaacacaacatcctaataccacagaagtgtttataagtatgtgataataacaatcatatcagtaggtaaattcacaaccatagtttcagattttaatacaacttcagcaagtaatagtatctcacagttgtgaacagaaaccatgaccaaggcaactcttacaaggacagcatttaattggagctgggttacaggtccagtccattatcattaatgccaaagcatggcacatccaggcagacatggaacaggagctgagagttctgcatcttcacctgaaggctgctaggagaatactggcccctacgtggttagaaggagacagaggcacacttccaacaaggctacacttaagagtgccaatgagccaggcatattcaaaccaccacattctacacatgagtctaagggggctatacctagtcataacataaaaaatatattcagtccagctttcaaagtccccacaagtctataacagtctcaacaatctttaaacgttcaaagtctcttctgagattcatccacttaactaatccccaatgcaagaccggaaagcagctgggcaaactccacactctgcatctccatggctgatgtcaatttggtcttcacatttccaactcttttcatttttgttgacaaactttttcttggtctggttccactacctgttaacagctttcttcagcaagtatcacatgactctggcgtctaacatcttgaggtcaactttacaacttcttgtttcaacatctgggaactacgcatgatctgacctctccatctctaccctctgtagcactctggttgactccaatccactgctgctgctgtgcttggtggtcattccatggccctggcatcttgaatatgctgggctcttctgctgcaactagtcttcaccaataacctctcataggctctcttcatggtcctcaacttctttccatcaccccttcagtcctgtgccatcaactgcaactgagactccacttttaccaatggccttccatggcctctcatagtgccaagactcagctgttcttcacgtcaccttcataccttcaaaacaaataccacctgggtgactcttacatgtttacaagtccagctgcagcagaaggtacaaccttggctatctctggaacacagctttgttatggtctcagaacacacttcctagaagattttcatctcagtgatactagtctcttcttcatctctgctaatttcttagctccagctaaccagcttcaaattatctcagaaagtcacttttgtttttgattaacaaccagagccacatggccaaagctgtcaagttctgctgcttgctgnnnnnnnnnnnnnnnnnnnntatcaccagctttctgctttccaactacttcactgcctaagcttggctatcctggaacttgctctgtagtttgaccatgaacacggagatgtgcatggctgtgtctcctgaatgctggaatgaaaggtgtgtaccaccactcctggatttttttctctacttggaacttgctctataccaggctaaccttaaactcagagatctgcttgcctctgtctcctgggattaaaggtataccaccatgtttggacctaggcttagctgagtgggatcttgtcccaagatgaccactcccttaatatgtttatcttcttgaacataggattcatcaccattttactttttggtgccccttttttacttgaaccatacattttacatcttacctttctcagcttgctccttttcattaaaaaacactcttcaccagactaaaccagagaacaaagcctctgctggactcttgtgacttcctttaatggaattaatataaatacacctcttaaccttagccttgagagaaggcaaaaagcagtcacattcctcaacaaaataccacaaaaacagtcttcaggccacatactgaaattcttcacttgaagccacttgggtcaggtctgcacaattcaactctctctcagcaagggagtcttcaatatgcctactaggttagccctacttaaagcattcctctgctttccaaatccgaagtctccaaattcacattcttccaaagaaaagaatgatcaggcctatggcagtaatacccaagtccctggtaccaacttctgtcttacagttttcattgctatgaagagacaccatagccaagacaacttttataaggccaacatttacttggggctggcttacaggttcagaggttcaattcattatcagtgcaggaacatgcatggcagggtccaggcaggcgtggtacaggagatgctgagagttctgcatcttcatctgaagattgctaggagaagactggctcccacgtgattaggaggagggtctcattgcccacctctacagtggcacacttccctttatttagcaaagccacacctactccaccaaggccatatcgcctaagagtgccactcgctgggccaagcatatttaaaccactataaatagcttagttttgttattttttaaatataagctggttgctgtagcacatacctataattctagctactcaggaggctatgtcaggccaattacgtaagtttaggagttaaaaggcctgtttggacaataacatgtctcaataagtatgtaattaaatgtgaagttacagaaaagttgagtggatgagttgccttaatctaatattcagaaaaattacattgaacatagatttttgtattgcatatgcaaatttcaccaagataatctgagagctcataaagcagacttctatgcatttcagatgactgaaggctacagagaatatacctgtgaatcagcaatcaaaaatcagaacaggcctggagagatggctcagcagttaagaacactgactgttcttccaaaggtcctgagttcaaatctcagcaaccacatggtggctcacaaccatccgtaatgaaagctgatgccctctgctggtgtgtgaaaaaacagctatgatgtacttacatgtaataaataaatcttcaaaaaaagtcaaaacaagcaacaattgcaaaccatattcagatattaagcagcatgggccagtgagtaagtaaaagcaagaaaagatcgtgccaattaaaatacaatacattggagggtttttttttttttactttgtttattgccacattaaaagcagtacttaaaattaaggctatcattgtgaacctgaaatgaaaagcatgaagtaatttaaaacccagtgtaagtttgaagaaagaaaaattagattagaaatcagcataataaacttgaaaacaaactgaaaatgcttaaaaaaaaaagttgagcccttaaaaccaaaaactgccagtgttgggaatgaaagatgaaataatacagagcctatggatattcaaaagaaataagatgttacaaataagccaaaaatctttacaactaaaattttagaattaattgagaaactttgaaaaatgacaaggtcaggccacattctgtggtatgtatgtgtaagcagtatttgggaggtggatgcaaaagaatcaagtttcaaaggctgtgtttagggagatagctacttgagacactgtcacacaaaaattgtgtgtgtgtgtgtgtatgtatgtataaagtaaaaaaggaacattaaaaaccaaggcaacatgtccccaaaggtactagttccacagaaatggtttccagtgacagatgaaatcgtagacaaagaattaaaaggataattataaatacatccaatgaagtcaaaagaaggcacaagtctaagaatacagtcagctgactgaaatgaagttgataggagttattaatgcagaagtcaatgtcgagctagaaagattgaagaattgctagaaatagacagtaaattaaaaggttttagggagtcacagatagaatggatcaaagattggttcagtgttggggatagaaggcaaggtagatgaaatgttcagacaaagataaagtacaaaataagatctatggggcactatctaaagaccaaacctataaattctggacctgggaaaatgagaatttcatgccggaggaatggaaaacattattttcaagaacacaattgtgattgaagtttccttaaacctaaagagatgcccgatcaagtacagaaagcataacaccaaatagataagaacagaagaaaccttcctgtatcatagctaaaacactaaaatacacaaaataaagcattgagagcttagagaaaggcaccaagtcaaatataaaggcacaccccttagagtagcaccgtaccgctctcaatagaaaggttggagggcttgagacgacgtattccaggctctagagcacaactgtcaacccagactactatacctagcagaactatcataactgaagaagaaaagagctttctgtgataaaagcagactaaaggaattcatgattacaaagcaactctacaaaaggtccttgaagtcctctagactgaagagaaagataaacacatcatggaagctacaagaaaaaccaaacaaaacagcaaatgaggcaaatggttagaaagtaatattaagagatagattgtgtggcgcacgcctttaattccagcactcgggaggcagaggcaggcggatttctgagtttgaggccagcttggtctacaaagtgagtttcaggtcagccagagctacacagagaaaccctgtctcgaaaaattaaaaaaaaaaaaaaaagattggtatatttggttcaacaggcaacaggatccatctattttttatctccaagaaatgtacctcaccatcagatgcaactttagtataaaacaaaagaaaaagatattctaagcaaatgctctaataggtaacaaaaattgacttcaaaattagaacctaactgaggtcactttagtgtctccccaattgtttgggggcactgtgtactttgagctagcctggaactcctgtttccccttcccgtctcacgggagtgctgggattgcagatgtgtgtcactgcatctgactttttgacatgggttctggggagcaaccttcagttgtaaggcttgaacatcaagcatctttactccttgagccatctggttggctatcaagacatgttaaaaaaaatattgatggaaacatcaggtaggtgggatacagcaaaatggggaagcctttgctatagctctcagattgttaggacagtcttataatttgaggtgatggaagccaggggtctgtctgtacattacacattaatttacctaatggtcacaggatatgtggtcacacacagagattggctttaaatagctatttttaggaaataaggtctctcagaataatttggctccaacctgtaacattccaactccccacaatcatggacattctaaatagtcaatcagatgtgtagaatgtttaacacagatacagtgttctcttccgttcctgagaacttcagttcacaaatctcatatgagaagaaagaagctaaagtgctggcagaagaaactttcctctgagaggacagggttagccagggccagaatccatggcaggctgcaaactgtcagtttgggagagtaggcctaagtttctgttttccagaatggaaaaagtccaaagcaaatcgattctaggaaaacccacccctcacggccagccaatcaggaagttactccaccacttagcctgagtcaacctcatggacagccaatcaggagctgtagaagctaccccaccaccaagtataattagcaannnnnnnnnnnnnnnnnnnnnnnnnnnnnnnnnnnnnnnnnnnnnnnnnnnnnnnnnnnnnnnnnnnnnnnnnnnnnnnnnnnnnnnnnnnnnnnnnnnnnnnnnnnnnnnnnnnnnnnnnnnnnnnnnnnnnnnnnnnnnnnnnnnnnnnnnnnnnnnnnnnnnnnnnnnnnnnnnnnnnnnnnnnnnnnnnnnnnnnnnnnnnnnnnnnnnnnnnnnnnnnnnnnnnnnnnnnnnnnnnnnnnnnnnnnnnnnnnnnnnnnnnnnnnnnnnnnnnnnnnnnnnnnnnnnnnnnnnnnnnnnnnnnnnnnnnnnnnnnnnnnnnnnnnnnnnnnnnnnnnnnnnnnnnnnnnnnnnnnnggaggggcggccatccacttttcctctatcagtttgttttctagtttcttataagatgcagtgaggttatgaatcttaatgtcccagataataaatactcgactcgaccccaactgtcggatttggaggatcatgaagtgtctgaccatgtatgtttaccatgtatgttcctggcactctcatataataaacactgggaaagatgaacagtgtacgttgctcgaggttgctagttgccagcaggacctctgagttgagcactggtgctgagggaagaatgctaacatcatcttagggtgttccttcatcttagttttggtatggtggtgaagctgatccctgggagcaggaactgggtagatctcaccctgactgacagttggattgtcatagaacttcagtgatctgctctgacttgggttttacgtgccataattttaaacgtgtacactgtaaggtgtacatcgaggatttcccttgactggttgtttcaaaaacagattgttcactgggcttatagcatagtgtactggctagttttgtgtcaacttgacacagctggagaaatcacagagaaaggagcttcagttgaggaaatgcctccatgagatccaactgtaaggcattttctcaattagtgatcaagggggaaaggccccttgtgggtggtgccatctctgggctggtagtcttggattctataagagagcaggctgagcaagccagaggaggcaagccagtaaagaacatccctccatggcctctgcatcagctcctgctccctgacttgtttgagttccagtcctgacttcctttggtgatgaacagcagcatggaagtgtaagccgaataaaccctttcctccccaacttgtttcttagtcatgatgtttgtgcaggaatagaaaccctgactaagacacatagccttctcatgtcatctacaaagaccaaaaattacagacagagagtggcaggatgttggcctaccaggaggaaaagaacctgttcttccaaggggagtttcctggggacactggtaccttatagttcctaccacgctatgtcaaatcaggtgtttctgactagccagggttctatctgttgactttattgcagtcttggttctgaatacacaacatgcatgcacaggccatgcttcatgcatgtaatgccaccaaaacaaacaaacaaaacaacaacaaaacagaaaacaaaaaaataggagaaagaaactgcttgaaacactttggttcacattagagtctactgtaagatatgatttgcagtgcttgtattttataaataaagctttctgctcttatagaaacaatacttatacaaaacaaaaccttttaccattttacagtacaacattctgaagttagtatatctttggattgtaatatgctagaatctttgattttaaaaattgtgggttgggctggtgaaatggctcagcggttaagagcactgactgctcttcaagaggtcctgagttcaattcccagcaaccacatggtggctcacaaccatctgtaatgagatctgacagccctcttctggagtatctaaagacagctacagtgtactcacatataattaaaaaaaaaaaaaagaatggcctgggtccaattcccagtgccacatagaactggacatggtgttacacacctgtaatcatagctagcacctgggaggcagaggtcagatgaaca

SEQ ID NO: 1577 - DNA, 5849 bp, Mus musculus
ggggccgggagcgcaaatggcgttgagatggttcagggccctgttcaaactccagcgctgaccattcaccggcggaggcggcggcgcagaaggcggcggcggcccagcgggggcacagcccctcgcctctctcggtggcaccggtcggcactggtctctcgcgcggggctcccgcgcccgcccgcgggccgttgggagcgggagaggcggaggcggcccgaggccaaagcacccgccaggcgccgaggggaatatgaaacaggtgtcaaaatgacatccagatttggaaaaacttacagtaggaaaggaggaaatggcagttcaaaatttgatgaagttttttccaacaaacggactactcttagtacaaaatggggtgagaccacatttatggctaaattagggcagaagaggcccaatttcaaaccagatattcaagaaattccgaagaaacctaaagtagaagaagaagatactggagatccctttggttttgatagtgatgatgagtctctacctgtttcttcaaaaaatttagcccagggtaagggttcatcttactcagaatctagtgaggctgctcagctggaagaagtcacttctgtatttgaagctaatagcaaatgtagtcatgtggtgggtgaagacagttttgcttccgacagatgcttacttgtggaggatactttaattgggaaagagaagagcataagtagaattccagaagacaacgcaaacaaaagtagttgcactaagttgctaacttcagataaagtggagaattttagtgaagaacatgaaaaaaatagtcaccactttcacaaaaatgctgaagatagtactaagaaacccaatgcagaaaccgcagtggcttctgaatataaagctgatgaaactaaagaaacaaatgatacttggaactcccagtctggaaaaagaacagagtctccatctgaaagttgtccagtcaaaggatctgtaagaactggtttatatgaatgggataatgattttgaagatatcaggtcagaagactgtattttaagtttggataatgagtctcttttggagatgaaagacgaggatttaaaaaatcggattggaggattggaaaatctaaatgaaacctttgaagaagatatcatacaaagtgttcttaggccaagcaactgtaggacgtactgtagggccaataaagcgagatcctcacagggagcatcaaattttgataagctaatggatggcaccagtcagtccttagccaaagcaaacagtgaatcaagtaaagatggcctgaatcaggcaaagaaaggtagtgcaagttgtgggaccagttttcgaggaacagttggacggactagagattacactgttttacatccatcttgcttgtcagtgtgtaatgttaccatccaggatactatggaacggagtatggatgagttcaccgcatccactcctgcagatttaggagaggctggccggctcagaaaaaaggcagatattgcaacctccaagaccactactagatttcgacctagtaatactaaatccaaaaaggatgttaaacttgaattttttggttttgaagatcatgatgagacaggaggtgatgaagggggttctggaagttctaattacaaaattaaatattttggctttgacgatctcagcgaaagtgaagatgatgatgatgacgactgtcaagtggaaagaaagaaagacaaaaaaagaactaaaacagctccatcaccttcccagcagcctcctcctgaaagcagcgacaattcccaggatagtcagtctagtactaataatgcagaaaacttggattttacagaggacttgcctggtgtgcctgagagtgtgaagaagcccataagtaaacaaggagataaatccaaggaaaataccagaaagatttttagtggccccaaacggtcacctacaaaagctgtatataatgccaggcattggaaccatccagactcggaagaattgcctggaccaccaatagcaaaacctcagcgtgtcacagtgaggctgtcttcaaaggaaccaaatcaaaaagatgatggagtttttaaggctcctgcaccaccactcaaagtgataaaaactgtgacaatacctactcagccctaccaagaaatagttactgcactgaaatgcagaaaagaagacaaagaattatatactgttgttcagcacgtgaaacacttcaatgatgtggtggaatttggtgaaaatcaagagttcactgatgacattgaatacttgttaagtggcttaaagagtactcagcctctaaacacacgttgccttagtgttatcagcttagctactaaatgtgccatgcccagttttcggatgcatctgagggcacatgggatggttgcaatggtctttaaaactttggatgattcccagcatcatcagaatctgtccctctgtacagctgctctcatgtacatattgagtagagaccgtttgaacatggatcttgatagggccagcctagatctcatgattcggcttttggagttggaacaagatgcctcttcagctaagctactgaatgaaaaagacatgaacaagatcaaagaaaagatccgaagactctgtgaaactgtgcacaacaagcatcttgatctagaaaacataacgactggtcatttagctatggagacattgctgtccctcacttccaaacgagcaggagattggtttaaagaagagctccgacttctgggtggtctggatcatattgtagataaagtaaaagagtgtgtggatcatttaagtagagatgatgaggacgaagagaaactagtagcctcattatggggagcagagagatgtttacgagttttagagagtgtaacagtgcataatccagagaatcaaagctacttgatagcctataaagattcacaactcattatttcatcagctaaagcattacagcattgtgaagacctgattcagcagtacaaccgtgctgagaacagcatctgtgtagcagacagtaaccctctgccttaccagaatgtaactaaccatgtgggcaaagcagtggaggactgcatgagggctataattggagtattgctcaatttaactaatgataatgagtggggcagcacaaagacaggagaacaagaaggactcataggcacagcgatgaactgtgttcttcaggttccaaagtacctacctcaggagcagagatttgatattcgagtgctgggattgggtctactcataaacctggtggagtatagtgcccggaatcgacactgccttgtcaacatgcaaacatcctgttcctttgattcctccttctctagtggagaaggcgatcatagtttaaggctagccggacaagttcatgctgttcaagctttagtgcagctatttctcgaacgagagagagcagcacaattggcagaaagtaaaacagatgaattgattaaagatgctcctaccactcagcatgataagagtggagagtggcaagaaacaagtggagaaatacagtgggtatcaactgaaaagactgatgcccttcagcatgctggcaaacacatggaggattgcatcgtagcctcctacacagccctgcttcttgggtgtctctgccaggaaagtccaatcaatgtaactacagtaagggaatatcttccagaaggagatttctccataatgacagagatgcttaaaaagttcttaagcttcatgaatcttacgtgtgctgttggaacaacaggccagaagtctatctctagagtgattgaatatttggaacattgctagctgctttacctttgcttcaggtgcttggtaatgctgaagctatccttagacaaagaaaagacatgaaagaagtccttgaagatataccaagaacattcatcagtatcattcattcgtgtttggatttttatgatcacccgatttcttcatcatgcattctgcgtttgctaaatgacagttactacatcaatctgcagctatcaaaaatgagggaaaaggttcaggctgttaacaatcccatgcagtatttaaatacacttacttggcagagtctatacctgcccctgtttccttgctgtatttcaggcaaggtttaaagagggcaatttgtgctgctgttagtgcaactgctgtgtatgttgagccactgttgtcatgccagtcaggtgcaaaggcagcttagctactgaggtattgaatgttctgaggacattctagacaacagcttagatcctttttcaggctcatttgcttttgctttttgttgaatgattccaatcgtaaataaagcttttaataattttgtgaattttttggttgttgttccctgaactactgtctatatttaaaatgagatggaatccaaagacacaagggattaatagtatatttttttattcttgattaggtttgggtgttgaactatttttcacttctgagaccatgaccatattcaatgtcataccattatgtgtcatagctataggcacaagaaaacaaatagcagtttgagggaatattatgttatataagataatgtgccctgttaaaggattaagcaaaaatagacaaacccagggtagtttacacttaatgctggggaggctcttgaaacattgttacgttttgagggacgttctctagatatattttctaatgttcagttcagtaaatatggttatacattttctcctttttttattaattggcctgaggacaggctttccagagatgtttcattaatacttttaattacctttcagatagttacatcatgtttcttcattggatttgtaaaacttaaagccataaaaatattagtttggtgtgtattggggaaaatagctaaaagtctaactttgactcattttagactttgttatttccttgtataaagtaacaaaccggggctcttgtatccgtgccagctgtaatgtttttaaatgcagtggctgccttctattgtcttcctatttttgataatgcagattgttgggaaatctataaggaagtaactgactctaggcaaattgttttcttcctcctacccgcccaaccccctacccgtccgtcaccttttaggaacacagtatgccagtgtaatgtgggaaccattgagactgtatttgccctgagtaccaaactaatttagtgaatttttttttaaacatactggtaaatgatgtccacaaatttccttagatatattttaattaattgtcttaaaatacattgatatttattaatcattggatttggggacagatttttgactgtggcagatggtagggaacagaacagtaaacagttggatgagatcaatcagggcgaattacatttttctgttacactggtgatcatttgagaattgatttacctcagtgtttaacagtttttgttttgtttttaaaatactaactaattgtcaagcactgatgagatgcaggtttggtggggtgggctgtgaggaagacctcaccttaccaactgcagtgcgtctctgtgttttagcctcagagaactctcattctagggtacttgaggctgacttgcaaagtgactaaagttttaaggtaaccttttttccattgtaaatacttctgtaaatactaccagttggatattagaacagtaggatacttttctgaatccaatcctatttttattttatacagtatttctcagctgtgatctttggagcaaaagccaacggcaggaaaaaatagtttgtaccagtttcatgaagtatgtctttgggtttttgtaaataattttaactcaaataaaattgatactttaaatacacacgttgt

SEQ ID NO: 1578 - DNA, 3789 bp, Mus musculus
atggttcagggccctgttcaaactccagcgctgaccattcaccggcggaggcggcggcgcagaaggcggcggcggcccagcgggggcacagcccctcgcctctctcggtggcaccggtcggcactggtctctcgcgcggggctcccgcgcccgcccgcgggccgttgggagcgggagaggcggaggcggcccgaggccaaagcacccgccaggcgccgaggggaatatgaaacaggtgtcaaaatgacatccagatttggaaaaacttacagtaggaaaggaggaaatggcagttcaaaatttgatgaagttttttccaacaaacggactactcttagtacaaaatggggtgagaccacatttatggctaaattagggcagaagaggcccaatttcaaaccagatattcaagaaattccgaagaaacctaaagtagaagaagaagatactggagatccctttggttttgatagtgatgatgagtctctacctgtttcttcaaaaaatttagcccagggtaagggttcatcttactcagaatctagtgaggctgctcagctggaagaagtcacttctgtatttgaagctaatagcaaatgtagtcatgtggtgggtgaagacagttttgcttccgacagatgcttacttgtggaggatactttaattgggaaagagaagagcataagtagaattccagaagacaacgcaaacaaaagtagttgcactaagttgctaacttcagataaagtggagaattttagtgaagaacatgaaaaaaatagtcaccactttcacaaaaatgctgaagatagtactaagaaacccaatgcagaaaccgcagtggcttctgaatataaagctgatgaaactaaagaaacaaatgatacttggaactcccagtctggaaaaagaacagagtctccatctgaaagttgtccagtcaaaggatctgtaagaactggtttatatgaatgggataatgattttgaagatatcaggtcagaagactgtattttaagtttggataatgagtctcttttggagatgaaagacgaggatttaaaaaatcggattggaggattggaaaatctaaatgaaacctttgaagaagatatcatacaaagtgttcttaggccaagcaactgtaggacgtactgtagggccaataaagcgagatcctcacagggagcatcaaattttgataagctaatggatggcaccagtcagtccttagccaaagcaaacagtgaatcaagtaaagatggcctgaatcaggcaaagaaaggtagtgcaagttgtgggaccagttttcgaggaacagttggacggactagagattacactgttttacatccatcttgcttgtcagtgtgtaatgttaccatccaggatactatggaacggagtatggatgagttcaccgcatccactcctgcagatttaggagaggctggccggctcagaaaaaaggcagatattgcaacctccaagaccactactagatttcgacctagtaatactaaatccaaaaaggatgttaaacttgaattttttggttttgaagatcatgatgagacaggaggtgatgaagggggttctggaagttctaattacaaaattaaatattttggctttgacgatctcagcgaaagtgaagatgatgatgatgacgactgtcaagtggaaagaaagaaagacaaaaaaagaactaaaacagctccatcaccttcccagcagcctcctcctgaaagcagcgacaattcccaggatagtcagtctagtactaataatgcagaaaacttggattttacagaggacttgcctggtgtgcctgagagtgtgaagaagcccataagtaaacaaggagataaatccaaggaaaataccagaaagatttttagtggccccaaacggtcacctacaaaagctgtatataatgccaggcattggaaccatccagactcggaagaattgcctggaccaccaatagcaaaacctcagcgtgtcacagtgaggctgtcttcaaaggaaccaaatcaaaaagatgatggagtttttaaggctcctgcaccaccactcaaagtgataaaaactgtgacaatacctactcagccctaccaagaaatagttactgcactgaaatgcagaaaagaagacaaagaattatatactgttgttcagcacgtgaaacacttcaatgatgtggtggaatttggtgaaaatcaagagttcactgatgacattgaatacttgttaagtggcttaaagagtactcagcctctaaacacacgttgccttagtgttatcagcttagctactaaatgtgccatgcccagttttcggatgcatctgagggcacatgggatggttgcaatggtctttaaaactttggatgattcccagcatcatcagaatctgtccctctgtacagctgctctcatgtacatattgagtagagaccgtttgaacatggatcttgatagggccagcctagatctcatgattcggcttttggagttggaacaagatgcctcttcagctaagctactgaatgaaaaagacatgaacaagatcaaagaaaagatccgaagactctgtgaaactgtgcacaacaagcatcttgatctagaaaacataacgactggtcatttagctatggagacattgctgtccctcacttccaaacgagcaggagattggtttaaagaagagctccgacttctgggtggtctggatcatattgtagataaagtaaaagagtgtgtggatcatttaagtagagatgatgaggacgaagagaaactagtagcctcattatggggagcagagagatgtttacgagttttagagagtgtaacagtgcataatccagagaatcaaagctacttgatagcctataaagattcacaactcattatttcatcagctaaagcattacagcattgtgaagacctgattcagcagtacaaccgtgctgagaacagcatctgtgtagcagacagtaaccctctgccttaccagaatgtaactaaccatgtgggcaaagcagtggaggactgcatgagggctataattggagtattgctcaatttaactaatgataatgagtggggcagcacaaagacaggagaacaagaaggactcataggcacagcgatgaactgtgttcttcaggttccaaagtacctacctcaggagcagagatttgatattcgagtgctgggattgggtctactcataaacctggtggagtatagtgcccggaatcgacactgccttgtcaacatgcaaacatcctgttcctttgattcctccttctctagtggagaaggcgatcatagtttaaggctagccggacaagttcatgctgttcaagctttagtgcagctatttctcgaacgagagagagcagcacaattggcagaaagtaaaacagatgaattgattaaagatgctcctaccactcagcatgataagagtggagagtggcaagaaacaagtggagaaatacagtgggtatcaactgaaaagactgatgcccttcagcatgctggcaaacacatggaggattgcatcgtagcctcctacacagccctgcttcttgggtgtctctgccaggaaagtccaatcaatgtaactacagtaagggaatatcttccagaaggagatttctccataatgacagagatgcttaaaaagttcttaagcttcatgaatcttacgtgtgctgttggaacaacaggccagaagtctatctctagagtgattgaatatttggaacattgctag

SEQ ID NO: 1579 - DNA, 99957 bp, Homo sapiens
  misc_feature (18861)..(24451): n = a, g, c, or t.
  misc_feature (32241)..(32940): n = a, g, c, or t.
  misc_feature (36743)..(36979): n = a, g, c, or t.
  misc_feature (51687)..(51706): n = a, g, c, or t.
agaacaatgggctgttgcaggaaaacaagtaacatgtaggaaagacaaatggacccttaggacaacagttggacataggatagtttataacaatgtctgtttaggtgtggtgccaaattctctccagcgacaagagaccatcttccctgcttgcaaaactcccaaggaagggatttatgacaactggaagttatgacaattgagttctttgggggaggatctagttttaggcagacaagggagttcaggaggaaaaaaaagctattctcaaatgtttccagattaaaatatatgttttgtttgtttgagacagggtcttgctttgtcactcaggctggagtgcagtgtaagatcatggctcactgcagtctcgaactcctgggctcaagcgatccccccacctcagcttcctgagttgctgagactacaagtgcataccaccacatctcattgatttttaaatttttgtagagacagagtctcaacatattgcccaggctggtctagagctcctaggctcaagtgatcctcctgcctccgccacccaaagtgctgggattacaagcatgagccaccaggtttccaaataatttttatgttgcagtagcatattctggacgcctttgccatgaacagatacaaatatctgaacatttactttgtacaaagcatgcatgtgtactgttagcaatacgaaatattttagcacaaaaatcaaaggagcgtataacaagttgagagtataagacaaatgaaacttaaaattttttgttttttaatattcatacaacagcaaagaaaccttatatcatgaatgttttttcagctggcaaactggcaaagataaaaacagactgatatggccgggcgtggtgcctcacgcctgtaatcccagcactttgggaggccaaggcgggcggatcacgaggtcacgagatcaagaccatcctgaccaacatggtgaaaccctgtctctactaaaaatacaaaaattagctggacatggtgacgtgcacctgttgtctgagctactccggaggctgagtcaggagaatcacttgaatccgggaggcagaggctgcagtgagccaggatggcaccactgcactccagcctggcagcagagcaagactcggtctccaaaaaaaaaaaaaaaaccatcctggctaacacggtgaaaccccgtctccactaaaaatacaaaaaaaaattagccaggtgtgatggcgggcgcctgtactcgggaggctgaggcaggagaatggcatgaacccaggaggcggagcttgctgtgagcagagatagcgccactgcactcccgcctgggtgaaagagcgagactccgtctcaaaaaaaaaaaaaaaaagactgatatgattatgttgggaggagagaacatattcaaatactgttggctggaatatgaatggttacgaagattttgcagggtggcttggcactttccatccaatctgcatggcttctcttatagtaaatgcatttctaagaattcatttcataaaataaaaacagtctcaaaggatatgtacaaacaccacagcatatttgcaatgcaaaagaaaaaaatggaaataatctaattattcattaacacgaaactggtaagtaaaattaaggtataatcagaaaatggaataactgcttaactactataaagaatgagatgattaaggctgcgcacaacacctcacacctgtaatctcagcactttgggaggcctaggtgggaggatcactttagcccaggagttcgagaccagcctaggcatcatggtgagatcccacctccacacacacaaaaattttttaattagctgggcatggtagcatgcacctctggtcccagctattcaggaggctgagatgggaggattgcttgagcccaggagttggatgctgcagtgagctgtttgcaccacagcaccactgcagcctgggcaacagaacaagaccttccctcaaaaaaaaaaaaaaagaatgaggaaattgaaatttactgacataaaaagaatccccctatatattcagtgaaaataaatttaaagataaggatgtatcgtatgaccccattttaggaaatggggacagaaaaaaagaaagaaggcaacagaaaagaaaattttttctagctctatactttcaacagtggcaatcttggggcacaggtgaagcatgattacagaagactttcattacttcatttctgtattgtttgaaatttcaaccacaaatatgtgtaacttctgttaacagaaaacacacagttctatggtaatacgtagttagggaaactatactagagtttcaccatgtgtattagcatattaaaagttctgagaaggtttgtagtaaagaaatctaatataccaaaagattatcttcaaataatgatgcagcaaagagccaactatgaggcttggaccactgaggagggcttcataggagagagaggaatattcttttttttttttttttttttttgagacagagtcttactctgtcgcccaggctggagtgcaatggtgcaatctcggctcactgcaacctccacctcccaggttcaagtgattctcctgtcttagcctcctgagtacctgggattacaggcgtgccaccacacccggctaatttttgtatttttagtggagatggggtttcaccatgttggtcaggctggtctcgagttcctgacctcgtgatcctcccgcctcggcctcccaaagtgctgggattacaggcgtgagccacagcacctggccaaggatttatactagattttaaagcattctgatgggcaaagaaccagggaaaggaaagtcaaaggcagtactgtccaatatgacgtgtaattttaaactttctagttgccacatttaaaaagtaaaaagaatcctgtgaaatcagttttgtttttttaactgagacaaggtctcaccacgttacccaggctggtctcaagctgctgggctcaagcaatcctcccacagtgctgggattacaggcatgagccaccatgcccggccaaaatcagttttaatatatttctttaatccaatgtatccctaacagtatcatctcactatataaccaatattttaaaagcataatgagatattttacatcttttggtactatcttcaaaatctggtacgtaattcacacttagactagccacagttcaagtcttcaacagccacatgtggtagtggctatctattgtagtggacagtagaggtctaaggattctgaacccaaacctgaatcggatatttaggtgacttaggctgataaaatagtaggaaaggaagcaaagcagaaaaggctgacttggccagagcaggagaccagtccaagatattctggattttctattgtaagcaaataagaaaacagggaaaaatatttaacaaatagggatgatgaccaaagcagtacttcagaaagattaacagtttttgctaaaatatacacgtacaacttcaacatgcaatttttcccccacatttttattacataaaagattataaaatgaaggaagaataatctgtcacccagcgattatatttcattgatttggtatacatttaagatacttctgaacagttaccactgaaatatttttatttcatgacatttttaaatgattcttgaaaaatgcagacattaagagcctcaccaaaatttaacagcctttactttaatattttctaacaagagcttcttttagccaggaatctaaaacattcttatatacaaatttaaaacactcaagaccctatactcttgaaatacattacaaagcattttaattactagtaagaaaactacctacaaatcttaatatacataaaacagtatcaaaactatccaagtcagccagatgtggtggctcacgcctgtaatcccagcactttgggaggctgaggcgggaggatcacgaggtcaggagattgagaccatcctggctaacacggtgaaaccccgtctctactaaaaaatagaaaaaattagctaggcgtggtggcgggctcctgtggtcccagctactcaggaggctgaggcaggagaatggcgtgaacccgggaggcagagcttgcagtgagccaacatgcgccactgcactccagcctgggcgacagagcgagactccgtctcaaaaaaaaaaaaaaaaaaaaacaactatccaagtctcctacagatttctcaccttcaaaattgagagtctatcttctcaacattttgatactttacccaaaggctaaagaaaaaaaaattaatgctcaaaaaaggaggtaagaaagcaggatacgggaagggcaccgcaggcataagccatactcccttgcaaggactgccaaggctggcgtgattcttcagccaaaagtcagaagtccagtgatgtcattaggaccaaaagcattatatgaccttcaatttcggcagctaactgtgctgcaagtcaagatattttctttctttttctttttttaagcagaaaaattatcttaaagttcaccatgttccttctattttttaagataaagaaacgaagattcggattgggttagtgtggcatccgtgattgaataggtactcagtagtaaaaccagtatcagacattatttataaaaaattagaagctgaaacttaatcattccgctgcttctttatggctttttatacttcccaaattacccacaatagatgtattgcctttaaaatttttaaaaagctgcaaaaactgctcactttactgaatacttctggccgggcgcagtggctcatgcctgtaatcccagcactttgggaggccgaggtgggcggatcacgaggtcaggagttcgagatcagcctgaccaacacagcgaaaccccgtctctactaaaaatacaaaaattagccaggcgtggtggctcacgcttgtgaccccaactacttgggaggctgaggcatgagaatcgcttaacccgggaggtagaggttgcagtgagccaagatcacgccactgcactccagcctgggcgacagagtgagactccgtctcaaataaataaataaatactactgaatacttccaaaaacagtctccttgtcctttcttgcctaaggtctcactctgcgggctacctttctcaggaaagccttccaaagtacccgcatcctgaacagcccagcttcccttatcagtcttgtaacattccctggacttcctttttgtagatcttaacataactacaactagataattatttaatgtctatcttctctacccaggccttaagttgaaatttctcaagactggccaggcgcagtggctcacacctgtaatcccagaactttgggaggccaaggcggaaggatcgcctgaggtcaggagttgagaccagcctggcccacgaggcaaaaccctgtctctactaaaaatacaaaaaggagccaggcgtattggcgggcgcctgttaaacccagctactcgggaagctgagccaggataatcacttgaacccaggaggcggaggttgcagtgagcccagatcgcaccactgcactccagcctgggaaacatagcaagactccgtctcaaaaagaaagaaaaaaaattctcaatgctgttttaggctctttgctagaccatacaaggagttctcgatacgaggtctataacctataacctgtaattctataacctataacctatgtcttcctctgccagatatatgcacctgcctgaaatgagaccacaaaagtgaagaacagaaaagacaacctcaattaattatatcatttgagcacttaggtccagccatgtctatttctagacctttcaatatcatgggggttagtggggagaagcttttccctcctttaagctaacttgagttagggctgtcacttgtaagcaagagtcacttgagagagccacccaattcccactgttggaatataaaatctatacagcaatgactcccaaatgcctacctccagcacaaacctctgtcaaaccccagacccatatagacaactgccaagtggaaatccctacttggctgtttcagatatctcaaactccatgtgatccaatactattttcttctacaaaccagctctcccacctcatttttcatatctgtcacccacatctaccctgctttccaagctagaaatccaggagttgttcttgccaatcccattccttctctcatccacgctagttatcgcctcctatccattccaggccctaattatctgccaccatcttaacccatttatgcctgaggctgcaattttttgaatttttgcaatcagaccttggtgatgaccttgagcaggatataaataactcccacgtgcttagcgttccaatagtggaacactaggcataaatgggtttaatccgggctaggccagaaagaccttcctacaagtttgaacatcttcagtcttcctttcttcaaaatgattttccaacatgtaactaatctccctaactgcaaatgtgattataatattttatccctatctctagcatactcctgtcctccttcataagtcaacagccaattatatacagctggatcaagagccaagctccactgttccagactttaacagtataacaaatctgtgccataagaaaggaaggctcatcagaaatataaaactataaaagagtaacaaagtctacaacatcagagtaaataaaagatactcaaagataatttactcatctattcaatgtctactcattagttatatattaaactgcccatacgaactggcttagggaccacaggggccaccctgagatggagtctactgatcatctgatctccctatgcccctaactagtgttcttttcaaaaaacactactggggatttccaggcacatccaagagctttgattagggagagaaacactattcatcaattctaagatgcatccatttttcatattttagcatctccggaattggggtgcaccttacaatcaatggcttcttacaactagaagcatattttaagtggtctgtaacactactgtgtatcttacaatggacataactcaatgcaagtcaacatttaatcttgtgttaaaaagttggtccaacttggtcaatatggaccttgtgatgttaaaaagacatcctaaagcctaaaaactagtaaaaggtgggaaagtagaaaaggaaaagaaatggttcctacttcaaaatttagtgtgataggaaacccattttcctttctctccatggttcgctgctcctaagatccaatagtcagatcaggacagttcaacagctactgttaggctagacaggagcctttccccatttattccttttaatatgcaagaaaagtccgttacagacccaccctgcaaactagtagtgaaactaatatttgtataaaaactgctataaaggccagccacagtgcctcacctgtgtaaccccagcacagggaggctgaggcgagcggatcaactgaggtcaggagtttaagaccagcctggccaacatggcaaaaccccacctctactaaaaatacaaaaattagccaggcgtggtcccagctacctgggaggctgaggcaggagaatcccttgaacccaggaggcagaggttgcaatgagctgagctcacgccattgcactccagcccaggcgacagtgcgagactctgtatcaaaaaaaaaaaaaaaaaaaaaagaaagaaagaaagaaagaaagaaaaaacaataaggtattaaaaaaaaaaaaaaaaaaaaacaggtaaatctgaggcaaataccacagaaaatatttcatttaatggaagacctaggaaacttctgagtggcgaagtggtaagaactgggcttacagattaatttaggcagaaatacataagattagataaaggagaaaagtgaaggcaagaaaatcataacattagtccaggtgggatgagaacttgatttagagttagggggtgggggtggagtcgcggggtggtggggggagaactacgtgaaagccaaataacactagatttgaaaataaattcctgaaaaaaatgtgaaacattaaaattcatatgagaatcagaaaatcgacacaaaccaacagctattaaagaaattgaagtgttactcaaagtcctctccagaaaaaagatctaggcctaaatggtcacataggggaggtcttccaaactttcaaggaacagataatcccagtctaaaatgatcctgaaaaagagaaaaagaaggaaagctgcccaactcgttttatgatttgactactaccttcacaccaatatgaattcagaattgccccacagttagcaagaatagagagcagaagagttacaatatcataaagcagaatcaacagatgttggctacagacaagatatgatgaaatgggaaaaggtttgggtttggtatgacatcaacaaaaataaagaacaccaaagaggcaagtttgctaaggaaaagcagctcagaacaatcaggtacagatatgtagaaagcaactgaataaaaaagaaaaaacaaaacaaacaaacaaaaaaacgtgattcagaagacacataaacaaagaattgagaattattccaacagaaaggtctgaacaatcattctaagggactagagacatagagaaaagtgatctgaaaagtgaaacttggagaacgcatattaaagaggaaagaagaaacagaaggcagaaaagtggcggagaggaacaaagtcagtataatgtcacaaaaggcccctcttcatctagttaatagttaactcttgctcatccttcacaatctgcctgggttccaacaaagcaattttaaggtatctttcccagattctcccaccaccacaagcaccagatcaggtctccatttgaagttcttataatattctgcaccttaattaaaatcacaattatatttaactagagactttatttttcaataagtatttccccactagactttaagctccatgagggaaggatctgttgtatcttactgccttggaccctgtgttagaatacagcgagtatagatgaatgaaacccaaggagaggcatctgaaaatgtgaagtcgatgttaaatcttacagaaaactcaaggagaggacttagaaaaaggtagttaaatgtgttgattaggttatagttccttgtgaaggtgaaatccagataacaaggggttaagaaatgagtggctagccaccaaccaggcaaaggcaggaaaagcagactacacttggcaatctctagagatggattgtgaatgactaaattttaatttcaatgttgcgctagttcgcaattaacaaccatgtgttacttttattacgaacaagctttttaaaatgttaataagatttgaaaaggaaaagcagcaacaagacagcttgaaggagtagcagacttaagaaaaggtttttgtaaactgaaaaaatcttaagaacatttgtactttaaagaacccaaatacgacagagaaaataactcacgctccactaagcaggaaaattagaaggaaaggaaaaaaaccccaaggtgttaactaataagaaagacaaaaaaaaaaaaaaaattctccctctttgacggaaggttaagaagccagtaacagaaggaatttaatgaaggagctcctgctaagtgcctcaacctcttctgtaaagggtggggagaagtgaagaaagtagaaaaagtttaaagtgggctccacggaaaatggaggaaaaattaaacaagaactgagtctggttctactaaaaacgcattctacatttcaatcggcctttcatacactcaccccattcctagatcagagaattgcccatattttagcttcaaatttaaaaatctaaataattctggttcacattctttatttcaacaactgaaaacaatgagacgcattaagttacactctaattcaaagtttaactcctctcacaagtaaatacaataaagtagttgttttcaactccagcaacaaaatagcgataatttcaagtaagagtaactgaaaaatgttcctaaacgtaaaagtgtttgcaaacagttttggttttttttcttcctaattcgtttgccagaatacgatgttcctgggttcaaatcccagctcccttagacaagttagttaacctctttgcgactcggtttcttcccctaaaacaatgaggaatacaataaaccagaatcgttgtaaggattaaatgacgtaacacaggtgccaagttcatactatgtactctgaacagtttgttaaccgcttaaaagagaaaacctgcaggagtttgaccaaattaaaacatctgagagcatgaaagagtaccacgctcaaacgccagaccctaacacacagcatattatttttcttccctgacgcaagctcatttttttttccttgccaaatctttccactaggagtctggaaagagaaaaaagggtccaggcaatccagcagaaagttttccaaaactgaagtacggaatcaccaggccacggagcggaggccgcgcaggacaacaggtgaagcagctccgggagctcgggggccagggccccttcccgcggggactcgggggcgggccggctgctcctctcactcgacccccgcccgaaactcattttgttctcccctgttcctccccacagcgtccggagccaaatcacaaatatcagcctcgccgctccggggcggggaggtgagcgcctttcccatttaaggattccagaagcgtccccggagcgactttcgcccactccgcatccccaaactcggcctgcaacccgcgagtgggagacaaaagaggggccggcgggggacgcggcgcggggtgccgtgggtctctggctgggcggtcccggcccagcgcgcgccgaggcctgcggagctgccggggccgggccgggcagcccctggctccggccaccgcgcgcccagctgcctctgcagcctcgcccgagcccctctggcctccccgctgcggccagcccctccggtccgcacgcgcactcccaactcacccggaccccagggaacgcatcctccagccctcggcgcggagcgggtgggcgcggcgagccgccggggcgaagtggggccccgaatcggccttcgcccttggcgtgcagcggccccgacccggtcgcccctcgatcgggccgtgcgatcttcgccgcgcgcggacggacgcgccgagcctaagccttcctgcccgcccttggccctcctccctcctcgctcctgcctcctcccttctccttcgccaagcccggcaggcggattccaatctctgcagcggccgccgccaccgccgccgactcttgccaggaggggagggggcggcgcgggtgcgggggcctgggggaggggcgggcgtccgcgggccttgcacggcgcgcgcgcactgggaaggcccccgcccgcgccgcgcgcacccgaccacgggcgcctgccccgccccgccccggacacgaaaagagccgagcgcacggcggaagcgcccgaagagttcgcggagcccggcgcccagttgccggggaggagggccagccgccggcaagggggcgccgagctgctggtgcgggcgggagtcggggctgctcctccgcgcgggcccgccggcccctccccacaagccagccccacagctgccgcccgggtagcttcccgcagacgccgtaggtagcacgcgatggaacgcggcggaggggagcgtggacacggctgccgggcgctgcggccatcggcgccctggacgcccgctccggccttcggggccggatatccccactctcgcgggctctttcgcgtggacccctcctccggccgacactcacactgcggtgaacgccagtcagctggcgtgaaataaggtcgctgggaaggcaccaagtcaccaaggtgggggatggccaggtcgtggtagttgcgacaaagaaaaatataagtcacattgcatttgtttctcgcccacccaccgctcccggcgtctcttcccgggctccttgccagcgtgccgaggcgcaggcagggtgatggaggctccccggccgggaggatctgccggggagagcggcttccctcatcgattcgggagcgccaggcccggcgcgcccgggctcctgtgacctgcgagcccgcgaattccagcggcataagataaggagcggcgagggcccaacaggactgaggtcagccagctataaatacgcctccagctccaccgcgggctcacgctggtgacctcgtgtaccctccggaggctcattccgtccatttggaaaatgcaaataattgtcaccacctcttttcttccatttcccctcattcatggtggaaaatgcttttaaaagtattcgatgacccgtatgtgaggaaagaggagataggcccctttttcaccaaatgtgactttaacctccttagtaatccaagaaatgtatcaagtttaagtcacttaacaaaagatgttcttttaaaggtgcattttaaaaaatcacttttaaaactgggtaaactgggtaaaaagaaagggggaaggaaaacaatgtgccaggcatttgtattgacacacattcttgcctgaagaggtgtttagattccagggtattcccttatattctggtgtaaatgtttgaattcccgtgtattttgtttcaattttttggtttatcttttattctgtctcccttttcttcttttacccgcctttgcccttaatgctgcagatagcctctgtcattctgaattatttttcaattctgttttcttccctaatctttttttctgggctcttcagctgtctcaggtttgacagtcatgggttgtagtatcttgctatgcaggaagaagaggatacgtgagattacttgcatcaactaaaattggtcacttttctttctcaagtttccttcataatacccagttttagtttttttgttttttggggtttttttgttcttttttttttgagacggagtctcgctctgtcgcccaggctgaagtgcagtggcgccatctcggctcactgcaagctccgcctcctgggttcacgccattctcctgcctcagcctcctgagcagctgggactacaggcgcccgccaccacgcccggctaactttttgtatttttagtacagacggggtgtcaccgtgttaataggtgttctcgatctcctgacctcgtgatcctcccgcctcggcctcccaaagtgctgggattacaagcgtgagccactgcgcccagccccagctttagttctaaaggaaaagatgggccttttgcttaaggagattcacattgattggtcaaagctctcattgacgtatgctgagcaatgtgtcggcagagaaaaccatggcaagcgtgttattatgctctttatagtctagttggatttttagacatatgaattggtctataaaatagacaacaatctcaggtgggaaccttagtacatcaagtttctgaaatgtacaaatgagtattccctggcttgtgttatctgccactgtagaaatgagagcaaaattgaagcatcaaattttaagtcgtgatatgtttgcttctctgcaaaagactctccttttcaaatcttcaggaatttttcgctctcctttgataaggcccagctagtacccaggcttcaatcctcagcgccctggctaccagcagctagtggggcatgctgttctccctggctactggcatgtttatgcatgccagcccgtttctccggtctgtctgcccagggagacatctggacacgtgtgttctggcccccaaactcaaaagcaacatctcgggatccacagttaacattccgtaatgtgttggtattcctttaagtgggttactagaataggctggaaatggtcttttcttctgtccaggtaggtcacaagagaggtagttgttacatgcccaaagcagcattcattaattacatcgtgcatttagttatttgtttgtggtctgagcccctctgctccactagaatataaactccatgagcaaaagactttgtcagtctctctttttttagagacaggttctcactttgtcacccaggctggagtgcagcggcatagtcatagttcactgtaacctggaactcctgggctcacgtgatcctcccccctcagccgcccaagtagctgggactacaggccagcttgactttgtcaatctattctcaactctctcctcagagcctagtgcctggcaagtgaatatttgttaaatgagagaagagaaataagcatacatatcctctaggcatttctaaaccttgtcaccaagacccttttagtgttagagggtggcatggctatcttggaaagagtgaaggttggctgggaaagctgtggatcacatcctcttcagtgaaatgggacttctgccttcagggatccaaggtgaatagattaatccaagctaatccattcaaagtcattttcatgttgtaaagatcttataaggcaaaaggcagcacgaagtctctgggtctgatgataagttagaggccagtaaggaggcacgagtgaaggaatgtcattggtagggtgaccctttaggttggcttcaaacccaatattaaatgggtaggtgttagggagaataaacagcttcatttttcagcatggacactactacatcttttttttttttttttttttttggttagtagtaccccatcatggcttagaaggactaaactgaaacagaaactgtggttaagaataagatggatgtatataattcagtgcacaaaatagaggaagtttaaaaacctgaattcattttcattgtggtggtacagtgttttacttcttttgtttacttctaaacaacttgctccttctcccttagctccattttaatttatctttgcctcaaagcactggctactatgattgaaagatagatgatggaggatattgctgctctcacttggtcctacctagtccgtggcctctgtattcctcctttccctactatccgtacaccctttaccatagaacctgatctttcctaggccttgaggcaggaagaattatcagagctttggtcccaagctcaagactcagcctcccactgcctcgcccctttctaagaactgacagcccttctcttgtgtctgaaaccctgacctgttagcttgccaggacctggaatttctctgcttgttgtttggacttagctgcatccctgcacccagactgctgggcagttgtaggtattgttggtggcatcacttaattgcctccagctctttgtttctaggctccctgtatctgtattctatctatctgttgggcctcccttcccccattacctcaggctggatgtccccatccccactgcgctcctggactaccacctgttgtttgctcactactctctggctatcaggcactgcctagaggactatggttcctcccaccgagcaccgggagctggggcctccctaccccaactcccacgcagcccacagtagatcttggccttccctgtcctgctgcagctcactgccctgcttttccctatcctcacagcacctggtttattgcacttggattattttttaaccagatgaaaactatatataatatatatgctctggacatacactaagtacatattaaaggtgtattatatgtaattttggctgggcgtggtggcttatgctagtaatcccaagcactttgggaggccaaggtgggtggatcatttgaggtcaggagttcaagaccagcctggccaacatggtgaaaccctgtgtctactaaaaatacaaaaattagctggatgtggcagcaggcacctgtagtcccagctacttgggaggctgaggcaggagaatcgcttgtcgcagtgagcccagatctcgccattgcactccagcccgggcaacagagcgacactctgtttcaaaaaaaaaaaagctatatatatatttttttctggctaaaaattaatccaagtgtaataggggtgtgtgtgtatataatctattgaatataattcaaatagatttctagtctgaactttgtgtgtgtgtgtaggtgtttgtgtacatatgtaagtatatgcatatatgtatatatgtacacacaaatatgcatatgtgtgcatatgcgtatgtgtgcacacatatgtgcgcatatgcgtatgtgcgcacacgtgcgtatatgcgtatgtgcacacatgtgcatatatgcgtatgtgcgcacgcatatgtgcacatgtgtatgcatgcatatgtgtgcatatgtaagtatgcatgtacacatatgtgcatatatgtaagtatacatgtacatatgtttgtatgtatacacacaaaaaacccatacatacattcaaaaatgaaaagacccatgtctgattcttcttactatccctaaacactgattctactcaagaattcctttggagctagtagtccagaaatccagcatgtggagctgaatatgattaccttgggaatgactagtaaaaggaaggcaaggtgcgatgataaaagattcaagctgagataactggggagataaaatctggatcaggagtgcagattcatgaacaccatactgtgcctactgtccatggcttacatggtaattgggatgtattcctagatgtggtgtggtgtcaccagtgtgaccaggcatactagtttacccatcggatatgttgaaagtacctgaccctgtgctggactcaaaagttcagagaatgggaactgtctcattctcactccattgtatccagtgtgctgcttggcacaccagtaggtagtcagtaagtatttattaaatgaatgacatacttaattttgttctctactggtagtttgccctggcgcatttctttttatttctattagccaaggcagggttaggtgttttgttttgttttgtttttccatatttttgaggattaatgataaagcacttatcttgttggaatgagagtctactaacaaatcctgtacatcataataacagaactatcatctaacaacttgttctcaataaataaactttaaaacaacttcctttattatttcaaaggcatacatagtcatatatataaccagtaaccaatacttgtcagtgtttattttaaaatgcagattagtttccatttagtttgctacctaccttaaagcccctcttcctccgatcctgaatgctgctagctctcctcctaattggtcattccctctttcaactaatgttgcccagttgtttagatttctattgtgaaacaccagtcccattaaatctgaaaacactgctatagagtaacatttcgttagactggtctcactactttctgaagaatggaccatattcattctccatttaatgccattctcctccctatactgcctgagtaccacctcttccaagaagtcatctttgactactccatcctcatctccttaggcttttctctcaatggtctacatcactgactttccacatagcttagctgttcttatgtctttctcacaaataagttttcataccttcgttcttcaacataaataggggcctctcagcctgagggagacagtttagggagtaccaaaatacacgtagtatcaaaaaagcagtcccaggccactggagcttaccagttattgaatccttgcttctgcgaatccattgttttgaaggttggtgggtagttgcaaactccttgatgcatctgctgtgctgttgcatcctccctcctgtctatctcccctgcgtatgtaccactgtcgctatggtcacggtactgagcaccagggttgctaggttgcacaactttaagggggtgccattcgcaacctgcctgacacgaatggtgctccctggaattatgcattgcaacatctgcacgtgatcctgtcgaacaccagaaaattctactccagtggcaatggggaggctggtccctggcttgcttaaagaacccgcttttttattgtgtaacattatatacctttcaggacatttgacaagatatatttaagcatttgttaattttgtattattaaatatgtgtgtttataaagaaatagattatcctgaaataaagagaaaacgttggcagtgttctgtggtggcctaatggatggttattattttcttccataagctttatctcccccacaatggacaatgttatacgttactttttttttttttttttttttttttgagagtctgctctgtcgcccaggctggagtgcaattatatgatcttggctcactgcaacctctgcctcccgagttcaagtgattctcctgcctcagcctcctgagtagctgggactacaggtgtgcgccaccacacccagctaatttttgtatttttagtagagacggggtttcaccatgttggccaggctgatcttgaactcctgacctcatgatccgcccgccttggcctctcaaagtgctgagattacaggcgtgagccactgtacccggcccaatgttacttttataatcagaaaagtagatattttcgactgtgggtttcagcaccaaaaaaaaaaaagagtagatattatttaaaagaactggttgattgatagagagaaaaatgaaagtggcaaattgtatatttgtcagaatgaagtcagttagaatcccatataagatatgtaattaaagtttttatttatttgattgacgtgaatatttttcttggtaaaaagagttattctaggccaggcacagtggctcacccctgtaatcctagcactttgggaggccaaggcaggcagatcgcttgagtccaggagttccagaccagccggggnnnnnnnnnnnnnnnnnnnnnnnnnnnnnnnnnnnnnnnnnnnnnnnnnnnnnnnnnnnnnnnnnnnnnnnnnnnnnnnnnnnnnnnnnnnnnnnnnnnnnnnnnnnnnnnnnnnnnnnnnnnnnnnnnnnnnnnnnnnnnnnnnnnnnnnnnnnnnnnnnnnnnnnnnnnnnnnnnnnnnnnnnnnnnnnnnnnnnnnnnnnnnnnnnnnnnnnnnnnnnnnnnnnnnnnnnnnnnnnnnnnnnnnnnnnnnnnnnnnnnnnnnnnnnnnnnnnnnnnnnnnnnnnnnnnnnnnnnnnnnnnnnnnnnnnnnnnnnnnnnnnnnnnnnnnnnnnnnnnnnnnnnnnnnnnnnnnnnnnnnnnnnnnnnnnnnnnnnnnnnnnnnnnnnnnnnnnnnnnnnnnnnnnnnnnnnnnnnnnnnnnnnnnnnnnnnnnnnnnnnnnnnnnnnnnnnnnnnnnnnnnnnnnnnnnnnnnnnnnnnnnnnnnnnnnnnnnnnnnnnnnnnnnnnnnnnnnnnnnnnnnnnnnnnnnnnnnnnnnnnnnnnnnnnnnnnnnnnnnnnnnnnnnnnnnnnnnnnnnnnnnnnnnnnnnnnnnnnnnnnnnnnnnnnnnnnnnnnnnnnnnnnnnnnnnnnnnnnnnnnnnnnnnnnnnnnnnnnnnnnnnnnnnnnnnnnnnnnnnnnnnnnnnnnnnnnnnnnnnnnnnnnnnnnnnnnnnnnnnnnnnnnnnnnnnnnnnnnnnnnnnnnnnnnnnnnnnnnnnnnnnnnnnnnnnnnnnnnnnnnnnnnnnnnnnnnnnnnnnnnnnnnnnnnnnnnnnnnnnnnnnnnnnnnnnnnnnnnnnnnnnnnnnnnnnnnnnnnnnnnnnnnnnnnnnnnnnnnnnnnnnnnnnnnnnnnnnnnnnnnnnnnnnnnnnnnnnnnnnnnnnnnnnnnnnnnnnnnnnnnnnnnnnnnnnnnnnnnnnnnnnnnnnnnnnnnnnnnnnnnnnnnnnnnnnnnnnnnnnnnnnnnnnnnnnnnnnnnnnnnnnnnnnnnnnnnnnnnnnnnnnnnnnnnnnnnnnnnnnnnnnnnnnnnnnnnnnnnnnnnnnnnnnnnnnnnnnnnnnnnnnnnnnnnnnnnnnnnnnnnnnnnnnnnnnnnnnnnnnnnnnnnnnnnnnnnnnnnnnnnnnnnnnnnnnnnnnnnnnnnnnnnnnnnnnnnnnnnnnnnnnnnnnnnnnnnnnnnnnnnnnnnnnnnnnnnnnnnnnnnnnnnnnnnnnnnnnnnnnnnnnnnnnnnnnnnnnnnnnnnnnnnnnnnnnnnnnnnnnnnnnnnnnnnnnnnnnnnnnnnnnnnnnnnnnnnnnnnnnnnnnnnnnnnnnnnnnnnnnnnnnnnnnnnnnnnnnnnnnnnnnnnnnnnnnnnnnnnnnnnnnnnnnnnnnnnnnnnnnnnnnnnnnnnnnnnnnnnnnnnnnnnnnnnnnnnnnnnnnnnnnnnnnnnnnnnnnnnnnnnnnnnnnnnnnnnnnnnnnnnnnnnnnnnnnnnnnnnnnnnnnnnnnnnnnnnnnnnnnnnnnnnnnnnnnnnnnnnnnnnnnnnnnnnnnnnnnnnnnnnnnnnnnnnnnnnnnnnnnnnnnnnnnnnnnnnnnnnnnnnnnnnnnnnnnnnnnnnnnnnnnnnnnnnnnnnnnnnnnnnnnnnnnnnnnnnnnnnnnnnnnnnnnnnnnnnnnnnnnnnnnnnnnnnnnnnnnnnnnnnnnnnnnnnnnnnnnnnnnnnnnnnnnnnnnnnnnnnnnnnnnnnnnnnnnnnnnnnnnnnnnnnnnnnnnnnnnnnnnnnnnnnnnnnnnnnnnnnnnnnnnnnnnnnnnnnnnnnnnnnnnnnnnnnnnnnnnnnnnnnnnnnnnnnnnnnnnnnnnnnnnnnnnnnnnnnnnnnnnnnnnnnnnnnnnnnnnnnnnnnnnnnnnnnnnnnnnnnnnnnnnnnnnnnnnnnnnnnnnnnnnnnnnnnnnnnnnnnnnnnnnnnnnnnnnnnnnnnnnnnnnnnnnnnnnnnnnnnnnnnnnnnnnnnnnnnnnnnnnnnnnnnnnnnnnnnnnnnnnnnnnnnnnnnnnnnnnnnnnnnnnnnnnnnnnnnnnnnnnnnnnnnnnnnnnnnnnnnnnnnnnnnnnnnnnnnnnnnnnnnnnnnnnnnnnnnnnnnnnnnnnnnnnnnnnnnnnnnnnnnnnnnnnnnnnnnnnnnnnnnnnnnnnnnnnnnnnnnnnnnnnnnnnnnnnnnnnnnnnnnnnnnnnnnnnnnnnnnnnnnnnnnnnnnnnnnnnnnnnnnnnnnnnnnnnnnnnnnnnnnnnnnnnnnnnnnnnnnnnnnnnnnnnnnnnnnnnnnnnnnnnnnnnnnnnnnnnnnnnnnnnnnnnnnnnnnnnnnnnnnnnnnnnnnnnnnnnnnnnnnnnnnnnnnnnnnnnnnnnnnnnnnnnnnnnnnnnnnnnnnnnnnnnnnnnnnnnnnnnnnnnnnnnnnnnnnnnnnnnnnnnnnnnnnnnnnnnnnnnnnnnnnnnnnnnnnnnnnnnnnnnnnnnnnnnnnnnnnnnnnnnnnnnnnnnnnnnnnnnnnnnnnnnnnnnnnnnnnnnnnnnnnnnnnnnnnnnnnnnnnnnnnnnnnnnnnnnnnnnnnnnnnnnnnnnnnnnnnnnnnnnnnnnnnnnnnnnnnnnnnnnnnnnnnnnnnnnnnnnnnnnnnnnnnnnnnnnnnnnnnnnnnnnnnnnnnnnnnnnnnnnnnnnnnnnnnnnnnnnnnnnnnnnnnnnnnnnnnnnnnnnnnnnnnnnnnnnnnnnnnnnnnnnnnnnnnnnnnnnnnnnnnnnnnnnnnnnnnnnnnnnnnnnnnnnnnnnnnnnnnnnnnnnnnnnnnnnnnnnnnnnnnnnnnnnnnnnnnnnnnnnnnnnnnnnnnnnnnnnnnnnnnnnnnnnnnnnnnnnnnnnnnnnnnnnnnnnnnnnnnnnnnnnnnnnnnnnnnnnnnnnnnnnnnnnnnnnnnnnnnnnnnnnnnnnnnnnnnnnnnnnnnnnnnnnnnnnnnnnnnnnnnnnnnnnnnnnnnnnnnnnnnnnnnnnnnnnnnnnnnnnnnnnnnnnnnnnnnnnnnnnnnnnnnnnnnnnnnnnnnnnnnnnnnnnnnnnnnnnnnnnnnnnnnnnnnnnnnnnnnnnnnnnnnnnnnnnnnnnnnnnnnnnnnnnnnnnnnnnnnnnnnnnnnnnnnnnnnnnnnnnnnnnnnnnnnnnnnnnnnnnnnnnnnnnnnnnnnnnnnnnnnnnnnnnnnnnnnnnnnnnnnnnnnnnnnnnnnnnnnnnnnnnnnnnnnnnnnnnnnnnnnnnnnnnnnnnnnnnnnnnnnnnnnnnnnnnnnnnnnnnnnnnnnnnnnnnnnnnnnnnnnnnnnnnnnnnnnnnnnnnnnnnnnnnnnnnnnnnnnnnnnnnnnnnnnnnnnnnnnnnnnnnnnnnnnnnnnnnnnnnnnnnnnnnnnnnnnnnnnnnnnnnnnnnnnnnnnnnnnnnnnnnnnnnnnnnnnnnnnnnnnnnnnnnnnnnnnnnnnnnnnnnnnnnnnnnnnnnnnnnnnnnnnnnnnnnnnnnnnnnnnnnnnnnnnnnnnnnnnnnnnnnnnnnnnnnnnnnnnnnnnnnnnnnnnnnnnnnnnnnnnnnnnnnnnnnnnnnnnnnnnnnnnnnnnnnnnnnnnnnnnnnnnnnnnnnnnnnnnnnnnnnnnnnnnnnnnnnnnnnnnnnnnnnnnnnnnnnnnnnnnnnnnnnnnnnnnnnnnnnnnnnnnnnnnnnnnnnnnnnnnnnnnnnnnnnnnnnnnnnnnnnnnnnnnnnnnnnnnnnnnnnnnnnnnnnnnnnnnnnnnnnnnnnnnnnnnnnnnnnnnnnnnnnnnnnnnnnnnnnnnnnnnnnnnnnnnnnnnnnnnnnnnnnnnnnnnnnnnnnnnnnnnnnnnnnnnnnnnnnnnnnnnnnnnnnnnnnnnnnnnnnnnnnnnnnnnnnnnnnnnnnnnnnnnnnnnnnnnnnnnnnnnnnnnnnnnnnnnnnnnnnnnnnnnnnnnnnnnnnnnnnnnnnnnnnnnnnnnnnnnnnnnnnnnnnnnnnnnnnnnnnnnnnnnnnnnnnnnnnnnnnnnnnnnnnnnnnnnnnnnnnnnnnnnnnnnnnnnnnnnnnnnnnnnnnnnnnnnnnnnnnnnnnnnnnnnnnnnnnnnnnnnnnnnnnnnnnnnnnnnnnnnnnnnnnnnnnnnnnnnnnnnnnnnnnnnnnnnnnnnnnnnnnnnnnnnnnnnnnnnnnnnnnnnnnnnnnnnnnnnnnnnnnnnnnnnnnnnnnnnnnnnnnnnnnnnnnnnnnnnnnnnnnnnnnnnnnnnnnnnnnnnnnnnnnnnnnnnnnnnnnnnnnnnnnnnnnnnnnnnnnnnnnnnnnnnnnnnnnnnnnnnnnnnnnnnnnnnnnnnnnnnnnnnnnnnnnnnnnnnnnnnnnnnnnnnnnnnnnnnnnnnnnnnnnnnnnnnnnnnnnnnnnnnnnnnnnnnnnnnnnnnnnnnnnnnnnnnnnnnnnnnnnnnnnnnnnnnnnnnnnnnnnnnnnnnnnnnnnnnnnnnnnnnnnnnnnnnnnnnnnnnnnnnnnnnnnnnnnnnnnnnnnnnnnnnnnnnnnnnnnnnnnnnnnnnnnnnnnnnnnnnnnnnnnnnnnnnnnnnnnnnnnnnnnnnnnnnnnnnnnnnnnnnnnnnnnnnnnnnnnnnnnnnnnnnnnnnnnnnnnnnnnnnnnnnnnnnnnnnnnnnnnnnnnnnnnnnnnnnnnnnnnnnnnnnnnnnnnnnnnnnnnnnnnnnnnnnnnnnnnnnnnnnnnnnnnnnnnnnnnnnnnnnnnnnnnnnnnnnnnnnnnnnnnnnnnnnnnnnnnnnnnnnnnnnnnnnnnnnnnnnnnnnnnnnnnnnnnnnnnnnnnnnnnnnnnnnnnnnnnnnnnnnnnnnnnnnnnnnnnnnnnnnnnnnnnnnnnnnnnnnnnnnnnnnnnnnnnnnnnnnnnnnnnnnnnnnnnnnnnnnnnnnnnnnnnnnnnnnnnnnnnnnnnnnnnnnnnnnnnnnnnnnnnnnnnnnnnnnnnnnnnnnnnnnnnnnnnnnnnnnnnnnnnnnnnnnnnnnnnnnnnnnnnnnnnnnnnnnnnnnnnnnnnnnnnnnnnnnnnnnnnnnnnnnnnnnnnnnnnnnnnnnnnnnnnnnnnnnnnnnnnnnnnnnnnnnnnnnnnnnnnnnnnnnnnnnnnnnnnnnnnnnnnnnnnnnnnnnnnnnnnnnnnnnnnnnnnnnnnnnnnnnnnnnnnnnnnnnnnnnnnnnnnnnnnnnnnnnnnnnnnnnnnnnnnnnnnnnnnnnnnnnnnnnnnnnnnnnnnnnnnnnnnnnnnnnnnnnnnnnnnnnnnnnnnnnnnnnnnnnnnnnnnnnnnnnnnnnnnnnnnnnnnnnnnnnnnnnnnnnnnnnnnnnnnnnnnnnnnnnnnnnnnnnnnnnnnnnnnnnnnnnnnnnnnnnnnnnnnnnnnnnnnnnnnnnnnnnnnnnnnnnnnnnnnnnnnnnnnnnnnnnnnnnnnnnnnnnnnnnnnnnnnnnnnnnnnnnnnnnnnnnnnnnnnnnnnnnnnnnnnnnnnnnnnnnnnnnnnnnnnccaggcgtggtggcgggtgcctgtagtcccagctacttgggaggctgaggcaggagaatcgcttgaacccgggaggtggaggttgcagtgagctgagagcacgccactgcactccagcctgggcgacagatccagacaccgtctcaaaaaagaaaaaaaaaaagaaaaaggttatagagcatctcgtccagggcatctttttttttttttaataataataacttaaaacagagcatgatttttaaagctaaaatattagattgtaagagaaattttacaattgcagaaagttcctagaggacatgtgtttactgtcctttgcttgtaggtctgctttatataaagttgaagaaacgtttattgccttatgatagtgaaattatgcataacttaattatctcctcaaccagactatgagctctgtgaggcaaggattgtgcctcatttgcctctgaattcacaataaagtacttagttacttagcatgaggccttgctcaaagtaaaggctcaatgaatgtggaactaaactcaactctgtcttcctcccagtgcttctgatgaatatagtatttccacaaaggaaaggacttcacatcaagtgcctagtggagagaggtattttggggagatgtattttacctatctaaaccttggcttccttacctggtagagttgtgaagttcaatgagaaaagatacataaagtgccaagcactgtgcataagcatagaaggtgcatgcacacacacacgcaaacaataagaaaacttgtttcctttcctctaaagtcacattctggttattaacctacaaactatgacattatcctggtcatttaaatcattccaagcaactaaaaaaggacctggtatctatggctcaggtctgagccactgcctggggcttctgcaacaccccatctttcctcctaaactcgcaacctcatattaccataccattcaacagcttgcttactctttgggttaccttcccattaaacctgggcttatagggataattcaactagaaagtggagagaggtaaccgcttcttaggaggagggagctgcagagccatttccagccttgcctcactcagtaatctgatttcccctcccaattccagggcatgtcttggccctggttccaggaacagtcctggacaaatgttgccaattcctaacatagagcatgaaccagggaatcaggatcccaaaatggctgtgtcttttattctattggcctgagtctagagtagctttaccaagaaactaatgcagcttaaacttcaaggctcctccctcacttccaaagacccccatgggtgctaagagttgctggaatattctaggttgagagggaaagctagtttgcaatcagggaacttttttttttttttttgagatgacgtttcactcttgttgcccatgctgaactgcaatggtgcaatctcaccttactgcaacctctgcctcctgggtccaagcgattctcctgcctcagcctcccaagtagctgggattacaggcatgcaccaccacacctggctaatttttgtattcttagtagagatggggtttcaccatgttggccaggatggtctcgaactcctgacctcaggtgatccacccacctcagcctcccaaagtgctgggattacaggtgtgagccaccacgcccagcccagggaacactgttatgtaagcttttctgataacttgcctaagtaggctttagaagaaagtgacctagagttctgggactccactcatttgttgtgattttgtcctcattctaaatgaatactccatttggtgtttgcagctactgtaacccctttttttcttttctgtctttcttttttctcttttttttttgagacagagtctcactctgtcgcttaggctggagtgtagtggtgcaacctcagctcactgcaacctccgcctcccaggttcgggcaattctcctgcctcagcctcccgagtagctgcaattacaggcgcgtgccaccacgcctggctaatttttgtatttttagtagagacggggtttcaccatgttggtcaggctggtctcgaactcctgacttcatgatccacccaccttggcctcccaaagtgctgggattacaggcgtgagccgccggcgtcctgccagctttttttttttttttttttttaacaaggtctcactctgtcacccaggctagagtgcagtggtgtgatcacagctcactgcagcttccatctcctgggctcaagcgatcctcccaccctggcctgcagaatagctgggaccacagtcgcatgctgccacgcccagctaattttaaattctttttttcttttcttttcctttttttttttttttttttttgaggtggagtctcattctgtcacccaggttggactgtagtagcacgatcttggctcactgcaacctccacctcccaggttcaagcagttctcctatctcagcctcctgagtagctgagattacaggcacacaccactacacttagctaatttttgtatttttcatagagacagggtttcaccatattggtcaggctggtcttgggctcctgacctcaggtgatccacccacctcagcctcccaaatatattctttttcttaaagatggccccacaaaacactggattccaggctgagtcaggcccttctccaatctgtatctacttttctacaatgcttccctctcctgcagctcaccagaaagtcacaagtaggatgagaggggctccgcagggatgtggaggtgaccacatgcaagatagaattgccatcaccactggcattccttctaccccaggcacacattggatgccttgcagtgatccttcttccacaaatgctgggattctcctgcattcccagtgcttctatttgaaatagttttcaggataccctgaattcaggataatacccatcctgaattcagcattggacattgtattagttgagattcttttggttgcaagtgacagcaaccgaatttaaacaagcagaaggaaaaaggcgagaactagactttgaaccagagttagataaagggaataactgatttgcaaatggaaaggtattctgtaagaatttacttaataaaatatttggggttttgaatagaatttgtttgtgaaaaacagcactttgttctcagctaagcaataacaattatggcattctttggttatttcaattatgttttttttttttttttgagatggagttttgctcttgttgcccaggctggagtgcaatggtgcaatctcagctcaccacaacctccgcctcccaggttcaagtgattctcctgcctcagcctcccaagtagctgggattacaggcatgcgccaccacgcccggctaattttgtattttagtagagatggggtttcactatgttggccaggctaatctcgaactcccgacctcaggtgatccaccctcctcggcctcccaaagggctggggttacaggcatgagccaccgagcccgacccaaatggttatttctatgtaaacagacagtttttaaataatgtgaaaatacaggagtgttttggaaataccgaggtgggaacaccggcccgctgtggccaggacgatggcacatcatgagaaggtagcacttgcggttgagaagtgaggctggagagacacagcggcctggcatatgggacttgtaaatgcaggttagtttgggctctgttgagggataatgagaagacatttataagttgtgcaggtccattagatggtcagatttatttttggagagatcctgaatgggaacggattcgggggtggatacggagcaaaatggagacaaggagatcagttaggaagctgctgagatgatgcagaggagagatgttttttaaaggcaggagtcctgaggatgagaggagaaaacaaattcaagacaggttcaggaagtacatgggcagcctgtggtggttatttgttgtcagagcaatatgggagaagacactaggatgatcccagatatttagtttcaatgaccgggtggtgcctacaattcactgaaagaaagaatacaagaggagaagcaggttggctaggaggatggagaactaagtcagtggcagccctggaattcctctatggaagagattcagtcagaaggcatgtggtatttgtcttgaaattatagttacaattataagcattctgcatttatttagcatgcatgttcagaaatgatagcatggatggcggattatttgaaggccttctcaatagaagtttaatcaccttgtttaagcagacaaggatatatgaataacataaatgttttgcattcaaagggaatttaccagccaaataataaactgaagacctcgtctcgcattatattttctaaaggtttgcttagctacttggtggtcaaatatttcagtttatttctgttctactccaaatgacttcatttctagaaaagttgctatatttccttttatatcatttgttttcaaataagtttagggtaaaatcctctcatagcaattttttttttctttttaataatgaagacccttctgagggtactatgtttaacaaaatcaaactcattctttttcgaggtaatctgtttctaggaattactgaaaggtaaaaggaagttttccataacatgtatgatttttagcacctgaatcagaccttgaaagagctgtgcaattacaaatagaaaacacatcttattgttttaatacttcttgaagctatagcatggatgacagaatgtcacatcctgaatttggcattggatgttgtattagttgagattcttttggttgcaagtgacagaaacccaatttaaacgaggtcaagaataaagggaaggccaggtgcggtggctcatgcctgtaatcccagcactttgggaagctgaggtgggtggatcacttgaggtcaggagttcgagattagcctggccaacatggtgaaaccccatctctactaaaaatacaaaaataagccaggtgtggtggtgcatggctgtaatcccagctacttgggaggctgaggcaggagtattgcttgaacccaggaggtggaggttgcattgagccaagatggcgccactgtactccagcctgggtgacagagtgagactctgtctcaaaaaaaaaaaaaaaaaaaaaaaaaaaaagaataaaggggaaattgagcaaaaggaaaagataagtgtggagccttgggaatgacaagatccagaagccatcacactggcagaacactccgtctctctcatttcaactctttgctttccagtgcctgttggcttctttctctcctagagtaaacagactttcttcacacaagagggaacagagggcctgttggactcattcttccagctcagccaccagtaagagaagagaatctctctccaagatctggttttagcagtctcagggaagaagaattctgattgttctggcttggttcacaaacccacttcttgaaccaatcatgcacctaaaggggcagggtctgtatcagaagaaaggatagacgcacatacagatggccaaccatccagcccgtgaagtaggtgggcttgggtggctgtgggacatccacgtgaagcagtgaggcaaaatctggacacatgagcctgaggctcagaggacagcactgaactgaagacattctgtccgatggctcagaaagtcactgattgccttgacaaaattaatggcaggatttattccacaagctcagtagatagattaacacatgatctttattcttagataacccttcatatgtgtgttaatagaggcttaactaggatcagacagtgaagttcatagttataaaataaattgtttttacaagaaagcaggccaggcgcagtggctcatgcctataatcccagcactttggtaggccgaggcgggcagatcacttgaggtcaggagtttgagaccagcctggccaacatggcgaaacactgtcttttctaaaaatacaaaaattagctgggcatggtggtgcacacctgtaattccagatactcaggaggctgaggcactagaatcacttgaacccggaaggcggaggttgcagtgatctgagattgcaccactgcactctagcctgggtgacagagtaagactctgtttcaaaaaaaatttttttaataaaataaataaaaataaataacttttttttgaaaaaaagaatgttggccgggtgcagtggcttactcctgtaatcccagcactctgggaggccaaggcaggtagatttcttgaggtcaggagttgagaccagcgtggccaacatggcgaaacctgtctctactaaaaatacaaaaattagctggatgtggtggcaggcacctgtagttccagctactcaggaggttgaggcaggagaatcgcttgaatgtgggaggtggaggttgcagtgagccaagattgcaccactgcactccagcctggaagacagagtgagactttgtctcaaaaaaaaaagtcaaaaaaaaaaaaagtaaactccacaagagcagaagtttttgtctgctgtactcactgttgtgttgtcagtgtccagagcagtgcctgttcatgtcactagtaggtgctcaataaatatttgttgaaagaatgaatgagcaaataagcaaacaatatttattctgtccacaaatccttaggggggcagaaattatgtacaagttaattataccaaattctaatttttggttcatatttctgggctattagtattttgtgtgtgtgtgtgtgtgtgtgtgtgtgtgtgtgtgagtgtaggagccttttcttctccatcatctatttttaaaattgttatagctttaagaagtactaaaatgatgagatgtgatttctgtttgtaattgcacagctctttcgaagtctgattcaggtgctgaaaatcaaatatggtatgtacaacttccctttactcttcagtaatttctagaaacagaataccttgaaaaagaatgagtttgattttgttaaacatagtaccctcagaagggtcttcattattaaaaagaaaaaaaaattctatgagaggtctttactctgaacttatttgaaaacaaatgatgtaagaggaaatatggcaacttttctagaaatgaagccatttagagcagaatagaaataaattaattggaaatattttaccgccaagtagctaagttaacaaacctttatggaaatataatgcgagatgaggtctttggtttattatttgcctggtaattccctttgtatgcagaacattcgtgttattcacatatccttgtctgtttaaacatggtgattacactgctattgagcatcagggcaagcaagttgtgtttattcccacagaatgttttgttttgtctccaacttttatttgtggccatatagaagtaagctacttctgatgtgacatgaaaaattttacacagaaaaatctgtatttgcacatcctttggggggctttatttttgctaaaaagtagaattcacacaggcaaaaaaaaaaacacatgcaaaatatttttgtgcacacctttaacaggctacattccacttctgaaatgtttccaaaaacaaaacaaaaaatcccaaagccagaatactgagttaaaaagttaacacattataaaagctaggttcctaacacaaacactgcagatataagctgcagatataagtcactccattgcaaaaagttgtgattataatttttttttttttttttttgnnnnnnnnnnnnnnnnnnnnnnnnnnnnnnnnnnnnnnnnnnnnnnnnnnnnnnnnnnnnnnnnnnnnnnnnnnnnnnnnnnnnnnnnnnnnnnnnnnnnnnnnnnnnnnnnnnnnnnnnnnnnnnnnnnnnnnnnnnnnnnnnnnnnnnnnnnnnnnnnnnnnnnnnnnnnnnnnnnnnnnnnnnnnnnnnnnnnnnnnnnnnnnnnnnnnnnnnnnnnnnnnnnnnnnnnnnnnnnnnnnnnnnnnnnnnnnnnnnnnnnnnnnnnnnnnnnnnnnnnnnnnnnnnnnnnnnnnnnnnnnnnnnnnnnnnnnnnnnnnnnnnnnnnnnnnnnnnnnnnnnnnnnnnnnnnnnnnnnnnnnnnnnnnnnnnnnnnnnnnnnnnnnnnnnnnnnnnnnnnnnnnnnnnnnnnnnnnnnnnnnnnnnnnnnnnnnnnnnnnnnnnnnnnnnnnnnnnnnnnnnnnnnnnnnnnnnnnnnnnnnnnnnnnnnnnnnnnnnnnnnnnnnnnnnnnnnnnnnnnnnnnnnnnnnnnnnnnnnnnnnnnnnnnnnnnnnnnnnnnnnnnnnnnnnnnnnnnnnnnnnnnnnnnnnnnnnnnnnnnnnnnnnnnnnnnnnnnnnnnnnnnnnnnnnnnnnnnnnnnnnnnnnnnnnnnnnnnnnnnnnnnnnnnnnnnnnnnnnnnnnnnnnnnnnnnnnnnnnnntttgtctttttggcaaataggagtccctcagaatctacacttgctctgaaatgtagaaaaattgattcaataaaggacggtggtgaaaccgtcctttgagatattttacttttcttcttaaagagcatacactttttaatgatcgtgtgtgtgtgtgtgtgtgtgtgtgtgtgtgtgtgtgtgtgtgtgtgtaaaccctttaaaaagagattttggaaactgaattctgggaacgttttttttttttttccttcctcaagaccagcccctgataattgaatagatagtttttggagaaaatgacttagagcctgtcagtacagtcagcaacctccttgtccctgcatatttgaactttccaaaaataacagaatgctccaaggtacttgtctgcagctcctgacaaatctccaggcagtcccagcagattttactctgcctgctgctttgtattcaccttctcacagatccaaaggtaggaagggccctgtggcaggagcacatccatgtcccttcctgatgctccctgggggagactggtggcttcgtgcttggaaaaaataggggcttcctgcagctagggacatagctagctgcttccttctccctcatggagaagagacaggtaagatggcagtcccctggaagtctcagtccttagaagaaaagagttctaatacattcccataaaacatttcaaacatgcaaagagaaaaatccaaaacaggagtgaggacagaatagagtgagttggaagagagcctaaatatcgtgctcaagtgagaaacatccacgcaagtgcctgcttcaatgccatgttttcaatgagcatattaacagggcttcctaaaaagggaagcgactacactgtttccaaccacagaatctaagctgccttctttatcaccaaacagctttaagatgcttacctaactcaaactatcactagtataaagtagtttgaaggcccctctacttcaataaatacttaaataatagctagatcaactcagctcatacattttcaaaatattggccaaaacagcaaatgcatatatatcagtgcatctgtcccttccagcagttaacacaattgtacaaactcagtgtgctgcatttaaaggaacatttgaaaaggatgatgcagacctgaaggtgggaggtcctgcctcctcgtgtgttcttactgagggtggcagaaagtaagtttcctcttccccacccagagtttgggcatgtgagcctattctgccatcctgtttcagacactgtctctctgtctctcttcttttccacaggccaccaagcctatttgagatggagggtactgggggagacgtcataagtgagcagtcacaagttggggtgaaattcatgcacacgactggacactcatgctaacgaacccttaaagctaaacaaaggccaaagacaacccaaagcctttaaaaaaatctctcacacaccacagagcaaaactggaaaaacccaactctactttcccatcacaattcaaaaaggagctaagccttctggggatgttggatgtttcagactgagagagggtggctgacagggccatcttttctcagctgtctgcaacctgagccagagcccttcctggagccctggcaattgcccagtggctcccagaagacatctctttggacgtccgggctcccaagaaggttttaagtttgttcaaggtctgaagtctgatgcgcagaggtagctccatgacgctagtaatggaataacacttccttttttggtgaggaaagcccaatgggtcttagctaacaagctctcagctatgactctaaaaataccctgcagcgagtgctgtttggcacttcaatttgtttgccaggggagcgcttaagaactccgcagaatgcttcagattctccacagctgctctaagctctgtcctcctctggtgaccaaagcaagtgtatcgctttgggaaagctgcttgttgcttttcacttttgagttcttggaattctgctctaaatgtctgaagtacaattccagtcttggattaataactagcttggttttgagtcttcatttggctcctagtctgaactatgcaaatgcacgatctgtgtacagaagaaaaaacctaaaattatacttccaaagggctcagtcgcttcctctctctccccattcccctcagaagaaacatcagcctcccgaatcctttgttgccagcagcaggagcagctccgggcctcgtcagcacaggcggccttggccgcctacaagttgatggtgtgtgcgtgcttcttgcacaggggtctgtccttcttggagtagaacggctgcccctccagattcacatggcagacctggagcagagaacagacctgcgtgagacccacgtggcacagggcatgagcagatttcaatcacttttttaagaaaacgccctggccaggcgtggtggctcagtcctgtaatcccagcactttggaaggccaaggcaggcagatcacttgaggtcaggagtccaagaccagcctggccaacatggcgaaactccatctctactaaaaatacaaaaattagccaggggcatgttggcatgtgcctgtaatcccagctactcgggaggttgaggcagaagaatttcttgaacccgggagacagaggttgcagtgagctgtgattgtgccactgcactccagcctgggcaacatagcaagactgtctaaagcaaacaaacaaacaaacaaacagccttgccccatgcattccagagaaaaggcaacagcctatttctcccactatgaattcttaatgacggaagcagagtacatgagttggactatataaaaactaagattcctgaagaacagaataaaatcaaatgaaattaattaaatttaatggaatagagaaaatatacactatgaagctgaccaattcatgctatctaaaatagcatgaatagagtcaatacaagttcacaagtcaatataccacagagaggattcacgtctaaagaaaatcattagtaaactaacaaacacatcagagaagattgtactcactaataattaaagaaaaagcaaattaaaactcccctgactccaggcgcagtagctgatgcctgtaatccctacactttggaaggccaaggcaggaggatcgtttgaggccaggtgtttgagaccagcctgggcaacatagtgagcctctgtctctaccaaaaaaaaaaaaaaagaaaaagaaagaaagaaaagaaaattagttaaaaaaattacaagaaaaactgccctgagataccactagacacatattaatctagcaagacaaataaaacaaaaaaacctcaatggcctgtcacctttaacctaatatgcctgtagccaaaaagcttaaaaaaaaaaaaagtattcaatcaaaaatcagcaatgccaaaaaggaacaaggcctactcgtgcactgctagagacatgtgagtgagctcagtgttccatagggaatctggccatgttgaacaagaaccattgagatgtgactaccctgtaacccagtaatgccacgctagagaattttatcctgcagaagcaactctgcagaacaacaaaacaacctgtgctcaactagaaactgaaaactagtaaaatttctctcaataggaagatgattcagtaaattttcatggtgtatttttccaatggaatgccaccatttaaaaagagagatgggccaggcatggtggctcacgcctgcaatcccagcattttggaatcttcaccacgggtgcaagtaacgctccgccgagcccnnnnnnnnnnnnnnnnnnnnnnnnnnnnnnnnnnnnnnnnnnnnnnnnnnnnnnnnnnnnnnnnnnnnnnnnnnnnnnnnnnnnnnnnnnnnnnnnnnnnnnnnnnnnnnnnnnnnnnnnnnnnnnnnnnnnnnnnnnnnnnnnnnnnnnnnnnnnnnnnnnnnnnnnnnnnnnnnnnnnnnnnnnnnnnnnnnnnnnnnnnnnnnnnnnnnnnnnnnnnnnnnnnnnnnnnnnnnnctgtcacccaggctggagtgcagtggcgcgatctcagctcactgcaacctctgcctcccgggttcaagcaattctcctgcctcagcctccctagtagctgggattacaggcgcccaccaccatactcagctaattttttttgtagtttagtagagacagggtttcaccatgttggccaggctggtttcaaactcctgaccccaagcaatccacctgctttggcctcccaaagtgctgggattacaggcgtgagccaccacgcccagcccaagagatgaaattctatatccccatgatgacaacatatagtctgaggctggaggcatcccagaaagaagagaactaattaatatttgtggggactaccatggaccaagcaggatgccagacactctatatacagcagctcatttaattctcatgaaaaccttataaggtaggtaagcctttctcccacttcacagctgaaaaaactggggctcagagggcccatacgtcttccttaagtcacagacctagtaagttgtaggctgggaatctctgtccatgtctgtaagactccagttctatgctaatttttcccctaccccatagaagaaagggactgtgtttacttgaaattgatctgggttcatgggtttgtacagatgtagccctctgagtttgctggactactagtatgtaagctgggccctgggttggcaatatgccagtaggtcagagtctgccaggaaatcacattggctggcatgggtcccagcttaggagagggcagtgaagatccctgctggggggcagaattgggagccatctccaggacactgacatcaagaggagtgcacgtggagtccccacatacaggtatcccccatggagacagagaaatcacccccttgagttgagcttggggcaatatgcatgtattcagtccaagagagttggagaggaaaagggcaccacgctagccccatgtgcaaggctctgatggtccagttggggacgttatacctaggatcacacagggcttccaattgggttctgggagccaatgagctgcaaaagtgtttgaaaacatcccaggtggatgcagtgatgctgagtataaccaggctcgtgtggaggcctcaagctgctggtgacaatttaaagactatgcaaaaagatggacatccaagatctaactggtgagaatgggctttagggaagacagaaaggcatctctggaatgagtcagcctgtcaatgactgcagctgtgggtgggagaccatacctggactgggacaatgctggttgcttgtgagaactttgggatgagtcaggctggggagagaaggtgtccagggactgaagaccaacaaatgagaaagggacagaacctcaaagatggctcataggtgagatggggctgagggtgggaaccctcataaggagttgtgcccagtgtcttcttggtgcaaggtggcttcatagtggaggaggccttctgcccacccagcacagggggcaacagggatggtccaacccccaggctctgtggctgggtgacatcagggcctggctataaaagggtagcgaccatggacagtgctgactgcaagtcccagcagagttagggtaataaactaggccagctgcagcagcccctaggtctgcctacaaaagttatattactgcccatcccctcctgatacccacaccagtggggaagggcaagacttagagcaaaagagggatgggtaagacatttttcctccactaaggtcggaccctttccattggaactcaagtgtcgacgccagacagaagcttaactttcaccctgacccacagtgcacttctcaggctcccagccttcactttatatgctttggacttgagggatactgtcctgttctacttttgaattgctcacatctgttgctttgttcacctttcaagattctagattccgtcagggtagagacttgttctggaacactcttgtactgcccaaatgccaggaatatttggtaaactgagttagtctaaagaatgtgctatcctgagatctcactggttagaaaacagcacatcagctgggagagctaccccagatctttctcttactaattttttggaagttacaggaaaatacatgctcatcaaaagtgatttggaaatatgaagtgatagaaagaggaccaaaaaaaaaaaaatccctcaagtccctcaaagttttccaatcaaaagatttcttcctaatgttaagaccatgttccggctgggtgtggtggctcacacctgtaatcccagcactttgggaggccgaggtgggtggctcatgaggtcaggagttcaagaccagcctggccaagatggtgaaaccccgtctctactaaaaatacaaaaattagccaggtgtggtggcaggcgcctataatcccagctactcaggagcctgaggcagagaattgcttgaacctgggaggtggaggttgcagtgagccaagatcgcaccactgcactccagcctggcgacagagcaagactttgtctcaaaaaaaaaaaaaaacaaaagaaccatgttccactttgctatatgttgacagagcagtgagtatcatgcaggctggtttggagggagacctaacgatctccatgttgatcctctaaagggcagtgctatgggcctctcacaggctggacttcactctctggaacttatttgtaatatcagccttagccaccccaagctttacgccttcttctggtctctctcttggacttttgctgttgtgactcagctgaaattgcgaggcttgcagaagcagacccacactcacctttgccacgattccctctgcatgtgacacagacctctcatcagcctgcccatggaaaacaggccttctgtgccactgtcttcctggaccttccccaagtctcttggatccttccagaagttgggtaaccagatgtgcaggcagtgcctcaggactagacaagccatggcttgaatgtaaggttcagagacccctgtgctgtgcctgacacaggggagctatgactctgcaggggacaaacccaaagccagtatacttacaccattgtctctttttggaggggatgtatttaaaacaccctaaaagacaactagagaatctgttcaaagagctagaaaatcagagtgttaaggggttgaattgtattccacaaaattcacgtgcaagaaggcagagtttgccgtgagctgtgatcacgccattgcaccccagcctgggcaacaagagggaaactccatctcaaaaaaaaaataaaaaaaaaaaggagacccacacagagacagacacactcagaggagaatgtcatgtgaagacacacacagaggggagacaggcttgtgacaatggaggcagggattggagttacacagctgcaagccaagaaatgccaaggattgctagcaaccgctagtagctcggagagagactatggcctcctgtcagcaccttgatttaggacttctggcctcctgaactgtgaaagcattcatttctgttgtttgagccatcagtttgcagtaatttgtcaagacagccctagcaaaccgacacacagagtgaatacagtgtgtcccacagatggcggggtatggaagcgaagtgtggaaccaaaagtatatggccgtaaactttatgactagggtcatcctatgtcagaagtctataaaaattattcaagtaaaaactgtacagatatttcatacatttccaaaatttaccttgagacactctggttaaaaaaaaaatagtagaggtgtcttaattttcccaaatcagccaggcgtggtggctcacgcctgtattcccacaacttggggaggccaaggtgggtgaatcacctgaggtcaggagtttgagaccagtctggccaacatggtgaaatcccctctctactaaaaatacacaaaattagccaggcatggtggcatgtgcctgtagtcccagctactcaggaggctaaagcagaagaatcgcttgaacccaggaggcagaggttgcaatgaaccgagatcatgccactgtactccagcctgggcaacaagagcagaaactctatctcaaaaaaaaaaaaaaaaaaattctcaaatcgagattaggcaatgacagattgacattagggggctttctcagggatgactgtttcctacctctccttcagagtctaaatgtctgtaggctcaccatcatgtgcccaccccaacccaaaaccctcagaaggaaaatgccagtctcatactaaaagtgacccggctgttcagcagaaataagtagcacacagttaatagttaatccagggcttatctcctggcagctatatatcaggaaaggaccacttaggaaaataaaatggtactcagtcttgctttccaaaggtgctaccaagagaaaccctatctcagcttttcataggattagtcagctccaatctagtgtttggggtaacaatttggaggggaaaaccttcaagtcactccatcatatctgaagtgacatataaccatgggaagccaactgcccctctcaaagccaagcatcatctgctgcttttgcccgctgacaacactgctggtgagacaagccgctggtttgccaaaccctgggacactctgttgtccttaacgaaatggaaagtaacaaagccacattggtttataaataattattaggaatgaaactttgttcgactgtgatgtatcgaggcatcatggtgtttgccagcttttaaaaatgatcaggatgtcagaaagctgcgtggcaaggtatgtagaggttggtcatctggctcccacttcctccctcctgcctcttctcagaaagccagagccccaagctagagacatactgcgcaaatgaagcaggtgtcgtgccaagtgtggcccagggcttcgataaacttgtcgccagcctccacggggaaatcgcagccatggcacttggtgctgaacagattgatgtagtctgaaatgaaaagcagagtgaagaccccgcacccagtgggggcagcggggacccaaagccaagacaaaccccaaatcagtgggcagaagcagggggtgaaatctaattggttgtttgtcatctcacagatgaaatactcagttacatgactgatagttttccattttccaatcattgcattgatgttgttcagacccaggcttagacaccatcttgtgctggtttgatttgcaaacactttctggaattgtcatcaaccttctgcagggagattgtctcctctgcttctgtcacctctaatagaccaaacggatcaagccccaaagagaaaacaatccacatttccaaacatctatgcttagtttggaagaatgtgggtccaacgtatttaagagttatagaattttctttgcttggccattcttctgtcatggggcatttgtgttgacaacaagtttttactactataaacagtatttgaactactttattggggcatgtcctcctcctccttccctacccccaaccaaggagataatgctattaaatattattgatatgatgctttgcaatttaccaagcattttcacatggatggtgttatttacaagtatgtcaatgtcagggactacatcttagctttctttgcactcccagcacaatgcctgacacacagtcaatatccaaaacatatatagggaatgaatgcattaaccaatcaatcagttcatcaatgaatgaaactgatcatcacaaaatccctcagaaattgaactattattatctttttgttttgttttgtggatgagaaaattgagactcaaagaggtgaagggcccagccagcatcccacagctgaagcacagtgggtcaggttctgtgctccttcaccagggcagctgtcctctctaggcccaaaggggctacagttctaccacactgactgtagaacatctctagattattctagaaaagctccatcccgtttacaaagccttcatccctcctgagaagtgtacgcattcctccataactcttccacagttggctttttcttaagtgatttcctgttcttcttgtggatagtatgtccattcattgtcttagaccacgtcttactgagtgccagtgtgccatgggggttacaaaattggactctgaataaaggaagagctgggttcaaatcccaactctattaagaaatgttcaaacctggggcaagtggcgtaacttctcaaggcctcaaccttctcatctatataatgggaataattattgtaccgaactcatggggttttgagtggattaaataagataatgtaagtgaagtatttggcacaaacactcaaaaatgttggctcttattttgaaagtcttcataactgatgcaaagagggaaaggaacaatgatttgagtgccattatgcctcctgtttaatcctcatgacatctctgtgaagagataatattccctatttatttatctatttattttatttatttatttatttattttttatttttatttttttttgcgacggagtctcactctgtcaccaggatggagtgcagtggcatgatgtcggctcactgcaacctccgcctcctgggttcaagcaattctcctgcctcagcctcccaagtagctgggagggcaggcacgcgccaccacacccagctatatttttttatttttagtagagatggggcttcaccatgttggccaggatggtctcgatctcttgaccctgtgatccacctgcctctgcctcccaaagttctgggattacaggcgtgagccaccgcgcccagcctatttattttttgaggtggactctcactctgtcacccaggtggagtgcagtggcacaatctcagctcactgcaacctctgcctcccagggttcaagcagttctcccacctcagcctcccaagtagctgggattgcaggcatgtgccaccacgcctggctaatttttgtattttcagtagagacggggtttcaccattttggccaggctggtcttgaactcctgacctcaagtgatccacctgcctcggcctcccaaagtgctgggattacaggcatgagccaccgcgcccagcctagtattccaattttaaaggggaggaaactgactggagaggttccatcacagaagtcataaggagtagccccagtcctgatggactccaatgttcatcctccttctatggctttacgctgtctccagctccttatcagcatggcattgagctttgatcagttacacttatctcttgcatgtgttttccaatatatagcttccccttttgtgcttaattgtagcttgtcatgcaaatgctcttatgtatcccagtccatcaatcttctctgatggaacacttaatttctttagtaggcagaaatgcattgccttgccagagctaagaaaacatcgttctgcttcctttagaaagttaccgcccaggttgcagttcactctgtgctctgcaagaacttactactatctggtatgggctgacccgtctccacctgaggacaagccctgcacccacttacgacttctttctcatcactcccaggtggtctcatggtgccctggactttctcttacacctccatgcctctgtgcaaaccaggccctgggcttgaaaaaccatccccactttctgtacctgagagaatctctgcaatcctttgtgctaggctgtccttcagggaagtcttcatgccctacataccccaaccaagagtgatgagatggccttgctgaaggctttccctggccttccctcctccatttatccatgcatcctatccattcatccatcatctccttttttttttttttttttttttttttagattggagtcttgctctgtcacacaggatggagtgcaatgatgtggtcacagttcactgcaacctcaacttcctgggctcaaaccatcctcccacctcaggctcctgagcagctgggaccacaggtgtgcaccaccacggtcggctactttaacttttttttgttttagcagcatggggtctccctatattgtccaagctgttcttgtaactcctgggctccaaggggtcctcctgccttggcctcctaaagtgctatgattatcaggcgtgagccaccaagctgggctgtgttccatactcttacaataaactataaaaattaaattaaatggttcaaacaacctaatgtaaatagtgcattgccttctgcttactggcttattcacagactaagctattaaagtgggcctgaattggccaggtgcggtggctcacgcctgtaatcccagcactttgggaggtcgaggcaggtagatcacgaggtcaggagttcaagaccagcctggccaagatggtgaaatcccccatctctactaataatataaaaattagccaggcgtgttggtgggagcctgtaatcccagctacttgggaggctgagacagagaattgcttgaacccagaaggcggaggttgcagtgagtcaagatagcatgccactgtactccagcctgggtgacagagcaagactctgtctcaaaaaaaaaaaaaaaaaaaaaaaaggccaggcacggtggctcacgcctgtaatcccagcactttgggaggccaaggtgggcggatcacgagatcaggagatcgagaccatcctggctaacatggtgaaaccctgtctctaccaaaaatacaaaaaattagctgggtgcagtggtgggagcctgtagtcccagctacttgggaggctgaggcaggagaattgcatgaaccccagaggcggagcttgcagtgagccaagatcgcgccactgcactccagcctgggcaacagagcgagactccgtccagcccgtggtgaagacaaaacaaaacaaaggcttgaatttacctctggaatgccttgtcttgcccactgattcatttttctgttttaaatttgattccatatgatttggagaattatcgctttgttttaaaatttggtagcatgggtctgatactaacacatttttgtttaagttggtatttttcttcacaacttctgcaaaagttatttctgcaaaaggagaacattgctggtaccgaacaaagtctgtgcatgggccttttccacaaggagtataatctagctcttcatatatttattccttcctttatttctccctttaagtctttctaattttctttgactctctcttgtcccaagctgaattactaccctcacatttaatggattttattgctattgtaaaaggatttctgtccatcaaattgcaggtgctctgtgttgaaaaggggcttggtacttttctagagcaatggttcccaaacatcagaagcacatggagggtttgttgaaacacagcgtgccaggctcccctccagagtttctgattcaccagatctggggtggggcctgaagatctgcatttctaacaagttctcaggtgatgttgctgctggtgttgggaccacactttgagaaacacttctgattcccacacctaactgaaacacctgggtagggtggggcaccctacgaaatgctgcttctgtgggtctgaggtaggtctgaaacaatctattttctctctagtttgttaagttccctaggtgaccatgatgccaggtttgggaactgctcgggtgcaggttcatctgtgaagggctgacccacctatctctcttctttatatgcagatgtcagcttatctttgcagccagctgaagcatttttcagcctagaccctatcattctggctcaatctgcagatttgacaggactcccttctgtgtcttcttccaaattgttgattaaaatgacgagacgtaaaaatgaagtttcacctcatacccgttaggatagctactattttttaaaaaacagaaaataacaagtgtttgcaaggctgcggagaaattggaacctttattctctgttaatgggtttgtaacacagtgcagccgttatggaaaacagtatgaggttccttacaaaatcaaaaatagaacagaatcaaaaataggcacggtggctcatgcctgtaatcccagcacttcaggaggccaaggcaggaggattgcttgagccctggatttcaagaccagcctgggcaacatagcaagacctcatctctacaaaaaatgatgaaaattagctaggcatggtagcggatgtctaaagttccatctacaggctgaggtgggaggatcaactgggtctctccagttacctaggtctgaaggtaaatctgcttcctcactgtcttctcttaacactagaccgtcttcttcctggatcttcttactcaaaacatcatttttgagaatcttttcgggggagttgctatgatgaggggcagcagtgataatggaaatctatcattctttcaaaagcctcagacacaaattgcggcttatctcaaataatagaagttataatgcttttagtagaagaataacagcaagttgtataagcataacagctctttctttaactaccgatcaatatcatatgctcatgagaaaggaaaggtctggtattatcttctcccttttacagatatagaaactgaggcacagagtaactaagtgacttgtttcaggtcattcagttaacttcagagctgggaagggcattcactagtacaagaacccaagacgtttcttttctttctttctttttttttttcagatggagtcttactgtgtcgcccaggctggagtgcaacggcagtatctcagctcactgcaacctctgcctcccgggttcaagcgattcttccacctcagcctcccgagtagctgggattacagacgcccgccatcatgctcggctaattttcgtatttttgtagagatggggtttcaccattttggccaggctggtcttgaactcctgacctcaggtgattcgcctgccttggcctctcaaagtgctgggattacaggcgtgagccaccgcgcccagccaaaacgtttattttctaatttacagtcaggggaaagaagttttattttgttttgctttttcccttgaggaactgaatgttttctcctttctgattttaaagtaaactaacttactgtgtttctctttttgccctcaaatttgctacccagttagtccctgcagctctgttattcttcataatcagcatgcctgcttttcccgcctctgattttctggttctactgtcttagccttcatgtctgtgttaccttttctggaacctgcttcaaatcctttctgaagggggaagcctctgaataaatgagtgactgacttccacctatctaatgaagtgctttgtctcttgaatttacaataatttacttagcattttaagataacatatagcattttgggggtacagagaaactctgaattcactccgtgagattacaggaatctgcaggaacatcaaagtctgataaatatcacaggggcagaggaaggggtctcgcatatttgatgctctacacgccttctctggtttaatcctcaccacagctctgtaaggcaggtgtttacagacgaggaaagtaaggctcagagaaggttagtaacttgctcaggtttacaaagcagcccaaagtggaaccaggaatagaatgaaggacaaagtccacagccaaggccttttcagactagaccttgtggtctccaaatcaaaataacctgaaaggtttcccagtggtcataagatgccaacttgtgatctacatttttttttttttttgagatacaggatcttactctgttgcctaggctgaatacagtggtgctatcacaggttactgcagcctcgaactcctggactcaagcgaccctcccacttcagcctcctgcgtagctgagactacaggcacgcgccaccacacctggctaatgtttatattttttgtagagactgggtcttgctatgttgctggtgtcaaactcctgggctcaagcaattcttctgtctcggcctcccaaagtgctgggattaaggtgtgagccacctcacctaaccagatccacatatttgatgcataaaataagctatagactctgcacctcactctccccaaagctgcaaccatatgggcaggggagatagttaacttcctttgtgtgatattagcatgattctgccattaaaagcaaaaacaaaggtttcttccagaaataaaggcctctgggtggtcggatgtgaatggattaggcaggagttagttccctgtgcctgcccctttctcccaggctgtggggcctccccacatgccatcgaagtgttcctacctttctcgcagtagggctccccgtcttccatgtggaagaggctgttcccaaaaggcttcttgcaggccgcacagacgaagcaggtggtgtgccatgtctgtctcaaggcatgcattacttcctgggggaaagagcctaagctcaggacagaaaggagagagggagcgggcttgactaccccaccaggctccagccactgcccgagcatcctaccagggaacagggcaggagatctcaggatgcaggccttggtcactctgaagaaagacccaggggtgtcagagaaggggttgtcactctccagctgggtgccaggttctgtgctttcttacataaactgtgaggcttaatcctcccattaaacctgggaggaggtactgcttattactgtcatttaccaaaggggcattgagggttaaggccacattctggtgagtggtaaggtcaggctgtgaagcaaccacttgctttgcagaagttccaccaccacttcaagctgtgtggaacaggcacacaatcatctcttgcatcaagttcatttatccccaagtttattggtggcaaaccaattcccttttaggataaaaatggagttgctttctctgttaccagcaacttcttggcttcctaatgggatcccacgatcttggggaagggctggggaagagacatgggtcagaggaaatggaggcctcccacttacccccataattttggtgttgcacttggcacacagcggggcaaagaattgctcataacatcgctcacagtaaacgttgttctgctcttccacaaagcacacatctgccagggaagtcttgcagtaggcacaggtgaactcttcagggtgccaagaacggcccatggctaccagaaatgggcccctggggaagcacagaatggcacccagtaaggcagctcccagaacttggaattagatatttgaagaaccccaacactgtttatacttttacccaataactctgacttttgtgactgttctgatgaagtaatgtgaaattcagagaaagctccatgcagaaaggtgttcattgttgcatcacttacaataaagaaaatcaggaagcaactcaaacatctaccaataggggactgggtaaacatattatagaattcagttgaccactgataatgatagtaagaaatgcaataatgatgatgctgatggctaacatttattaagtgattactctgtgtcaggctctattcaagaagacttttgcatttattaacttgcttaattctcacaacaatcctacgcactaggtactattataatacccatttttagataggggaattgaggcacacagagtttgaacaacttgtttaaggccatagggctagtaagtggtagaccaggatacaaacttgtattgtctagttccaggttagcagtcagaacagtgggactatgaagacatttttttatattctaatttttacttttctgtgttttccaattcttcactaatgagtatgtattactttagttttaaataaaagtgtatttttcacgtatataagctcacaccacacatgcacacaaacatactgtattcaaacaacagcacccatggtccatggcttctaagtatgaaatcacttgttttcattttagtctggcagatgcccaccaaccccctgagcagcccaggcctgtctgtggaaagacccagaagcaaccctaaaggaaaactgggtcaaaaccaacactgtctaacaaaatgccccgtaaacctactgacaagcctggtgattcccagacctcaaccttagcccaagggggagttcctggcaccaggtatcctgctggagcttcacccacatacctcatgccattcctcccagctccctgggagagtgggtgtcacacaggtatggcagctaaggctcagagaggtaagaccagatggcaagccagaaggacccgaggctttctccctacacctgcctcctacccccatctctcccaaccagggctcagactgtgggcaagcaccccacacacacgcccttccagtgccccagtgcaggggcacagctggaccataccggatgacattgttgcagtgaccgcagagtggagtccggctgctggctgggaatcgctcagccctctggacggtccccctggcaagtggtggcacctgaggacccgctggggtgtaggctgggcctccccggggcagggtctgcttgctgatggaggtggtgctcttgcccggggcaaacttctgggagaagctatcatctgtcacccaaggtggacggctggcaggctccgcaaggcccccgctgtaggccaccgagggtgcagggttatagttgggggcaggtgagggggtataggctggtgctggggatggagnnnnnnnnnnnnnnnnnnnnaaacgagctgataggaagccagagagcaggaacccgaactattatggagaagtggtgtcacccctggtcaacaaccagggtacacgatcaggcacaccctgaatgacgtaccgtcctcacacagggcgacggaaccgggcaaaggcgacaccagacggagagacttgctccaaggaccgcaagaaggagacccgacaacgcgtgggaatcggccaggcctgtggagaggcccccggacaagtgtatgcacctaagcacccgctggagtgaaggttgggcctcacgcagggcagggtcatgcattgatgatgcagggtggtgctctttgcccgggggcaaagcattcggggaggagagctgatccgatcatgtacaccgcagggtgacggctggcaggctccgcagggcccccgctgtaggccaccggagggtgcagggttatagttgggggcagagtagcggggtataggctggtgctggggatggagtgtaggtggggacaggtgagggggtgtaggcaggggcaggggaggggtgtaggcaggggcaggggagggggtgtagggagtgggactgtaattggcccctggggacgggctgtaggtagatgcaggcactgcaaaagccaaaaaaaacccaaagaaaggtgtgtcaggaattcattcttcccagttcccctcactcctagccagagaaatgcaaaaggtgactttaacattagagcagtacaatttcagtttttttgggagacttgttcctgaacttcttgatggcccagatttgaattctcagcagggtgttcacagagctagggagcaagcacagcagaaccctcgacagggctggaaaagggacatggctataaatatttgcagctgtgcagggtggggctccgccaggccttgactgcccaaggcctgcataagacgcagagtgggggtgggggtacctgggcggggagaggtgggagtgggtcacctcgcctttgactgcaagatgctttcagttgcactctgaccagtgatttgacatctgaaatacctcccttggcataagtttgctgaacctggacctaggtcagccctcaggacaaaacaggtgacctggtagctgggttttcaggttcaggtttcaggtttagctacaattactttcttgaaaaacagcttggcttgatttgtattggggggcaattccgtcttggtttgattagggtgggggatcttgaaggagtcattcagagggtgctgggcagagactctagggtgacacagcctagaagtagctgctcacttggcccgtggctgccttgggggacccctgtactcccacatcgctttggtggaagctgagagtgtgtctgagtgactgtctaaagattgcccaggcagtcagagcacagggaagagaatgcaccacctcacttctatcaccccctcctccagctccctgagagcagaaaaacgttttgggctcacagcacagaaaaagcattgccactgcttacccacagccctctcccgcctgggccctcaacacctagccagggcagacccagctgcaccctgcaggcaaggtccagctggcttcctcttccagtgagtgaggttccagaagcctcaccacatttcagtctgctcctcagcaaagaggcctcattcccccaaccctaggaagcatgtcagcacagcctccctccccattcctgagctcagtatgggcaggatggactgcattgaggcagtccctgcacccacaccccgcctctgccccccaccccatactccagcctcaacctggagaggaaggttttccttagggcctaagaccctggccccatctccagtctctctttcccacctggttcccctggaccgcctggggcagcctgtggctcccactctgcaccttccactcccaggtgacccacccttcagagctgggtgagctggaaatccctgtgctgggggtgagtagggaccaggtagataggatccatccatgttgttgaaggaagaagagataaaaccctccacagccctgccctggagccatcctgccagtgaggccttcaaaagataataccggttgggcatggtggctcacgcctgtaatcccagcactttgggaggctgaggtgggcagatcatgaggtcaggagatcgagaccatcctggctaatgtggtgaaaccccatctctactaaaaaaatacaaaaaattagctgggtgtggtggcgggtgcctgtagtcccagctactcaggaggctgaggcaggagaatggcgtgaacccaggaggcggagcttgcagtgacccgagatcgtaccactgcactccagcctgggcaacagagcaagactccatctcaaaaaaaaaaaaaaaaaaaagataataccttctccataaggaatcttcctcccctttaggggtaacgaggcacatagcatctgtcatctgaatcggtcttcacattattccctctttacacttgaggtcactgaggctcagacagagctagtaagtgggaatacatctccaaatccattcattctatcatcccaagctgcctctgtaaagaatatgagtccaatttctagaaaatctcagtgcaacatgtcagggaggagtcattttcaacatgaaggagaccccctgctgtggagtcttgatagcatagccaagagccctggctgcaggatccagctctactacctcctggttttgtgtccttgggcaagttccttaacctctctgggcctcaatttcttcatctaaaactggcaatactgattcttagtatctcacaaggttattatgaggattaagggaaggtaagaaatataaagagcgtagcctagtacctggcatagtgtgtcactaaatgtgagtgaggatggcaaggatgggggcaacctgggtgtcagggtcagatgtactgtcagcctgtctcatggcctgctgctcacctagggaagcccagcccagttagactggtagcgcctagggttgggggagaggagggaagggaaatggaacatcctgaagtcagataacctgagactgaggtctattcagtggtggtggaatgcctgacaccctgcctgccccacagggcatgctggggacctgctggggtgacatagtgaatggattttgtaaatgtgtacagcccaaatttgaggtattgtcaccctccctaacaactttgcagagaatatcaaaatgctgggggaagaagtgattccaggaacaccaccagggacagagagcagggagaggtgatctagcacaacttcagagcagcttcatccctctgttatatataagggggttctgtgcaacattttctttcctttctttgtgaagtgcaattctctgctaaaaaagattaagattggctgggcgcggtggctcacgcctgtaatcccagcactttggaagactgaggccggtggatcacttgaggttaggagttcgagatcagcctggccaacatggtgaaaccccgtctctactaaaacttctagtagccgggcatggtggtgggcgccttgtaaacccagctactcgggaggctaaggcaggagaatctcttgaacccgggaggtggaggttgcagtgagtcgaagtcgtgccattgtactccagcctgggcaacaaaagagaaactccatctcaaaaaataaaaagattaagaccagaagccctaatcctgcggtgtccaatacatagtgctacgtggccgatgagcagctgaaatgtggctagtccgaccaagaagtgccgttagtgtaaaacacacaccagattttgaaggcacattaataattattttatattgattatatgttgaaattatatatatatatatatatttttgagacggagccttgctctgtcgcccaagttggagtgcagtggcgcaatctcggcttcacagccacctctgcctcctgggttcaagtgattctcctgccatagcctcccgagtagctgggactacaggcgcccgccaccacgcccggctaattttttgtacttttttagtagagacggggtttcaccgtgttaccctggtggtctcgatcttctgaccttatgatccgcccgcctcggcctcccaaagtgctgggattactggcgtgagccactgcgtccggcctgatatcttaaatatatgtagtcaaagaaaatatattaaaatgaatttaacttgctttcttttattttttaaaaatgtggctaataggaaatttctattgcgtggtgctgccttcaccaaaatgactgcttccacatgccaggccctttacgtgccttattactcgctgcaatccaaggaggcagataatatttgcaagtccattttacagatgaggaactgagacttggagagcttaaatggctgcctccaagtcatccagctggtgaactgcttagccgaaacgagctcaggctgccagactcaacagcagatgcccgcttagaaactccccaagcagcaaaacaggctttagtacgccccctttcaagtaaacagggccctggcccacctttcctgcctccctccagcaatactaaccctattccccctgcctggcagtcgcttccctccatcggaaggccttacagactcccggatccacctccttttcttttccagcccccacaacacagaggtctcacagaggcaggctagaatctggaccccgatttgacggcttccttgcttggggctaacccacccagagaaggaacctccccggcctcggtggcccggcccggcagctccgttcccccgtcgcaaccccgactccgtcggggggcgagcaggcagtggcgcttcgcagccctcagcttctgcatccttcagcctggctcgccgtcacgccaggagagacctgatatcccatctcgcagccccggggctgttgctatttttgcgtgacggaattaagccagtctaaattagaaggtgatatttcatctctaattggcaagttcaaaagtcccctatcgcactcggcgggctcggggatatgtaattaaacaaggtgatttctgactcacgccgggccgggcccggctctccgcaagcgcctggccgccgcccggcccgcgggccaacgtgaccgtccccggcccgcgcgcagggtctccgcgccgccgccgcccgccccctcccgggcctcaggtgttccggggagcggccgcccacctcgggcgccagcgataagatccggcctgcgaacgccgccctcggcccggaggaggccccggggggagctgcggctgcggccgcggcgctccgggtcccgcgcgggctccccgccctctctgacgcccggatccgaagagcctggagggaaggggagcggaggggggctcgggaccacacgccccacttcatacggggccgcctgccagccgcccccggactccgcttggcagccgggcctcccggagagggaggtggaggcaggccgactccagcgcgcgcccgcccggccgcctctttccccctaggcaggaatgagttaatgtctgcgcggcctgggaacggcgcgggggcccgcggctccggcccgtctcgctcgcctgggccccagcccgggaaggaggaggaaggagacgcagggcgggctggccgcgcgcccccggagccctgacgccgcctggcgggctgggcgaagacagccggaggccgccccggaaggtgccagaagcgcctccccaggaagagacggaaatgtcctccttgtgccccggcaaggcctcgcctccacccgccgcttctcctccaactcctctccagcctcccctccctgtgttcccagtctctgcaggggcagcctcttcccactgctccatctaaggcttttcactactgcaaaatgccacctcgccctgcggagttttcacctcagaaccgtctatccttgccccttctctgtagggacagagaagggcacctcccgtgtgacagacgctgtgctgggtgcttcattccatccccagaacacaaggtgtccatgaacagcgcagcctggatggatgaggcactttgccttcgagagcagagcaggccgtggcaccggcctctgtctcgggcaaaagccgcttcgaccgcccacactcagccctgctgtcagagcgagcttcatgaaccagcgccccgaagcaaggcctgccctgactcagtgcctgtctcatctccctgggctccagcggcagagaaaacttccctggggtttctccctgcgcctggataggacctgctcccgagtctaggctccttatgtgctgttctgtacccccatggctgcggccaaatctcgcacactggcatgacacagagaagatggagtctcattctgtcgcccaggctggagtgcaatggtgcagtctcggctcactgcaacctcggcctcccggcgattctcctgcctcagcctcccgagtagctgggattacaggtgggtgccaccacgcccggctaatttttgaatctttagtagagatggggtttcgccatgttggccccggcggtctcaaactcccgacctcaggcgatcctcctgccccagcctcccaaagtgctgggattccaagtgtgagccaccatgcccggtccggagaagacttctctgctctccttcgctctcccttagaatcatccaccgctttcttgctcacctgtctcccccagaccagatgcaggctccataggattctgacccacagctaggggacggagggcggagcatcattagcaaggccttgcttcccattcttctggggatgtgcccccagagccacttcttggctcttgtggctcctggagcccgcccatggctttcgacagcctcccctcctgctctgcctcttacctggctggtagacagaaggccggatgctggcagtggtgacaacccggggcttgggtgcaggggcggcggggccctcactgtagctggtgtgggtggcaggtgctgaagaggcggccactgcggggctgtaggaagaggcctggggcctggaaccaagcggggaggggttacacccagaaggacagcccccactggggcctgcagtcaaggcaggctggctcccaggtcttcagaagcctctgtgaggacacctgacagagacatttctggggaactgccagaaactgtgaaggaaggaccatgagggtcttggaggggaggaggatgttccttgggtggctagtgccaccgcctttggagagagggagaaaagccaccaggaggacaccgggaagacccttcactctcatggggagagactgtccaggtgggactgtggaagagcgcataggtaggggagaggagagagatggcgctggtcagaactacctacccccacgaccttgtggggcacctcagcccctgaccacctggcctcttctgcctacccttttctattgttgctggaaggaacagcaaagtctcaggtttctgggcacagatgctccagtgagagctcaggggaagtcaggagactgcccccgcctgctgcccaaggcacccccctctcccccaacacacacctcttctgcatagagttcctgttgccctcctccaactgggttagttttcaaggggcctagggtcacctttccccatgtgtggcccagggacaatggggtcaaagagattttaaaaaaagcgtcctagttcattaccctcaggagagtctgtgcgtcgtggcctctcctcccagagagctgaaggctctgagaactcctggaatccagcggcctgttgagccttgtctgatcagtgttccccaattgtatttgtttgtaaaatgcttttcttcatttaaaactaatgaacaccttgcagaacacatccctggtctttcagatctcaaaggggaccacatgcccacacccagggcaaatgggttattgctagaggtgctggagaagtgagccctgcctgccacccccacatggctttctgccttccttctgtctgttcctcaaggacctggggcctgccgatccctgctgggcagagctgtaggatgaggagtgccttcctctctggggctctgagaagggactggccctggcatgagaacccaccaccaagcttctgagtggatccagagaggtctgaggggctgtcccagacaaggcggagataaaatgagcctcagggagctggcatcccagaccagggggctgtgcacacttgccctgtcaagctgccgagtttctggctgagtgaagctattgtctcccctccccaggcccacctgcccttctctggatagattcctgtgctaagaccagcagagtaggggtctccatggaagaggaagagacagtgtccaaggggtgccaggcttccatagtgatgggggcgggccaaggtgcagtggtcttagctggactccatcattggaggacactttgcccacagcccaggagctacaggtcctgagtcagggactggcactgggaaagggagcagaggcttatggcatccattgaaaattctgaagccatgctcccatgaaaggctggggagtccatttgcctcccatgggctcccccacctcccgctccaccccagcccatgtgtgaggagcggaggtagctttgctcagagtgcaaacccgtgaccccttctgctccagccccactccccgctgggcagccagccctctgtgcccctctccaagctccacccaggtcccagctctcctggcaaggcaaagggaaggaagggaggactccccctgtggggggcatcccaagggttccaggagctcagccgtgggcaggcccaggacactgagacctaagcctggtgctggtgcctgcctttgagcagggttggggccccagggatgaggctagactgcctgcagggctccagcatttatagcccctcaccattcatattgggaggcttcttcccactcaaaaacagaggcatttcttgccctcctcaaagtttcatctttctgcaggtagcaaggcctttatatgaagagattctggtataaagaggggaagcagtgtcctaaatccccccaggaaactgggatgaaaccatccctggagggccaggctcctccttcaggcttgagttgggctggggaaaggttgggcttggcaccatgtggttaatgtgaagcccgggatgggggcagcagacaggcctgcaagccggtttgctcacatcaatcccacctcaggctgcaccatggacctacccatcctgatccaagaggcatgtcctccccagcaaaccgtgggggccagggtgggaggcctgggacacctgggctctgaccccaaacactaactggcctactcttggaagcccagacagagagctggccccatccagcctgatgcgccacatggccactgcagagtgacctgtcagcctggcctctctgccttcgctcttctcccctggcctttggtctctgcttgctgggtgtctaggagggcagatgcaggaactcacaatacttgtgtccttcatatgtattaggtgttttacagacattttttctatcataattctatataataagtgttaggtaaacatcttaacagatgaggaaactgaggttcagagagcttcagtcactttttcaaggttacacacagtaagctgtggagcagatataaatcccactataccaggtgcctctggcgttaacatggctgaactctctgaggaaatctgacctgccttccctgcccagctccaatgctgcctcctccatggagccttccttgatttctccagcccacagggacaactttcattctatctaatttgagttccaggaacaaagactttttccacagtccccttttgttatctaactttgtgtgtatgagtgtgtgtatgtgtctgtgagaaagagagagagactgttacctctctcactggtatatgtgtcagagagagacactgttacctctctcaccggtgtatgtgtccctggggggcagagtgacagtccccgccacagtggtgcacacccctgtaattcaccctcagtttccccttcacactctgcaccaagcagcgctggccttggcttcctctaggcctgcgggccctaactaccttggacacagctggccacaggtagacccagagtggggcgtttcctgcctcccttccccagggtcaggcccagcacctgtggcccagttaccttgggctgtcggcaggacttgaagcaggggctgtggtggaggcggaggcgatggcagtgtgggcagcagctgtggccaggggtggcgaagccgcactgggagaggcagcagcaggtggctgggcagaagcgggcagcagcggggtggtggcctggctggtgcacaccggcgcatgctcaataggggtgctgatgaggcgggaccaaaaagacaacaggtcaagggagcctagagaccctgtgaggcccctctgcatgggggcaggtggctgcagcagaggcaggctgggcagaaagctccacctgccttgcaaacagagtaggatcctcagagggtgtgtcttccagctcagggaaggagctcctccaggatcccaggagcagaggctcagaccacaggagggttccagtaacatcaaaaactttttcaatcctggaggaatttcccacccccacccctcaaatttttctgtacttcctaatttttctttttcagcaaaacagtgtggtagaaaggccgatggaattatccacccaggttcctccctgatcctgttttcacccttccccattcagtcagggggcatgtgctaccttgggaaggaatgatacagcaaaaaaagcagagtgaagatatttgagtgtcaagggcttaggctctggagttgtgagaacctaggctttgggctcggaaggactcagggcaccaacaagacagatggctgaaagctaccatgccaggcagagcaaggttacctggacaaaagtgggcactgtggcaaggggattcaagaatagaagcccctgtgccccttttcaaggtcaaccctgaggaagcagcaggaccccagggttccccatgcccatggtgaggggccaggcagacctgaaatagcccaaagatccccatgcctctgtgtggcctgggtgccctagaggatttgccatgcacccaagagtgacaagaacatggtcctgagcacctgcagatctgaaagaccttgtaactgggaaagagaaaggcgaccacactgccagtgtggaccagacgggttggggatgtctcagcaaatgccagtgcaggcagaacctgacagaggaccaggtgtgcccccacacccccaccctgagtgccttggcattctgtaagcacctcttccctagaaccactctaggaagacaagagcagtcagagctgggttgctaactgtaaaatggggtgggcagagaataaaaattaaattataggaaagcaaagaaatgcacattctttactctttgatttgtttttgcaataacagcaactggataaatgcagcttctgcaagtgggaatgactccccctacactatgcagtttgtttattgacctcatgctatgtgccaggaatgatgtctttacttcctcacagcagccctctgatgttggtatcatggactcttatttaatagatgaggaaatggtaacaaagagaattcagttgctcaaggtcctacaacttatcagtaagaatagcaggatctgattgagggatgttgtgatttgaatccttaaccggtacctcatggaggaagaaataaacctcttgttgtgatcagccaagtagactctttccccaataaaaggcactattcttattggaaataattagaataacaatactttgcattactaagtgcttaccacagtaaaagaaattaccctagccaggcgtggtggcttatgcttataatcccagcactttgggagactgaggcaggtggatcacctgaggtcgggagttcgagaccagcctgaccaacgtggagaaaccttgtctctactaagaaacaaaattaggccgggcacagtgactcacgcctgtaatcccagcattttgggaggccgaggtgggcggatcacgaggtcaggagatcgagaccatcctggctaacacagtgaaacctcatctctactaaaaatacaaaaacaaaatcagccaggcgtggtggtgggtgcctgtagtcccagctacttgggggctgaggcgggagaatggcgtgaacccaggaggtggagcttgcagtgagccgagatcacgccaattcactccagcctgggcgacagagcgagactccgtctcaaaaaaaaaaaaaaaaaaaatttagctgggcgtggtggcgcatgcctgtaatcccagctactcggggggctgaacccttgaacccgggaggcagaggttgcggtgagccgagatcatgcatgccattgcactccagcctgggcaacaagagcgaaattccatcttaaaaaaaaaaaaagaaattaccctattactcaattttatcatttaaacctccctgagccattgggattgtgaccctcattttgtagatgagaaatctgaggtccagaaagattgtgtctctagtaaaacatcacaaagctgcaaaatggcaaaaaagggcttggggcctcaccactataacactttgcaaacttccatgtgtgcttgaagcccctggggatcctgttaaaatgaagttgatcctagttgagtaggtctggggcagaactgagcatccacatttctttctttctttttttttttttctcttttttaaattgagacggagtcccgctctgttgcccaggctggagtgcaatgtcgcgatctcggctcactgcaacctctgcctcccaggttcatacaattctcctgtcccagcctcccgagtagctgtgattacaggcatgagccaccatgcctggctaatttttctatttttagtagagttggggtttcaccatgttggccagactggtctcgaactcctgacctcaggtgatccacctgctttggcctcccaaagtgctgggattacaggcgtgagccactgcacccggccaagagtccacttttctaacaggcttccaggtgatgctgatgctgctggtctgtatacaggccacacttggagtagctgacactaaaggggtctgccctagataggaatgcaagcgggccctcagctatttgcaaaagcattactgaattactttccttcatctggtgaggtgtatggtaaaaagggcatgaaatattgtgacagggtcacggaagaatggagctggagaagtggcaaggttgaggttgactgcccccatgggagagagagtgccatccttctccataactgcgtgggaagcttttgggatgggcaagagcagtggttacatcctgcccaggtcttccctgacttaatgctcagggaggcggtcttgggcagcccagcttgcaggcctgcagccgtgcctggccctggcccttccacgaacccacctatgaaagaacctcgcttctggaagccatgccggtgatgtgactgcctcagagaagtagctgcagtctctgtagccacgccactgagctggctgctcagaccctcctctcagtgtgggcaggtatggcctgggacggctcaggctgacacagaacactgatctcctttatctgctctccatggccctacaccacacttccagtaggctgctgggaaatgaggacactgcacaggacaaggacaatgacagtgtccaggctggggacaatattctgtaggatgaataggaggttggctttgcctgtctccttggctccaattcactgttaggccagcttacctgctgctctccgcagccagagctccaaatgaaccctggattccagggcatgaagttggagctggatgtgggccctaggaaaattcatcattgaccacagcaccaggacgatgatcaccaccaggtatacctgggtatgcacgtaagggagcctgctgcttggggttcttgctgagtagcatcctctctagcacactgtctaaagacaccaagaagccagggctagggaaggcagaggaggcatcaaagggtatcttgaaggatcttgggctcttattccaggtcagttcctgcctgaagttccacaaaccctctgaagcattctgaagggggcatcatagagcaagcactgtggagaacttacttggtcctggcttcattcctaaggacagtgctggtgagatcaccccatcctgatctaaggtctacagttgcctcctgccttagtcataattcagtttaaacatctaagcaaaaaccaaatcaaaccaaactaggcccacatgctcatggctccatggggggttggcgtggccaggagaaacacagcctgaccatcgtccccttttcagcttatctcttccctcagtctggtcagcatcaaggtggagcatgttgactgtgtgcccctgctcttccatggtggcccttggtggtgggaatggtggggtttggttgatgctgttattgataactatgatattatgtctggaaaggatgggaatggtggtggtgatgctgggtcttggggttgttgccactgggcttggtcagaactgttggtgatggtgggggccttgtgattggtattgacagtgctgaaggggtggttgccactgtgggggtgatgatgctacttgtgttagttaagatggtagagcatgaaaatctctgttgattgggtgatgatagaatgccagtcaggtggttggtcttgaaattattcatgctgccacccacctggtctatgttccaccttgctgcctggtgactatggctcaggggaaccctgagctgcatcactttgccccaggaatgctccatgcaactccagggcccacattgccattgtggtctagatgaagaacacctcatcagctatagtgtgaaaggcgccctacagcctttgctagttccactttccttcagaatgcattcaaaatcccatagcctgggagtctagatgcagaccactactaaccatgacatcctctgcattctctccattccaactaaaatgattaacttggggttctgggacaccacttctcatcagcacctctgcttgttctgcttagagtatctgtccagccttttgtatctgcttccacccaaattctaaccattcctgatgataaaatacactgacctcttcttccaggaagccttctttgatccaccacttggagggatgctccctgtctctggaccatacatgatcaaccttgcattgggaacacagccgcatcggccctttccgattcctttagcacccatagtagtcaggcacctccacaaatgcccacagacaccggatgctgaatgagaacatctctcctgcttatactgaggggtttacatggaacccagcctggggccccccagggcactacatgaaggggtctggggtaggtgggaaggcagggcttcaactaggtggctccaagagagctccgacaggctggggtctgggagcaggggtccaagagcccgccaactcttagtggttggctgaggctttgccagcctcaggatacccattgcccaggacctctctctatctggcagacccctgcccccaacccacccttgggccttgcaagtcctctgtaaaacatcagccaaatatgagtgtgttccaggaggcctagatgaaggcagcgggatgaaggctgcctggcccgggcatcagactgctggaggcaggatggggtgggaggccagaataggttggcagggggctttagggagcatctcagggtggatgggcaggagagagcggcctcaaacaccaacgcttcctggtgggattgcgaaggttcctggaggcagagggaaagcctctgcccaggcagcaggaatgggcgcagagctctggctagcccagccacagaaaaggcaggacagccttgagggctgggcctcagcatctgcttctaatgtaagtgccaccactctcatgtcctcagcctgtgatttcacacaatcagggacatggaattggcctggagaagctttgccatcatggggtactttctaagtggtcaggcctgggtcaggtgaatggggtgctagctagtggcttacagctcagcaggacatgagcctgaggcctggctgggatctttttggctgctgctgcccttcctagcccttcctaaatgcccaggactaggacaaggccacaggtgggtgggagctgggagcaagacccaggtggaagccttcccagccctcttgcctcctgccacttgagcaagaatctgccagggctgccttccatctcttttcccctgagccccagccctggccccctgagttcccttgtgaactgcttctcagcccaggtgtgcccactggagcccttctctcgcctctggaccaggatcgagcataagtagctccttcctgtgagaacagcttgcggggtgccttctgatggggtggggcaggacaatggctcagtctgctggttgcagcagggtgtggaaggagaggcagggggcattcgagtattcccatatgcactgtcctgtgggtgactaaggttgcccaatgggcctcagcacagattcccaccagccatcctcccgccgtgggttgcagctgggctcggaacctgtggggcaggagagcagcaggaccagagctgcgctgtgtcctggggccggtggacacagcccctgctcctcttctgatggtgcctgtcctctctctgtcccagatcatgccctcacagcccctcttgggtgggacacacacaggcacagcatgactggggcttggtgtggttcacttcaaatcttctttatttcagaacaagcatgcttatatgtacagaagagagaactatggagccagcacacacggtacagaaaggagggtgcatgcccccacctcaccactgccaggaggggtctctgcctcattaccctggggcttctacttcctcttcaaagagccctattccgggctgccctgagctccagagggcagcgagggagccgggcagcgccagggatcagcctcttccccagaccctgatctacgggtgactcattctaggaggggatgaggccaggagctgaggatggtgggaaactgagcagcggcccatccatttcccttggttctggggtgttatgccagcaaacccctcctgccctctctggtctacagctaaggccctgtgcagagggcaggggattgggctacgggctatttggggggtggcgagggttgccctggggaggtttggtgggtacagagctgcagggggctgggccccagcatcagctctggggtgggcagaggacagaaatgctgcggttggccatcagaggtgcccccagcagagttatacattgtcaagcatcaccgtggggctcacatgccagatctgtgtgggggtaaggatggagggagtccagcctgttggggtggggggattccaggcagccttttagcttttaacattaaggatttgggctgaaaggccatggtgccagttgcgcaatttggcaaaacgtgggctgttacgttccgtttcaaacctttccctgtggcacagagagagagagagagagagagagagagaaacagagacagagacagaaagagagagaagagagggagaatgaaaggggttagggaatgtgttcaccattcccctgtctaacaggtggggcagagggcatgggagggagggaacgggcttggagaagctatgcaatccatggggtacattgtaacccaggtcaggcctgggttaggggaagaccgagagtcttggggaccaggatggagggactgaagtccctgccttgagtgagttgggggctgtggagaagggacctggctaatggccctgagggcagactgagcaaagagggcctccctggtccatgtagtgagggctgggcagggctgctttggctgtgagctctcaggattgaaccaaacagacaggtgcacctcgcatgatctctgtcccctagctgggcatcaagaagaaggagcacctatcccccgtgatgaggcttggtgggcagacctgccccttccctgtgctgccctggcctcgaaaagcctcactgtccccagagagaagattttgcacacagcccctgcccacccctgctcgccaggcctgagcacagcctgggcacatgcgtgcatacccacacatactcacaaggtcactgtcacagatacagggccaggacttctggccacttcccaccagtggggcctcttggggctcaagccacacctgctcagctgaggccacagtacagagcaggcaagcagcagtcagaaacgtgggaatgaatggaggaagagagcacctgagaaaggccagtgccacaggcgtcagaatccaggccttccaggctggaagggccgatcacatcctccagaccagaggtgcccactggtggccaaagggccccatccagccacaaacacagtatgtttaacctgtacggtgcttccaactcaatttaaagattaatttctgagtccatactatgagatgcttcttagcaataaaagggaatagatgaactattgggacactcaaccacttgggtgacccccaggaattatgctgattaaaaaatggccaatcttaaatggtaccatgctgtatgattccatttatataacattcttgaaaaggacaaaattatagaaatggaggacagatcacagattagtggttgccagaggttaaggaggtgggtgggtgctggaggggagtgggtatggctataaaaaggcggcatggggcatcctgggtgaagggaagttctgtgttttgcctgtatcagtgtcagtatcctcgttgtgatattgtgctttcattttgcaagatgctaccattgggagaagctgggtaaagggaactagggatctctattatttcttataactgcactgaatttgcaattatctcaaaataaaaagtttaattaagaagttggctgggcgtggtggctcatgcctgtaatcccagaactttgggaggctgaggtgggcagatcacgaggtcaggagtttgagactagcctggccaatatggtgaaaccccgtctctactaaaaatacaaaagttagccaggtgtgatggcatgcgcttgtagtcccagctactcgggaggctgaggcaggagaatcacttgaacccgggaggcggaggttgcagtgaactgagattgcaccactgcactccagcctgggcgacagagtgagactccatctcaaaaaaaaaaaaaaaaaaaaaagaaagaaagaaaaagaaaaaaaagaagttggccgggcacggcggctcacgcctgtaatcccaggactttgggagaccgaggctggtggatcacttgaggtcaggagttcaagaccagcctggccaatatggtgaaaccccatctctactaacaatacaaaattagccgggcgtggtgtcacatgcctgtaatcccagctactcaggaggctgaggcaggagaattgcttgagcctgggtggtggaggttgcagtaagccgagatcgcgccactgcactccagccttggagacagagcaagactctgtctcaaaaaaaaaaaaaaaaaaaaaaaagtgaattgctagcatataaaaatcaggaagagcaactttaagtctttgaaaagaagatgtggcagtgctggccttctatttctgcacagtaacagtcatcggggctggcccccatgtccccacactcacagaggtcctcggttctgcacctgctttacctggcagtctctgtctctctctaccccttgaatcctgcatactgggtctctgtctaagactgtttgacaaaagggacccactgctaacatataacatatttgaaaaccaccagtctagtctgaactttccttatactaagaggaagctgaagcccagagaggtcacatgaatgacctaaagccacacagaaactcaggggcagaatcacaatctaagtgccagcgtcttcttcccttgccacatacctgcctatctgaggttggggtaaaggggtggagatggcatgagcaaagtccatgtggtggggctccttgagtcctgctgacagcactacaaacagtcctgaccatcccgtagacactaccgaggacacaggggcacaagatcagacacaggcagtttgcctgtaaatcgtcaagtcctagcaaggcctgtggaggctgggtgatagtttgtcattagtgcttagtgacagggacagggacagtcctggagagtccaatctagtgagcatgctctacttgaagctgtttaaaaatcctcagctagccaaggaaaggagccaggagaggaaggcacaggagagaggaaaagagacaggagagcaagagcaagaaagacgacctcccaggggctgctcaggcagcggcacctggggcaacatccctggtgctccagttgtggttttcaaactcgctagggtggcagaacaccagggactcaaaatccaaaaaagagaggtaattttttcattgctttcttacaaggggcccattggcgggggcacccattggcaggagggccctatgctgtgcggcgtgtaagcgaggtggctgcagggggggcaaaactgagagactgcgcagcagagggagggaagggggcatctgagaggctgcaggagggaagagggggagccagtgagccctggcattttattggaagaagcttaatggctgcatgatagaaaacgggcatggaaggatttttgcatgatctgggatggaaagggctatgtgatgcaccttcagctcctctagggactcttcactaagatcagctttgttcctaacgcttggaaagatggggagatgcagagctctttacccaggcaggcatcagggaaacgcagaggctgcacttgtaagggatcaggggcatgtctgggttacatgctgggctacatcctggatagttccccccagcagtgggatccagatgcctcgcagatccaagccctgccttgtccccacccctatccccaatgtggctgcccaatgtggatctgaccttttgagtgatcagggccctggaatgcctttccaaagtcagaaggaagctgtggcgatgactctgagattagaggctcagtttgtgggatggaggcactatttcagctacctccgatggaaactggggagccacagcgtcacctatacctactagagtagttcccatgtggaagtaggcagaaggctgatgttcaaggcaacctggacagtttcctaaggtgcctggtccttccagggtgggaagttcatagctgatgcctggcctgttcaggcctcccctacctcacctgtaaagagtccctggaaattagactctgtcttgggctagccagcaggttggcactggagcctcagatggaagctacgtgctaccagacacagagataccatcaggagccaggacccgagaggagaagagggctgtgagctgccctgggactctgggggtggaccttggaggcagagcagtgatggaggtgaagggaaagtttgcaaagtcttcttgacatgtgtattcacacttgacctcgaggtcccagagcccctgcctggtgcagaatgcctgacactactcactcaacattcccgctaactttctcaccacacagcaccaggaaggagaaagcacctttgcatgggcataagactgtgtaggtgtcaccatgcacaggattggcaaacccaggctctgctggagtgagacacttggaagcagtttacagggaagccttcctggggaaactcagccttcaagagagaccctgagaatccccgctgggatttgggaggagaaagagaaggtaggtggctgctctcagccaacaagatgggccaggagagtctaggggtgcagcttcgaacttgggagtggggacagatagaagtgtggctcaggcctctgaggagcaagacccctgaccagcctggaccagggtgggacaaggcatgttcccttctgctcagatagtgatgtaggtgagcctggggccccagtcatgaccagtgatcacacacactgctttaggcttcaatcacagacagattagaactgctacacccactgcacctgcctctgggtccatgggatcactgcttgggattcagtgacatgggtggctctgcccacgaggataactctccagaaattaaagtcagaagaagggagaggagcccctccagacctgggcagaggctggctgggtgcttcagagcctccactgcagggcctgagaccccagagagaggtgctgatggggtgagggaagttgcctgggactgagggaggaagctaactggagccacttcccaggccctcttccccagatttccctagcatgaaaccctgccgtagctgggggagaggctccgaaagctgccttttgctgaggctgaaccaaactttcatggggttaggccgctggtgaaaggactactctcccacccttcaattaccctcaagaccaggcagaacaaacttcaagagatgctccttgaaggagggaaggggaaggccaaggatgaggcctggggaccaccttcaacactgcctttgtgctctcctcactcaataactttgcagagcctgcaaatattccaggggaaagaaaagacaaaagtttgctgcaatgcacttccacagtactctttcccgttctaatgacatctggttaatgaggcacaagctgagcgtgactgccttgcatatcggagggaagcagaacattaaggaaccagaagggagccaggaaggcaggactctgggtctcagaggagggagaaaaaaggccccctgctggcctgttgctggaaggaacccggggggattttgaagccgcttgctctggggtgtgtgatttaaagacttttttatcaaatgtttgggaacatctgcattgcacactgaagcagctacatgggtggcttctaagaggagggcaagacaagcatgggagcagcacgcagggacagcggagcacagcgggaggggagagctgagagctctggcacttaaagcagctggagcttaacttttgagctaaatcaaacatcacttcatcgcggactctctagatgccctgcaggcactgaagggttaagaactgttattgggactgcatgccatccttagcaggcctgggaggaccccaccttaggcttggatgcctggccaaaaagtgggagcaacttgagttggcaaaagtgttggttcaaaaataaaatccacaagtctaagctggctccagagtcctactctgcacaggtcacatggccactgagtgttgggcctgctggttagcaagtacagaaagcttggcccaggatgggagggtgcctctgagccccagccccttgcacagaggctgccacaggatgcactggcccaaggcagacagtgccgggaagaacatgcagatgacatatttgctaccggaagtgtacatacaatcacaatgagccctactccttaccatggaaggccccagcgggttccagtgagttccaggatggcatgcccccccccatgcccacctcatgctatgagcacctgacgggccacagtggtaggttggtggctgtggcctcagacctgcaactgatggggaaaccatgctctaagaccccagcttggcacaaacccatcctcatgtccagggcttgttctttttttttcagcaactattttgctttgagcaacttacagaactggtacctcaatgtgggtctggacaggtgagtccaggggtcaggcgttcacgtccagcacagccccctgtgtgcctgtttctcagtgcccagccttcggaatcatagggggacaggccctgagatgagtgggtgggcaagttggccagccgggtgtcctcacagggaaagttgccctcattctcaacagcccagcaaaggccaaagcagccctgccccctgcccagggatgaagctgggagagcccagagccttcgctcttgtagcctgggcctggaggacagagactcgggtccaggtgcccacctcactgactcacgatgctgcctcaagctagtgtcagctggagccctttgcaggccaggctttccaaatccatgaacttgagaggtcccttccatgagtgatgtgacctgggggctgcccggggagggacggggctagagggcaaggccacagagcctgagtccaggcacttaccttgaccttcgcagagcttcttcatcagggtcttgcactgttggtagaaaggagctggtcaggggactcacgggagacacagcaaggaaagctgctggggctctgtgggcactgagtccccaggattcagccaggccccacacggtgactgcccccttgcctgtccactgtgtgctgggcagaggccccagaggacattgggaaagagtcagggggtagcctgagagggcctcatcccagccctgggcaatcatctcgcccggaagttgcacaccaagcctgctgcccactgctggagttggcattggagcagaaggctgctgtcaccggacagcctgcctgagaggcccagaaggagccctgccagccactgacaaaccatcaagcctggcccaccttcaagggcaggtagcaggactccctggcttctgcagtgctgggcccaggtccctggtggcccctcagcatctccctcctctgcagccaccctgagagcctgcactcactgaattctgtccccgtcatctgggccaggatgcggaaggagcgagactgcaggttggaggaacggcgtgcccactcgtcagcctcatcttctggcttgttctggctcttaatcacagcctggtagacgggagaggcgctgtctacggcaaggtccttaatagggaggctcctgtaatgcagagagaggccgtgggcgagggctaggctggagcccagttcccaccctgctgggtccctgctccatgcccattggtggcccctatcgttctgtccccaccttgcctttatccattgctgtctgagaacctgagatatgggcatgacctgggttctcggtgctcagattggtcgcagtgaagcagtgactcccctccctcatgagagacaggaggctcagatccctcaggtctgcccttccccagtgctaactccaggcctaggccggagacatttccacccctagattccctttacagagggaggaaacagaacaggtcttctttgacctccgtgagcaggccgtgagtttggggctggctggagagaggccaactgggggacacagaggattcctcaggatccatctcctgccctcctcacacttttggatccaaacaaggagctgccaatgctgtcactgccctggaaaaggactgggggccatgggctcagtgtgagtaggctgactctgctggaaagtggtaagaaacaaggcagcaaggcacagccctggcatggcctgtagggacaggggatttctggcctggggaagttgggagtggggctgcatggaagccactggtcctctgtcccagagaagcgcagccctttgtggaggaccaggtgaccttcccttaggctcccagggtctggcacatgataggtgcacaaaactcttggctgaacaaacaaatcctacatcagagccagaagggaccctagagcccctcgggtccagtgcctcccagcctgaatcagactgcagtgcaggccatggtcaaaagccttacagcccactcaccctggccgggggaccagaggaccaagccgcccagcccaccttctcagaggcctgggagggctcaggtgaagcccacaacagtaacagactgctggcccagccctctcctcgtacagatgctgaagctgaggtccagagaggccagccaactagctccaggttacagcagataagggccccattgggtgagaacctaggtttcctggctgctagccctgtgtcctttccattaggctccctgcagtcatagggctcaggaaggctacttctgcccagtgggaggccctggacctatgcctggaaagatgccctgtccagtactcttctgcctgcctctcccttttccccagagggctggctggctgggagaggaaactccccattgtccatgtcttataccctccctgcaaggagtgtgacagggaactgaccttgtgtcccaggactggtccctgtgtctggctcagggtgggctacaagagcagaggtggggaaaggtgatcgaggttgggtggagctgccctggcttcgctgaaggccctgccctggcccagagagctataggtactggcagcctgtggttgggatcggttgggaaagaccagcagaggcttctagggtccggccagggaggagcctgcagctgcccagggagcaaaggagagggtgggatcttgctgttgctgggacaggccatttctggcatagggaggagtcccaggcgttcctaaggtctgggtgagatgggcaacaggaaggcacaaccaggtctccctggtcctggctcctgacccactgggaggggagggaaggagggagtgtgaactgtgcagtgggtgagggaaggtgtggatgcaaggcccttgagcctctctacagagctttgcaatccagagagcaggtggaaggtgtttgctgctgtttccctggaatgtgcccaggaggagctcccctgtgcctttcttggctccaagggttcaagaaagcatttctggcttcatttcccacaaccccgtgcaaagaccagggactcttgttgctgctgtgaccaagactgggagtcagataaggaaactgctgtgcctttcatgacaccaaggctcagggagaatatatgcagggaagatggaacaggtcctgcagtccttggcccttggcctgagtccactctctggacccactttcagcttgttcttcttgccacagaaaacactccacagtcaccgcaacatcaggtcaccgctgcatttgcttcactgtgtgcagcccccagtctgattcatctttcccctcccatgggtggtcatggcaggcactggctcctgcagatacacttcccatgaggattctggggagtggcctccaagaggttaccttgtcaccttctagccctgaataatggcccagtgtgcattctaatgtccgggtctacactgttccagtgcagataggaaaggcggggggagctaccccaaagcacggcaagaagaacacaggtatgcacccccagcctgggcctgcagcatgagtgtcactactctgtgatttctgtgaccacagtgacattatttggacaaaccccaagagacaagtacttgcctgtaaaggctgcaagggatgtcgtttggctgacaggtgggtgtgaggaggagcgtggacagagcacgtgggctgaccactggtcctcagacacatcccaccaaacccacacacaccatcccacaaccagacagacggatgactggacagacactgcagggtctacttacgccagcggtgacgccctgccaagcagaggaaaacccagccgtgagtgcgcgtccatcatgggatagcagaggggcagcgcacacaagagagccgggttagggtcagaaacgagttatgggaatggggtgggtgaaggaggaagaaaaagagaaaaaacacggtcattgaggaaggaaccacggaaattaacagcagaaatgggagcacgttatggccaagaggttactcactggcaccacagcatggtcagctcagcgtggctgcgttaaaaggaagaggagaagaggaccctttccaggcataccaggggaggaatagggaggggatgggaggggacaggagggagatgggaaacgtccttcgtgaagtctcgattaatcaacagtgcatcaattccaaaactgatgggtgccctagtggtgagacctaatgatagcagtcttcccaacgtgcagaaaacagaaagttagtgaagagcatttctttcattattctccattgaacttccctttggccattgctactacttttaagagcacaccaaggacacacgtgacaaagaaatgttaacaggaaatccctgttagctcttgggcttaggcagccttgtttttctgggtacgcatgagctaatgcttgtgtttgtaaacttgcatggtcatattttctgctttgaatgatggaattcaatcaaccttgcccagaattaggcgaagagcagcagccctgagccttgggagtttgacttgaaactccaggacaggcgacctctgctccctggtggcctagaggaagtactgcatctccaaaagggccccaggctcctcagttccagcagagcccagagagcccacactgttccacccttggggctggggagcctgccctttataacctgcatgcatatcatggccacaagggctggggtctggaaaggccaagtgcaactgggttctctgggactttttaatccctccatccctcttattacatcggtttttctggctttggaaaaaagcatcactgtcatttcaagactttttgccttgaattgctaggggatcctgacccagggataagatgttgcccagactgataatcagccaacacagtggtattcccaagtagaaaacagtgaggaattatgtgtatgtgtgtaaaaaagaaacaacagatagacaggacacatacacacacacacacacacacacacacacacacacacacacacacgagggtcgggggagggagagacagagaaaaagcaacaaggaggaagacagaaagagacatacagagagagggagacacagagacacgcagagagaggtctgtctgcatgaatgtttgcattgctagcatttttcatccacaaatgattttcagccaactctttctttaccaaccctcaaattccccagccatagctaatgggtgaattccaggaaccaaggatgtcttaaatgccactgccttgaggccgggcttcctagggcaaaaagaaggggattgctcccatctgtgggactgattgccagcagtagtgtggatggttggtcgcagaccccttcccaaaccagaaacccagccagtgtatttgaatcaattctcattgctggaagaacctggtaacttccccctccttaaaggacagcttcgctgtgagaggcctgggggcctccagaatggtccccttgttaagaggactgtagaagtctcttcttccagcctcctcatagagcctgggaaaatgcagaggctgtgaaaagcactttgaggagccaccattttctgcatttctccacccttctcctaaagctgaccatggagagggtctgaagagaggatacccacgttccagaaggccctggtgaaggctggctcccctccaagggccatgcctccaggaggtccaacgtgagggaagaaagctggtcccgatggtgcccaatggcccatacccctcgggctctggaggcactgagtggcggtggaggagggaggcgcttacccactgaagtcactgccttgggcttgggcctgcccagcgatggcatccatgatggcatcctgggaatacatgctgatgggcgtgttgtactgcgcatggatgatggtggccttgccgcccagccccttcacctcgatgggcttgtgggtggacagggccgagtccttcagggcactggggttgaagcgttcctggtagtcggcgctgggggaggggtgcgggagtacgggcagggagagggaggagaaaagggcaacaggtggcggttacatgggtggccaaggcaagggctgggcgcggtgggtgtcgagagagatctcccagagccgaggccctgaacccccataggctacacaagtctccagatggtgggtggtctgggtgtattcaagaaaatccttggcaccctcccccaaagcccagtgcagcagaaggttttcttttttctttctttttttttttttttgatacagggtctcgctttgtcgcccatggtggagtgcagtggtgtgatctccactcactccagtctcaacctcttgggctcaagtgatcctctcacctcagcctcctgaggtagctaggaccacaggcatatgccactattttttttttttctgtaaagacagagtctcacgatgttgcccaggttggtcttgaactcctgacctcaagctgatccttctgccttggcctctcacagtgttgggattacaggcatgagccaccactcctggccatagaagggtttccttgcccatcttggctttcccagatcccctgcagtgcctggctcagcctgagctccctcccagggtctgcaggggctgccaggcacagagagatctcccactacacacagcaggggaagcgcgggcatggggctgggggtaggggtcgggagcagcagcccaagctgagtccagaatgccccaaaggcgaaaagcggctccactggcacccgcagggattctgagcaaggtttctccgtgaaggggctcttcctgcaggccacccccttggtggcccagggctctgatcttccagacgcttcagggaatgtgcttcttcctcagagcagggctccagctgcccaggccccctcaagtccagtttgctgagtagctggccatcctctacccgcaggaggctcttccctccaatggataggtgcgctccccgggcagacaagatccagtgcagcccttctgaggggtcgccaggacagaaaggtcttcaggctcacacaggcccagcagcagcacagcctgtgtccccctccccctgcacccgccaccgtcaccaaccccaggcacatcttaagcagctgctgcagcaggaaattgggaatgaaattagaaccatcggatggagcccccactcccacccccaaatgcttctactccagcttcacacatgcaggctcacccaggggtacaagtgtaccccactcatacatatgcacatacatgtacacatgccagcaggcacactctatccacgccagacacacgcagacacatgctggggctggcacgcaagcgcacacacatgctgtcctttgatactaacttggctggagagttgactaccacctggggaggaaaagggcaaagaagacagggtggtcagagagaggctccaccaggggcagtttgagcgccggggccatcatcagcctggtcattgtggaggcagaaccagcccaaaccgcaatgggtgaggagagcaaggagtgaggagggagaactcagagccgggaatcacagctactgggaccctcggtttggttcagagactgacacagcaatgtttccctcttgaggggtccccagtgccctctgctttgccagaagaagggttttcttgtctatcttcaggggcactcgtaccgcatacatgaatcccccacatacaaacctggctatagaccccagagtggaagctaggggtggagacaggaccagctgtggctgctatggaaaaggctgaggcccaggggcctccctgcctgtcagcagctccggactaagagtctgttttgtgggggcagctctggaattctgtcctgagcaggcattgcagtggtaaggaggcagggtgtgtgcggggtttcctatgcccccccaaacctgacctcctctccctcccagaagagacgcaggcagctctggctgctcctcttggggtataggggagtggggtgcacagtcaccaggggccactcctaaaggccccttgggccagcaatgaggcaggatggaggagcgagcaggcgcagggagaagtgtgagctcaacagccgaggcagcacagtgagaggccccttcctctcactctgacctgagagtgagcctcccagagcatggtctctgtagggaaagcagtgtctgtcctgtgtttctttaaatgcaaattccctgcagtggcagaccctgtggccagcagccctgtcgggggcctgtgagggagacagtgtggaaggtggggggctctgtccccaaactctgccaccttcttgaatctgcccagtgtgggctgtagctgggggagcttgggccccggccagcctggccctggtcatttgcagccaaaccctgggaagccaggctcaagtcagtggtccccggtcccagggagcagcacagtggccctgctctgccccaggcccgccactgcctcagaactgataaaattccctctatcctcccaggctcaaaatagctgcaagtggagctatattaggaaagggccagcacggagctccattccttctccatttttggccagtgctgacagctgcagggtcatctcttgccctgaccagcccagggccccctgcagagggcagtgttggcctggcggggtgggggctgcctctgccctcccttggcagcctgctccttctttgacatttattcctgcctcctgctcagcttctcccacccaggacctggggccgggatggtggcagcagacacatctgagaggagccagtgcctgggtcttggggaagatgagccaaagatgtaagacctgcccaggggcccttgcactgagtggcctgaggggcactgcccttcagtgccagcctcagaagggaggagaagaagggggctgctgggatgcctatgcccgtctgcccttgcaccacatctgtttctctctcctccttccaagaggatacgaggtgccaaagaattgcactgcaagttgcccagaggagagagtagcggaaggggcttctttttggagccagacaggacagagttcaagttgtgaccctgcctcttcctagcactgtgactccgggcaaattacccacccgtcccagcctgtttcctaattctaattcttgagatggtagtgcctaccccgcaggtgggttgtgcagactgaacgggtcatgagtctaaggtgctcagcatgggagaagtgtgccatggataagcacggggattagcccttgctgaccctgttgctgacccacttagcataggtggtggcctcagcccagcagaggttgccctaggccagcccaggtcagaggctccagcccttcctgccggcattgcctgagacagcagcatcagcttttactttggatgaagcacccactgcacatcctcccctagcccaccatcccttggaggaaacgtcagactctgctgctctgagcaccaagaaataatttacacattcatcagggtctgggcagcccctgcaccgacagcagagtaccttaggcactatgggaagcagaggtgggcctggcccctcacttccctgagcaggcagcaagtccctgtctcaatgcaaagtggagtcaggcagacctgcatgccagttctgtctgccacttactagctgtgtgaccttgggcaaattacttgctctctctgagcgtctattttccagctataaaatggggaaaatcatgcccacctctggagttgcagagagagttgttttagagagtgttgctgagagataaggcatgtggactgttagctggtccatagccagagtgcatggtcagtatggggagacattatcatcattgcaggtgggtctcctgggagtcccaggccaccagaggctgacctctctgcctgaggccagttcctgaaaaggaccgggaagacctaccagcccaacaaatgcgggacaaggaggtcatctctgttctactattccctgagttttctggcaaaagtcctttgctggggaaccctgggggcatatatggctctgtcaccttgggtaagggaagcaagccatgtggtgccagaaatcagcttcactgaggattctagaaagagctgggggggtggggaagctgagggccacagggagcagtgacctgatggggcacaggtgccttctgctgcaagggcaaaggcaagggcatgggcttgggccagactgaccggattcctactgtgactcttctgggtggctccaggcagtgatgataccaggtgtcatgcagtgagtgggtgacagacaaagctcagagctttacaagtgttgggccctttatcctcccaataaccctgagacatggacagtgtgattcctccatgattcggaggaggaaccctgaaccactaggctctactgccttgactcagcctgccctgcctggagagggctatgccaattgcacagggcgggagtagaagttagggtgagagaacaagcgtgaagggctcagagctaacacaggcccagtgtggggactccgttcctttgcctcccccctacagtgccccagtcccatgtccttttacctgctgtgctcccagagtcccgccagctagaccttaggggtgaggctgctgttctcctgcacagcccctttctccttggggtcctgcttcctcgccaccccaccctggccaaggtcactcctgcaaacccgctccctgcacgccactgccaaagagtctctccatatacaattcaagggctccctcctccaggcagcttcccagactattcctagtcccagataactcgcttttccacctctcgaacgctcccctgctcctgcctccgagctcccagaggggtggggacctgtgcatagctcttgaaggctgcaggctgtgctgtcctgttctggggagtggcctagtgaaaaagtgttggaagtcagaatctcctgaattcaggactggctcggccacatggtagctggacaaacggactgtgacttaaccttctctgagcctcagtttcctcctctgcaaaatccgacatgtcaccccagcgtggttggttgtataaatcgctagcatgcccggctcatggcaaatgccgcaggatcactgctgacctcatgggctcggggctggctggattggggccagtgcctcgctctgaccacctgaccaggtctctgccgagcaccgaggacccaggtggcccaggccacctgtggagagctgtatgtccgttacctaccctcctgggagtccgacacccgaggccttccctcggaggctcatctggtacatctgagccatctccctcagggtctctgccgagtacaggccaatggggttgttatattgcctcggctggctcgagcccggcagggcttttgggccgagtaggtcccgggccccctctgggctggtcttggccctcaggctggcccgcggagggccagggtcagaggcctcggcgagtgaggagaaggcggagggccgggagaaggcagggctaaaggtgggcctgagctccggggtgcctggggtgcctgggctggccctcgcctcagggctggggctgggtgccaccaggctgccgttcgtgtccagagcggggtcctggcacagggcaggccatgcaggggagagagaagagagcggttagaggccacacgcgtcccagcgctcctgcgtggacctgaaacagatgtgttagcgcgagccccgcagcctgaagcccagagcgcctgggcgcagcacttggaggggaggacactggtggaggagcaggcaggcacatggctcctggcctggcgtgaggctggcatccagctgggcagagtgccaagccctgcatggaagccaagccaagcttcctgcccccagggcccgaggaagtgggtgtaggggtcaggggatggcccgttctgtgtctgttccccctgcccctgagagtgggtgcccagtgggcacagcccagcctcctgctccactgaccccacactgccagtgagatgaagttcctgggctggttgtgggcaggtggtggggaggtgaggagggaagctgaggaattgggtagctcacatttgggcccctcagtctacctctgcaagcatctcccaagcagccctccacccacttccccagtctgtgacctaccccacccctgtcagcctctttttctcccctctccccactgccctgcccaatctgccccattggacaggtggggtcactatcagctcacatagggggagaagttgagcagggagccctcgggggttgagctgcttggcggggccttgggaagggcctaggcagtggtgaggtctggagccagggcttggcctcccttctcccctgtgcctgccattgccagcacgtcctaagggctacaggggaatgcacttgggaggggcaggtggggaagtggaaaccagagggagagatctgggtgaggccagcaggcccctccacacctggaggtcctcgtcaagctgggcctcagccacagtcacccagcggtggcccccttggcaaatgaaggtcagagcctggacgctcgtcccctgcctggccaggagggtgacccctctcctgggaacactgctgcccaagctggcttcctatcagcccagccacgaggcatagcggaggtggcttgcacccaggcaggcattcattcccacatccagtgttcaacaggggcttgaaagtctctcccaaggggctgcctcacttccccagggtcagctgcagcaggggcagggatggggcagggctgatcccacggcctcatcccagttgggccagccaaagaccaggcaggctggccagggccagcactccaggaaccagggctgagtggaccccgccgccacagtcagcacctaccttctggtgagggatcaccggcagaggggtctggactggaggtgctgtcgtggagatgggaatgggacgctttgatctgtagaaaccagaaatgagaccaggtgaggaagttgcccctggggccagaagctcctgcctgggcagggctggtgaggagagagcaagagagagccagagtcagctctcagagatagctgagtcagagggccccagatccactgtccaccccatgggctggatctccccaagaaggccctgggcccgacgaggatggagaaatcatggcccctgggcattttggtcagaatccatgggcccctgctacgtcactgggggctgcctgggcaaagtggaagtaggtaagacctgccttccaggaccaatggcccacgtacgggcagcaccaggaccaccatctctgccttaactgtaaagtgaggcagtaatgtctgcctctaggtgcttgacagcgacttgggcctgttcattcctctggcccagggctgtccttatcttcctgcacagttttgtagcccagggcggggcccactcaattgctatgggacaatccctcttttggcccctgccccatgcccacacccaaacctccgccccctgctctggagagctcccacctacttctgcagggtgaggctcaagttgtagctggcagacttgatcttgttctgggcttccaggtgggtcatggtgtctgtgttgacgccgtcaatggccaccacgaggtcaccctggctgagctgggactgggctgccttgctgcctggtgtgatctgattggatagtggaggtggggggtgagcataaggaaggtggtcctgaggaaaggccagtccttggggaagagtcacccgggagtattcaacagaagccgtcattgtgtttttcattcgctacggccagtaccagctgctaaccaagcctagttcctctttccggcacatgactaccacattgcttagagctttgtgtctgactgcagccttgggactagctctggccaactgaatgagggtggaagcaatgtatgctccttccaggtctgcctctagcaaccatccttgtgatcctgcacactctctgcttgttgactgactgaatgcagggcatggagaggaggagagatgattaaggagcactgtattggacgttgcatgaatgagaaacttttgttgttctgagccattaaggtttggaggctgttggacatggtggctcatgcctataatcccagcactttgggaggctgaggtaggagaattgcttgaggccaggagtttgaggccagcccaggcaaaggagcccagaccctgtttctacaaaaataaaaatatttggcagggtgtggtggtgcatggctgtagttctagctactcaggaggcaggtgagagggtcactccagcctaggagtttgaggttacaataaactatgatcgctcaccactgaactccagcgtgggtgacagagggagactctgtctcttaaaaatttgcaggcatctgctgggcgtggtggctcacgcctgtaatcccagcactttgggaggccaaggtgggtggatcacaaggtcaggagttcgagatcagcctggccaatatggtgaaaccctgtctctactaaaaatacaaaaattagccatgcctggtggtgggcgcctgtagtcccagctacttgggaggctgaggcaggagaattgcttgaacccaggaggcagaggttgccgtgagctgagattgcaccactgcactccagcctgggtgacagagggagactcggtcttaaaaaaaaaaaaaaaaagggtggccaggtgtggtggctcatgcctgtaatcccagcactttgggaggctgaggcaggcagatcacctgaggtcagcctggccaacatggtgaaaccccgtctgtaccaaaattacaaaaaaaattagctggacatggtggcatgtgcctgtagtctcagctactcgggaggctgaagcaggagaatcgcttgaactcttgattgaacccaggaggtggaggttgtagtgagctaagattatgccactgcactccagcctgggtgagagcgagactctgtctaaaaacaaacaaacaaacaaaaaactgcaggctatttgtaaccttgattagcctcttataacccctgcaccctgcaaagctatggagcacttttcagactccaggagaaaagggagatgcagcagctaagacacagcagcatcccagagacactgccaggctgaagggcaggataaatgcacccactcaaaagcatcttagtgccaggtgctttgtgctacctggcagatgtggagagagtgaggtagccgacaaccctgcctggatgagcaaactcagctgggaaatggggcagggcttagggttctgtagttgatgtcatacctccagaaggcagggtgcaggtgcgggggccagttcccaaaccctgagccccgataataccacagaatgttacagtctggaggccccatcttcagtgtaaccacacagaatgccactgcaactccatcccgggaattccccatggaatctcaggaaggccacacctcctgggacattacttgggatgtcatcgtggctcagactgcactcttggggacatcatgcacgatgccaaattctgcacccccggcctccagtaatagcacactgaatgctttggtggccctgcccacagtaatatcacatgagatgcaaaatttcagaggttctaataatgtcacctaaaaaggcttgatggctggcccctagtgacattagcagccccacccctaaagatacctcatggaatgccagagactctggctgtaccctctgtgacatcacatggaatgggctggcccctgctaatatcacatagaatggctttatgacctgactcccaccataccatgttggaggtccccaacccccatgacatcatgaggagtgccatgcaggcctggccttcagggacatcacaggaaagaggaggctccggaccccaccccctacaagctgtggctggaagtgttccttggctttgcctcccaaacatgcccaccagccagtcctctgggcttctctgggcacatcccagtcaccttcctggctataacccaaggaccaagccagctcctagtgttggcagaagctagattcaggccaaggcccgagaaccatcctagaaggagcccagagaggctctggggacagtcccttgccccaggtgccaagcctgggtgggcctctggccaggctctgggcttacagacatgggtggaagctcctgccagtcccctcacagggaagccccttccaaaccaggatgccctgcagtcaccagtcaccagtgtccagcccattcccagatgggctctgcagatgcagcccaggaactgagttgtttctgcacgaccacattacgggtcacggaaacactgccctacaccacgtgggtgatgacggcaagaccaggacagccctctccaattgctgtgaacctgccatttcagccctaggggctgtggtgccctcttttttttttttctttctctttttttttttttttgagacagggtcttgctctgatgcccaggctggagtgcaatggcatcatctcggctcactgcaacctccgcctcctgggttcaagcgattcttctgcctcagtctccccacagtagctgagaccacaagcgcatgccaccatgcccggctaatttttgtatttttagtagaaagggggttttaccatgttggccaggctggtcttcaactcctgacctcaagtgattggcctgcctcagcctcccaaagtgctgggattacagacatgagccaccacacccagcctgtggtgccctcttaaaatactggccaccttgtgcccacagcgccccttcccctgccctggaatctgcagagacaggaaaggacaatatagaaacagacgtctggactgccaggaagccacagcatctgctttgcaaagtccagcttgccctccaggccccgcaggggcatcttagagctacttgagatttcttaaaatacacatagcccttacccccagactcattgccatagcctctattaatgacaggagtgtattgctgccttgagtgtagaggtgaacaaagtgtaaaaaccaacatcagtgaaggaaagcaaaagagttttctagactgagaggggactcctgggggcaagttgagctgcccagccaggcctgtcctgcagaaaatcaactttccctactcctctatgtgatccccaacattttattatagacatttttgcagatttctaggcaggaaaagtagaaaacattctaaagtgtacacctgaacacccgccaccatggctgtaccataacatttcactcgctttgctttatcacactccatccctccacatccatcaatccatctcatttgccgggcatttcaaagaaagttgcaggtaccagcatacttctttccagggcgaattttgcaatgtctgttctgtcctagtgaactgcccatggggctcccccacagcaggacacccccacagcaaggctctctcacggcagggcacccccaaatgcccatctacagagaaggggtcgtccccctgcagggctgggtcattgcagaccccacgcagaaaggctgtggcctcggtcacagaggagatgctgacaggaaagatgggagttgtgtccagaagatcatgatgacagcatgagcaagggcaacagaatgatatccaagagaggctggggccagatcagaggggccctctgcagggctatctgactgtcctccctctggagctgcctcagagacatctttctcccacaggcatgggtcagcgggcaccagccctccccaccaggtctcctcacttcccctcacctagacctgcctggctctccctcatcctcaggtatgggccggggggatgcttgctcccaagggagagctcagcctcctggggtctggtcagtagccaagcctctgaccagagggaagtggctgagctggatcccctgcccagtgcctctcccctgcagctgtgtctgcttgtcagggctcagctggcctggcctttggctgccctgagtagggtccaacatccctcagggtgggggctgggggtgctgatatcctcctctagggaggtgcttcaggcaggatggaggcagggaccctatggatgatcaggagccatcggatgccttcaccccacctcaggagcagcctgcctgggtgggttggaggggggcaccctcagacccttgcccagagtccagggctcatggagagtgcagtccaggcacgatgcttccacgtctgtcttgtctgactccatcctcctctttcctttctgtgtttcagaaagggcccaaagcacccaactccttggagctgtggttttttctttttaatctttctagccgcctttgagcatttaaatgcctcccttgaatgagtgtttcattcccacttcacatttcagtcttatcccgccaatgggcccctctaaaccctggaaacccaaccctgggtgcagcctagaatggcctcagggtggggcaccgagctcctgtctccaaagctcccaagaaaggctgcaggtgtttggaggccaagatcagctccctgcccccaggagcccttccgccttgctgggccaaggtcttagggcacttccaagggcagcccagggagagctggtgccagagccacttgtgagtgctgggggctgggggcggggaggcagcaaaggaggagcacaggtgccagtatgggccgggcccctgacttcggtgccagcctccaagccctccagtgtcaagagaatgacaatgcctttctcgggattgttgtgaggattatgtcgttaaacaggggattatgtaaggagggtgcagagctgagagagtttcaggaaaactccaaatccaggaggcacagtgctgaccccatctgctacccccagaaggtgtgaggctggctggctacatccccgggctccacaggaaacaagatccacagctggcagagggtggagcttgaggagccagccctgactgaccagttctgagccagcctgctgtccctagaggggcctgggtgttggggggaggggaggaaacttctgtccaaggcccaggggaaagaaggcaccagtgaggcttcagacgcacccatgccatcggctcctatttccccagttccctggcagcagagagagcagctgggctctgcagacgtttctggccatcattcactcccggtgttcaaaccaggcaggcccctgccttcctcctcttctagatgtgccagtgtagatgtggtgggtggaggctggggcaggtggcagataagtaggaagggtacaagtttcagcagctccccctccccacactcccaggctgcctgcctgggttggggcaggtgggacaaagtgcattttcattgtatgattaaattactgtcttgtcctgctctgctgccttcccatctggcctcccctggggctttgctcatgctcaccctctcactggaaccttctgtctccccatggtcccactccccaactccaccctggccgataaataagccggagtcccctcaatgctcaaaaagcctctccctgcctgcctgggtggctccaactggctcctgtcatgtctcctttctgcacctccagactcctccaagaagtgacccacacatcctgcccccactgccgctgcctcccacctgctcacacacagccgtctgcctttggccccattattccacgcatatcaatgaccttctgtgtccaaagccacgggtcactgccccctctgtagctgaccacacctcccctggctttcctcaagtgtctcttgagtctctcctgcctctcttcctcctgtccaggtccacagttccatttgggtcttgggtgtggccaataaaatgccctcatgggcactggctctcaagggcccccagcaaggcccattcttgtgtccaaggatggttcctgggcagaggtggagcctggtcccaaaggggtgccaaagctgtgtttgggggtgggagggctcagtgtagaggagggtctttgcagtcaggggcagcctctggatgagaggggaccatgcagaaagggaaggagactcagggaattggggagctagcccccagcagagcctggcccagcctttctcaaacagccctgcagtcctgacactggctaccccacaatatctgtaggcccggagccctggggctgcttatgcagctgcccttgcacggtgtcctggcccaggggcctccaagggtccaattcattccccaggacccagccagcctcatgtcctctccttttggatccctcacagagttagatgcagttctgagcagcccggaggacctggcctgggggacctctaagaatgcattccccagctgtgagcctctgagcctctggccgtttatcttcccctgttgatagatgttgcagggaggcccctgccagccccactgaagccctcggaggcttgcctgaccttcagtgcggctataaacagcacggcctgtcagcactgctaagagctgcccaagaaacagcactgcgtgctccagcggccccgaaattccaggaattgccggcacagctaccccagaatagtctcagcctgtcccccttcctctccccagagaccctctgtcctcagcatgttcccaccacagctgggagagtctgataaatactggaaccgaaacccacagagaagaggcctctgagctggtgctccaggtgagcctgcaggcggggtggctgagaccctaggaagagagggtttccagtagacaggcaggcccctcctgggcccaggctcagcccccgactccaccagtctcacaaccagtcccagtagacaacaggtggaaagttttcacaagtgcctgttagaaagagctctcacaggtgtggaaggcatcattttatttgtttatttatttatttatttttaagatggagtctcactctgcccccagaatggagtgcagtggtgcgatctcagctcactgcaacctctgcctcctgggttcaagctgttctcctgcctcagcctcttgagtagctgggatcacaagcatgtaccaccacacctggctaatttttgtatttttagtggagacagggtttcaccatgttggccaggctggtctcaaactcctgacctcaagtggtctgccccctcggcctcccaaagtgctgggattacaggcatgaggcaccgcgcccagcctgctatccccattttaagggtgagaaaaactgaggccgagcaggtaaacagacttctgaggtgacacagctgagagcagcagagcctaacaaagcatactcctcttccccaaggcggaggcatgagaggcatgaagaggtgagaccccagaccacagccccagcctctggccagctgccagggcagaggcctttggagctgctccctctctgggctgctcccccttctccacttcctggagaactggctggggtggggtgaaagggcagctcatgttgcaggcccagccacacctgtccaggataaataaaggcatttccccgccaccctcctttcccagtctccctcttgaactcccttctctgtgggtctgcaagcagagaccctatgaagggatgccttgaggggctgctgctgccccaaagttgctgccatgagcccccgggagccaccacccagcctgcaggtggcctgtgtccttccaggaggagctgcagcacacacctgcagctgagaggggacagaccctccccagtgcctctctattagtcccagttagaggggtgagcaagccagcatgggagttaggggtgacaggatacaggagatccacccatggacatccctgtcctgtgagcagactcgagcctcagtttgccaggctctgaagcgaggtaacgatcccagcctcgcctgcctgcccaccccacagggtcacacactcttgcctctggtgccctatggcacaggctcaggtcctggctggggtgggagtggggttcctccagagagctctggccatgcctcccccgtagggggatgtccctggtgcagaagggccctgcgagccccggcagtaaatcctacagccctggtgggatggcagggctgtgtccacaaggcctgccctgccagcggcactgaaccaggacacaagcccaggctatcagcagcctaccaccaaaatttctcaagaggctccgagccctggggaaggctccagtacccagtccagcctgctccgcggcttaggtgatttggggtatgcccctaaaggaagccgagaggccatatcatgcccatcccccggtgccctgcccgagcttcgggttctatttttagaagtccccccagtcattggatccagcacatccctgcataccccctccccagagtaaggacattcctcctgctatctagcttaaggcttctgggctgccatttaagcccctggctggccggggccaggtggcacatagaccctgggtgaggtcattggctatcctgagtgccactgagcccagtggccaatttgcacccatagggatagggcagggagcaccagcaggaggcctcgagatggtggagctgggggagatgtgggctcagtcccaggcaggggaggccacagggcccatgagagagcacgcagaggctccaccttatacaggaaggagtcctgcaagcatgggggtggggagctgtgggaaagggcagtgggaaatccactggggctcacatgctcacaggtcaccacctcatgcaaagtgtgcaaggctgtgggtgcccaggaccctgtggtctccagggcagtagatctggaggggtggaatctccaggttagaacaagccacatctgcaactgaaggatggaggtcagggcctgttccctgcaccagagccaggccagcacccctcctgtaagcatgtggcctctatggctattataaggctctcacggcatccctgggtggggcttctacttctggggtcccctcaagtacccgtggaacaaaaaaagagattactcctccactgggggcattggctcctgacccgctgcccaggttccctggcccctctgccaagccccttcaggccttgcccacttcagtgcttcccctccaaccccttcctccagcccccaggcccaaggcaagtccttaaggccccagagaagaaactgtccccttgttcccctggtgggcagtagcccagatacccctgcctacctaccaccctccagtgacagactgggggcctccccctctggccttgtgcccggaacagcacggtcaggggctcagccaccaggcagggttgtccttgccctgtatgcctcacagttcgccctgagccttggggccttcagccctgggtctaccagtgccttgctggggagtctctttgtttgacagaaactgacggagtgcctactacggtctgggggctcttcccccatcagtccctgctcctggagtgcttcctcaggagcatggctaactttctgcctctctggtgttgctgtctccagccaggcggtagagttactcagacaacccctgatgttctgtgtcatctgcatcaggccatgctgctccccatcacagacactgcaggatagggggccatctcaccaggccccagcacttgtcgggaacaagacctgagacagacaaagcagccatggtgaatggggagaagcgcccagccccatgagccagggtcttggtgtctcaagtttgggatggagcgggtgcccagtactcagtccagcccagccccacactctgacagctgggcagccaaggtcaaccgtctgtctgtccatctatccaactgcccatcacctgccctctccatgctgggaatactcccttcccaaagcagctgcccatatctagggaaatgctcaaggcttgggggcaccctgagcccactctaacagtaaagggatcaggaaggtgctgtactctctgtccagctacctgcctgcctgcctgcctgcctgcctgcctgaaaactcagcattttcttctctgctaaaaacacctaccacctgctcatgatgtctcacatgcataacaggccggcgcgctccagtgagcaaacagctgtggctgagaccagaggaccaggccagtcccaggggatggggcatgctctgctttctgagaggctcagaaaggacagacagacagacggacacacatgccctcctccaagcgtgcctgccccatcgggtgccaggctgtggcagggtgcactcacccgggagatagtgaggggcatgttgaagtccttgcccccctgcagacggaagccccagggcccgggcccagtcagggtcacactgtaa

SEQ ID NO: 1580 - DNA, 6327 bp, Homo sapiens
taatagttttttgttttgttttgtttttctgcctatgaagttgccattcttttattcctttactttcctaatgaacttgctttcactgtattctatggacccgccctgaattctttcttgcacaagatccaagaaccctctcttgggaaggaggtgggggccgggagcgcaaatggcgttgagatggttcagggccctgttcaaactccagcactgaccattcaccggcggaagcggcggcggggagggaagttgcggggccgccgctcctgcccccccaaccgggcttcctatttaccgaaagcagagtccctcgcctctctcggctctcacctgccggccctgctctcccgcgcgagggttccgcgcccgcccgcgggccgtagggagcgggagaggcggaggcggcccgtggccaaagcacccgccaggctccgaggagaatatgaaactggtgtcaaaatgacatccagatttgggaaaacatacagtaggaaaggtggaaatggcagttcaaaattcgatgaagtcttttccaacaaacggactacccttagcacaaaatggggagagaccacatttatggctaaattagggcagaagaggcccaatttcaaaccagatatccaagaaattccgaagaaacctaaagtggaagaagaaagtactggagatccttttggatttgatagtgatgatgagtctctaccagtttcttcaaagaatttagcccaggttaagtgttcctcttattcagaatctagtgaagctgctcagttggaagaggtcacttcagtacttgaagctaatagcaaaattagtcatgtggtcgttgaagacactgtcgtttctgataaatgcttccctttggaggacactttacttgggaaagaaaagagcacaaaccgaattgtagaagatgatgcaagcataagtagctgtaataaattaataacttcagataaagtggagaattttcatgaagaacatgaaaagaatagtcaccatattcacaaaaatgctgatgacagtactaagaaacccaatgcagaaactacagtggcttctgaaatcaaggaaacaaatgatacttggaactcccagtttgggaaaaggccagaatcaccatcagaaatatctccaatcaagggatctgttagaactggtttgtttgaatgggataatgattttgaagatatcagatcagaagactgtattttaagtttggatagtgatccccttttggagatgaaggatgacgattttaaaaatcgattggaaaatctgaatgaagccattgaggaagatattgtacaaagtgttcttaggccaaccaactgtaggacgtactgtagggccaataaaacgaaatcctcccaaggagcatcaaattttgataagctgatggacggcaccagtcaggccttagccaaagcaaacagtgaatcgagtaaagatggcctgaatcaggcaaagaaagggggtgtaagttgtgggaccagttttagagggacagttggacggactagagattacactgttttacatccatcttgcttgtcagtttgtaatgttaccatacaggatactatggaacgcagcatggatgagttcactgcatccactcctgcagatttgggagaagctggtcgtctcagaaaaaaggcagatattgcaacttctaagactactactagatttcgacctagtaatactaaatccaaaaaggatgttaaacttgaattttttggttttgaagatcatgagacaggaggtgatgaaggaggttctggaagttctaattacaaaattaagtattttggctttgatgatctcagtgaaagcgaagatgatgaagatgatgactgtcaagtagaaagaaagacaagcaaaaaaagaactaaaacagctccatcaccctccttgcagcctcccccagaaagcaatgataattcccaggacagtcagtctggtactaacaatgcagaaaacttggattttacagaggacttgcctggtgtgcctgaaagtgtgaagaagcccataaataaacaaggagataaatcaaaggaaaataccagaaagatttttagtggccccaaacggtcacccacaaaagctgtatataatgccagacattggaatcatccagattcagaagaactgcctgggccaccagtagtaaaacctcagagtgtcacagtgaggctgtcttcaaaggaaccaaatcaaaaagatgatggagtttttaaggctcctgcaccaccatccaaagtgataaaaactgtgacaatacctactcagccctaccaagatatagttactgcactgaaatgcagacgagaagacaaagaattatatactgttgttcagcacgtgaagcacttcaacgatgttgtagaatttggtgaaaatcaagagttcactgatgacattgagtacttgttaagtggcttaaagagcactcagcctctaaacacacgttgccttagtgttattagcttggctactaaatgtgccatgcccagttttcgaatgcacctgagagcacatgggatggtagcaatggtctttaaaaccttggatgattcccagcaccatcagaatctgtccctctgtacagctgccctcatgtatatactgagtagagatcgtttgaacatggatcttgatagagctagcttagatctaatgattcgacttttggaactggaacaagatgcttcatcagccaagctactgaatgaaaaagacatgaacaaaattaaagaaaaaatccgaaggctctgtgaaactgtacacaacaagcatcttgatctagaaaatataacgactgggcatttagctatggagacattattatcccttacttctaaacgagcaggagactggtttaaagaagaactccggcttttgggtggtctggatcatattgtagataaagtaaaagaatgtgtggatcatttaagtagagatgaggatgaagagaaactggtagcctcactatggggagcagagagatgtttacgagttttagaaagtgtaactgtgcataatcccgaaaatcaaagctacttgatagcatataaagattcccaacttattgtttcatcagctaaagcattacagcattgtgaagaactgattcagcagtacaaccgtgctgaggacagcatatgcttagctgacagtaagcctctgcctcaccagaatgtaactaaccatgtaggcaaagcagtggaggactgcatgagggccatcatcggggtgttgcttaatttaactaatgataatgagtggggcagcaccaaaacaggagagcaggacggtctcataggcacagcgctgaactgtgtgcttcaggttccaaagtacctacctcaggagcagagatttgatattcgagtgctgggcttaggtctgctgataaatctagtggagtatagtgctcggaatcggcactgtcttgtcaacatggaaacatcgtgctcttttgattcttccatctgtagtggagaaggggatgatagtttaaggataggtggacaagttcatgctgtccaggctttagtgcagctattccttgagcgagagcgggcagcccagctagcagaaagtaaaacagatgagttgatcaaagatgctcccaccactcagcatgataagagtggagagtggcaagaaacaagtggagaaatacagtgggtgtcaactgaaaagactgatggtacagaagagaaacataagaaggaggaggaggatgaagaacttgacctcaataaagcccttcagcatgccggcaaacacatggaggattgcattgtggcctcctacacggcactacttcttgggtgtctctgccaggaaagtccaatcaatgtaaccactgtgcgggaatatctgccagaaggagacttttcaataatgacagagatgctcaaaaaatttttgagttttatgaatctcactgtgctgttggaacaactggccagaaatctatctctagagtgattgaatatttggaacattgctagctgctttacctttgcttcaggtgctcggtaatgctggagctatccttagacaaagaaaagtcaagtcatgaaagaagtccttgaagatataccaagaacattcatcagtatcattcgtgtttggatttttaaggccacctgatttcttcgtcatgcattcggcatttgctaaatgacagttactacatcaatctgcaactatcaaaaatgaggggaaaaggttcaggctgttaacaattccatgcagtatttaaatacatttactttggcagagtttataccctccccttgttttcttgctttattctgggcaagtttgaaggggaaaatttgtgctgctgttagtgcaactgctgtgtatgttgagccactgttgtcatgccagccaggtgcaaaggcagcttagctactgaggtagcgaatgttctgaggacattctagacaacagcttagttcctttttcaggctcatttgcttttgcttttttgttgaatgattccaatcgtaaataaagcttttaataattttgtgaattttttggttgttgttccctgaactactgtctatatttaaaattagatggaatccaaagatacacgggattaatagtatatttttttattcttgattaggtttgggttattgaactattttttacttttgagaccacaaccatattcaatatcataccataatgtgtcatagctataggcacaagaaaaacaacagtttgagagaatattatataagatgatgtgccctgttaaaaggaggaggcaaaatagtcaaacccagggtagtttacacttaatgctagggaggctcttaaaacattattagattttgaggaaagactctctagatatattttctaatgttcagtacaataaatataaggaagctaaaacaccaatgtggaattcctgtttccagataacatgtatattcttctatagagtgacaggatcaattgcataagcgcaaagccttaaattgctggtttagagaagacccttttttcattcagattctttgttcgtagagcagttatttgaaaaacagttatggaacacaaaacattttatagatttaatatcataacattgcaaatttttcttgtattattgttcacaccactggttatacttttttttttccttttttattgattgggcctgaatacaggctttctagagatctttttcattaatacttttaaatacctttcaggtagttacatcatgtttcttcattggatttgtaaaacttgaagccataaaaatattagtttggtgtgtattggggaaaatagctaaaagtctaatttttacccatttagactttgttatttccttgtataaagtgacaaatcggggctcttgtatcagtgccagctgtaatgtttttaaatgcagtggctgccttctattgtcttcctatttttgataatgcagattgttgggaaatctgtaaggaagtaactgattccaggcaaattgttttcttccttctacccaccccaacccctacccatcaccttttaagaacatagtacgccagtgtaacgtgggaaccattgagattgtatttgccctgagtattaaagctagcttagcaaaatacttttaaaaacatattggtaaatgatacccataaaattaaattagttatattttattttaaaatgcaaaatacattgatatttattaatcattggatttagggaaagggacagatttttggtgaacctgacttgtggcagatggtaaggaatattataaaacatttggatgagaacaatcagggcgaactgcatttttctgttacactggtaatcatttgaaaattgatttacctcagtgtttaacagttttttgttttgttttgttttttaaataataactaattgtcgagcactgatagagatgcagattttggtggggggaggtggtgggggagataatcacttcaccaactgcagtgcatttgtgtgtttttaaccctcagagaactctgcattttagggtacttgaggctgacttaactaaaagttttaaagtaaccttttttccattgtaaatatttctgtaaatactaccaattggaaattagaacagtagagtacttttctgaatccaatcctatttttattttatacagtatttctcagctgtgatctttggagcaaaagccaacggcaggaaaaaatagtttgtaccagtttcatgaagtatgtctttgggtttttgtaaataattttaactcaaataaaattgctactttcaatacacat

SEQ ID NO: 1581 - DNA, 3828 bp, Homo sapiens
atggttcagggccctgttcaaactccagcactgaccattcaccggcggaagcggcggcggggagggaagttgcggggccgccgctcctgcccccccaaccgggcttcctatttaccgaaagcagagtccctcgcctctctcggctctcacctgccggccctgctctcccgcgcgagggttccgcgcccgcccgcgggccgtagggagcgggagaggcggaggcggcccgtggccaaagcacccgccaggctccgaggagaatatgaaactggtgtcaaaatgacatccagatttgggaaaacatacagtaggaaaggtggaaatggcagttcaaaattcgatgaagtcttttccaacaaacggactacccttagcacaaaatggggagagaccacatttatggctaaattagggcagaagaggcccaatttcaaaccagatatccaagaaattccgaagaaacctaaagtggaagaagaaagtactggagatccttttggatttgatagtgatgatgagtctctaccagtttcttcaaagaatttagcccaggttaagtgttcctcttattcagaatctagtgaagctgctcagttggaagaggtcacttcagtacttgaagctaatagcaaaattagtcatgtggtcgttgaagacactgtcgtttctgataaatgcttccctttggaggacactttacttgggaaagaaaagagcacaaaccgaattgtagaagatgatgcaagcataagtagctgtaataaattaataacttcagataaagtggagaattttcatgaagaacatgaaaagaatagtcaccatattcacaaaaatgctgatgacagtactaagaaacccaatgcagaaactacagtggcttctgaaatcaaggaaacaaatgatacttggaactcccagtttgggaaaaggccagaatcaccatcagaaatatctccaatcaagggatctgttagaactggtttgtttgaatgggataatgattttgaagatatcagatcagaagactgtattttaagtttggatagtgatccccttttggagatgaaggatgacgattttaaaaatcgattggaaaatctgaatgaagccattgaggaagatattgtacaaagtgttcttaggccaaccaactgtaggacgtactgtagggccaataaaacgaaatcctcccaaggagcatcaaattttgataagctgatggacggcaccagtcaggccttagccaaagcaaacagtgaatcgagtaaagatggcctgaatcaggcaaagaaagggggtgtaagttgtgggaccagttttagagggacagttggacggactagagattacactgttttacatccatcttgcttgtcagtttgtaatgttaccatacaggatactatggaacgcagcatggatgagttcactgcatccactcctgcagatttgggagaagctggtcgtctcagaaaaaaggcagatattgcaacttctaagactactactagatttcgacctagtaatactaaatccaaaaaggatgttaaacttgaattttttggttttgaagatcatgagacaggaggtgatgaaggaggttctggaagttctaattacaaaattaagtattttggctttgatgatctcagtgaaagcgaagatgatgaagatgatgactgtcaagtagaaagaaagacaagcaaaaaaagaactaaaacagctccatcaccctccttgcagcctcccccagaaagcaatgataattcccaggacagtcagtctggtactaacaatgcagaaaacttggattttacagaggacttgcctggtgtgcctgaaagtgtgaagaagcccataaataaacaaggagataaatcaaaggaaaataccagaaagatttttagtggccccaaacggtcacccacaaaagctgtatataatgccagacattggaatcatccagattcagaagaactgcctgggccaccagtagtaaaacctcagagtgtcacagtgaggctgtcttcaaaggaaccaaatcaaaaagatgatggagtttttaaggctcctgcaccaccatccaaagtgataaaaactgtgacaatacctactcagccctaccaagatatagttactgcactgaaatgcagacgagaagacaaagaattatatactgttgttcagcacgtgaagcacttcaacgatgttgtagaatttggtgaaaatcaagagttcactgatgacattgagtacttgttaagtggcttaaagagcactcagcctctaaacacacgttgccttagtgttattagcttggctactaaatgtgccatgcccagttttcgaatgcacctgagagcacatgggatggtagcaatggtctttaaaaccttggatgattcccagcaccatcagaatctgtccctctgtacagctgccctcatgtatatactgagtagagatcgtttgaacatggatcttgatagagctagcttagatctaatgattcgacttttggaactggaacaagatgcttcatcagccaagctactgaatgaaaaagacatgaacaaaattaaagaaaaaatccgaaggctctgtgaaactgtacacaacaagcatcttgatctagaaaatataacgactgggcatttagctatggagacattattatcccttacttctaaacgagcaggagactggtttaaagaagaactccggcttttgggtggtctggatcatattgtagataaagtaaaagaatgtgtggatcatttaagtagagatgaggatgaagagaaactggtagcctcactatggggagcagagagatgtttacgagttttagaaagtgtaactgtgcataatcccgaaaatcaaagctacttgatagcatataaagattcccaacttattgtttcatcagctaaagcattacagcattgtgaagaactgattcagcagtacaaccgtgctgaggacagcatatgcttagctgacagtaagcctctgcctcaccagaatgtaactaaccatgtaggcaaagcagtggaggactgcatgagggccatcatcggggtgttgcttaatttaactaatgataatgagtggggcagcaccaaaacaggagagcaggacggtctcataggcacagcgctgaactgtgtgcttcaggttccaaagtacctacctcaggagcagagatttgatattcgagtgctgggcttaggtctgctgataaatctagtggagtatagtgctcggaatcggcactgtcttgtcaacatggaaacatcgtgctcttttgattcttccatctgtagtggagaaggggatgatagtttaaggataggtggacaagttcatgctgtccaggctttagtgcagctattccttgagcgagagcgggcagcccagctagcagaaagtaaaacagatgagttgatcaaagatgctcccaccactcagcatgataagagtggagagtggcaagaaacaagtggagaaatacagtgggtgtcaactgaaaagactgatggtacagaagagaaacataagaaggaggaggaggatgaagaacttgacctcaataaagcccttcagcatgccggcaaacacatggaggattgcattgtggcctcctacacggcactacttcttgggtgtctctgccaggaaagtccaatcaatgtaaccactgtgcgggaatatctgccagaaggagacttttcaataatgacagagatgctcaaaaaatttttgagttttatgaatctcactgtgctgttggaacaactggccagaaatctatctctagagtga

SEQ ID NO: 1582 - protein, 5 aa, Unknown
  cytokine receptor extracellular motif found in many species
  VARIANT 3: Xaa = any amino acid.
WSXWS

SEQ ID NO: 1583 - DNA, 31632 bp, Mus musculus
tctaacactgaagtgggtggaacatccttagcaataggaagtctaaatacttagccatacaaggcctccttctgaaaatcattttaagattatttctaagacgtattttatgtgaatgttttgcctgtgtgtatgtatgtatgtatgtgcaccacgtgcatgcctggtgcctgcagaggtcagaagagggtgttggatcccttggaactggagttgtggatgagtgtgaattaccataggggtgctgggagccacagcttctgctggaccaacaagtgctcttaaccattgagccatctccagactctgaaaaaaccttctgtctggtctcgtaatccatttctccagtttccagacttcacctgttcttttacctgcttatatatgccagcctcgtgccccatgagtgtggggacaaggccacagaggcagacagctaagtgtttgctctccgcagcagcatcgattcgcatcctcttctgttctctcagcgcacctcaggccagagcctccagccgggaggctgaacttggaccttctccgcctcggtgttcctttacccccacccactgcatgtggctcttggagaaagccggttatagggtacggaccgcagaggcccgggcgctgcaggcgcaccccagcctggtccccaagcgccaggcccggggctcgccctcgcgctgcaaccctaatgtcctcacccccgaccgcatcccacagttcttcataccgcctcggctccgggacccaagaggcgccgagggcagggtggaccgcaacccgggcggccggaacctcccggtggcctgctcgctgccgcacctggcgggccgcgagggctgggccttcctgcccgagagcccgcacacgcgtcgccgcgagtccttgttccacgggccgcgcggcctggctgcaggcctggccccggcgcagtcacggctgcacgtctcggcccccgacctccgcctctgccgggccccagacagcgacacggcctcgtcgccggactcctcgccctgcggctccccgcacacgcccaggccgcagtccctgtcccccgacgaggccagctcggcggacactagtccgtacgcgccgcgccgtgcgccaccgctcttccacctggacttcctctgctgccaactgcggccgaccaaggacagcgtgctgcgcctggggccccgcggcgggcagctgcgcctgtccaccgagtaccaggcggggcccgggcggctgaggctgcgcctggtgagcgccgaggggctgcctcggccgcggacccgcccccgggagcggtggcggcggctgctgcgtgattctgcggctgcagccgcgctgttaggcctggagctcagctggagccgggtggtccagggcagctgcaaccctatcttcaacgaagacttcttcttcgaggggctgcgcccgccggatctggccgtccgcagtctgagggccaaagtgctggacaggggcgcggggctgcgcagggacgtgctgctgggggaatgtgagacgcccctcatcgccctgctgcccccactggctggaggtctaggccctgggtcctccctggcacctactcatctcagcctgtagactgatagacaccacagctttcttgggaggtttccactgggtctgcagacttcatccttgccacctgcccggcatgtatttatttttgttaataaaacatcagtttgtctctagctgcatgctttccagtgggcaccaaaaactctaggctttgcagcaagtcttttccacccagcccttccttaagcagtgcttgagacccggaatccctggaagtgcttgttaaacatggagagcctagagtccatccccaagcgagtctgcttcaagagtcctagattgagttggctctaggtgcctgtcttagctttatttccgttgttgtgataaactatctccccatcacacacacacacacacacacacacacacacacacacacacacacaaaagcagcttttatggagaaagggttcatttggcttacaattctagatgatagtacaccattgtggagaagttattgccaggacttgaagcagctagtcacttccacagtgaggagcagggagagagacaatacaagctggagagctggttcagtggttaaatgcaaaggactcaagttcagttcccagcacccacatcaggcagctcataactgcctatcaaactacagttacaggggatctaatgccctcttgtggcttataaaggtcaggtgggtgggtacgtgcatatgagcgtgcgtgtgtgtgtgtgtgtgtgtgtgtgtgtgtgtgtgtaatgcccagggggagtggcacatgcctttaatctcagcactctagatgcagaggcaagcagaggcaggtggatctctgtgagttcaaggacagtctggtctaaagagtgagttaggataaccaaggcaacagaaagaaactttatctggggctggagagatggttcagaggttaagagcactggctgctgctcttcctgagttcaattcccagcaaccacatggtggctcataaccatctataatgagatctgatccccttctggcatgcaggcacacatgtaagcagaatgctgtatacacaataagtaaatgtgttttttaaaaagaagagaaaaaaaaacgttgtctggaaaaaagaacaaaataataacagagcttggtggctcatgcctctaatcttagcacctggagggcaggggcaggtagttctctgaaaattggaagctagtttgatctacaaagcaagttcccggccagcaaggcctgtgtagtgaaattctatctcaaaaaacaaaacaaaaaattaaagatcagagagagaaatgaacataatgtgtgcatgcatgcttctaatgcttacttagttcagtttctccacagtccaggacccaaagccaggggaatggaaccacctacagtgggtcagtcttccacatcaagtaattgcaatcaagagaatcccccactgacatacccacaggccaacatgatctagacttttctcttcccaagagattctagactgtgtcaagttgacaattaaaactaaccatcacaggtccctcgagtctaacaaaaccctgcgctttcagagagcccttgagtcctggtgtcaccccagcaagagcagaaagccaccctctcctaaaggtccctgtgtctgaagagaagaaactggcctttcctaccccttagatcaatatttgtcctaaagacaaatgaaatttttgaaccttaagagtgagccaggcgagcacagactaaacacacagtgccctttaacccttcctgcctccctctggctagtccatacacctgtgcacctgtgcaggagcaggaagaatggctggagtcaagaaccaaagagtaaaccaggtatgctagcaaacacatttaatcccagcactcagcggcagagacaagaagatttctgagttcaagtctacagagcaagttccaagacatacagacaccctacaggggctggggggccaggggagaagcacagaatagtgcttgggtacccataagtacttgggattatagggactgggatctgggacagaggatactatcaagggagtgagtgctgttatcagggatgccagaaaaggctactccagccagaagatgagggtgaaagacagtggaataaaagtgggtcatcttgtgtttacctcctacctgaaagcccttgacgtcagcagtgaccttctctctgcctcttccttcctgggaacttgttcctcctgccagacttcgaagagggatagagaaaggcaggtacacagcaggccctagaccacttcctccttcctcttagcctttctcacttcccatggtgccaattgtccccgtataggacctgcttcttcttaacaaaaatctcagcaggggcagctacacatacacacacacacacacacacacacacacacacacacacacacaagtcacccttctcaagctccttctacctccactaggttcccaccaccaatccccaggccaaagaaaccttgctccagttgtccaccagatggcagcattgaccaaacaatcctccgtgctgacagcaacctgatcaatgggtaggatggacagcttcaaacattagttcctcctggcaactgcctctaaggtgagtgtacagttgttattcaacatgaccttcgcccttagacagataataaagaagaaaactaggtgacatgactcaaggtacttgtcacgaagtctgacagtcttgagtttaatcctagagatccacttggtggaaggagaccaatacacacatataatgtaacttctaaaatctgtattaaaagcctgaagggtttctttttcccgggataatagctcttcagtcacttcacaacctggcacttcgcacttaaacctgtgaactctgagaagtccgcccactccccaagctctatctgtgctgtgctgtgctgtgctctgtgtgtacatcggccctcaagttctttcataacaatccctagtgagcaatgcaacttggaagtatctggaaggatgtctataggtcagtttgcccgccttcatcagttcctccagcaatggtgggtgctataggatgccaggcactggggccagcaggcttgaaaacaaacgcaggaatcaagtgagtcagaaaatgaacaaatatcagtaaagaactagctggcgatgggccgtagagaaaagtaaagtaagaaaggggagggaggcaaaattacaggaatggaaaagagagggagggcctgaaatacttttttagctgccatgtgtactttgtaccaggccttgcactttacccgctgtcttatctcaccaccactgggtaaagtaggcattaccagttcacaaaggcagaaagagatccgagaggttaaataaacttgcctgaggattggctttggctgtgaggaaggcttctaacagcgactctataccaacatcctctgccacaacccagcccaggaatttggggagtctatgagatagaaaacacctcccccccaaaaaaatgttctgtcacattcccagcccccggggctcagacaggtacaccgagtcccccagtctcagatacataccatgggagcaaatgaagcctaagaacccatcctgtgtgcaaggagctgaggcctctaagtaccgccattagcacagtactgccaccaacgcaggtcagcaccatggttctccccctttttagctgtgacaggattcagggcgcatgggtgacacccagcaaaccacactgttaaagtcttccttgtcccccaaaccagacctcccaattttgttcctcgtaattgtttttgaggcatactctaatgtagcccaggctagcctcaaactccctacccagctgaggatggcagtgaactcctcctgctcttccagcctctaccttccaaggctagacatacagtaaagccctgccaccgtgtcacgttatgaggtgctgtaggttgaatctcgggctccatctccagccctccactcctgatttttcaatcctcccacctccagtcccacctcagtgttaattgggaaatgagagctataagcagttccagggtagggctaaagtccatctttcccgctactcctccatactggggctctacataggtaccaacggggatgcagaaaccacggatgtgccaaagagcttgcaatgtcttttttttttttaatggccaagatttcatccactccccaagtcattctggggagttgaagtctccgtaagcctgaagctcaaagaaaggtagtctctactgcactgcagtagagaggctccagtgaaagatggcgccctctgggccaagccagcctctgcatgctgcccaaaccccagaggtttcctttttacctgctgccttgggtcctccctggaaggacaggactgtgctgagctttaagtggtttctgcggttttaaggggtggggaggaagggaaagaagagttggtgactgctccccatttccaagccgccgccgccaccacccacctccaggttgtttgccccctgctttgagattcctgggcctgataagaggactgggcacgtggggtagagtgattctctgatccctatcagcctcttccttgcataagaatgtatttgagtttgctaggcccggcatagtctcacaagagagagctatatctgggtcctttcagcaaaatcttgctagtgtatgcaatggtgtcagcatttggaagctgattatgggatggatccctgcatatggcaatcactagatggtccatcctttcgtcacagctccaaattttgtctctgtaactccttctatgggtgttttgtagaagtggatgatcacagtcagctattggatgggtcacagggcccccaatggaggagctagagaaattacccaaggagctaaagggaactgcaaccctataggtggaataacaatatgaactaaccagtacccgggagctcttgtctttagctgcatatgtatcaaaagatggcctagttggccatcactgcaaagagaggcccattggacttgcaaactttatgtgccccagtacaggggaacgccagggccaaaaagggggagtgggtgggtaggggattggggggggtgggtatgggggacctttgggatagcattgaaaatgtaaacgaggaaaatacctaataaaaaaaaaaagaaaaaaaagaatgtatttgaggaggaaatagcccctgctctgctttagaaagcactgttcctacagaaaagagccttggttacagcaagccaggggtggggagctgggggtgggggtgggggtcaggcaagaacacccagggggcataatcaccacaacctactctgagctttaccagcccggtaaatcccaaggtcacactggatgacagctgtacactcaccctatggccactgtgggaggaacaaatagttgaagctgttggaacagttcctcctgtgggcgtgatctcctgatagctggaagcacagagaactctctggtggcagtatcagtctgaatagggaacccccaccctaatcacccacccccccatgctggaggcagggccaaaagctgggtaggatgatgcctgtaatcccagccctcagaaggctgaaggaactggatagccatgaatgttcaaggccatcttggactactgagtgagatcatcttagcaacacgtaggaatgaaggtctcgaatgctgaaatgaaagagtagcttagaagaaagccactctcaagccaggacccggtcgcttcctgagccctcacagtcattctgacagtgccaggcagtgtctgccactgccatactgtgtggcatctgaaagcatccctaggggcctccaccctgtgcctctagcttgagggaggggtcatctggaaggtcttaagacccataatcaccaagagaaaaggacctggtcagcgatgcaggtctgtaaccccagcacacccaaggcaatgttgtgagttggaggtcaccctaggaaaatgagaggaggggcggggttcagcagttaagagcacaggctgctcttccagaagaacccaggttcaattcccagcatccacacagtggctcacagtcatgtatgactccagttccagggcacctgatatctttttctttcctgcatagtgaaccaaacacacaaatggtgcacaaataaacatgcaggcaaaacacccatactattaaaaaaagataagtgaaaagaagaaagaagaacaataactaagggagatgaaagcgagctggtaaggcacagaaaactgagcagtgatgggcagataggagcacagaagagcaggaggggatagctctgggatagaggcaggccattaaggtccccatcctttgagtgccctaacctttccagaagcctctttctgactctgttcctaggtaggggtgccatcactttgcctcttttcaaagctctccagattggcattgtgttttgagaagaacagtatacatgggcctgtttaccaccaaagaccgtgaagtcagagatgacctagtcagtggagtactgccacaaacacactggggtcaagggttttggggggttttttggttttttggtttttgttttttaagatttatttattttatgtatatgagcacactatcactctcttcagacacaccagaagagggcatcagatcccattacagatggttgtgagccaccatgtggttgctgggaattgaactcaggacctctggaagagcagtcagtgctcttaaccactgagccatctctcctacccaagggtcaaggtttaatcccccagaacccacatcacaaaatgggtacagtggtagataggtaggtaggtacttgtagtctcaacaatggggtcgtagaaaccctagaaatcacttgccaatctggctaaccaagatggcgagttctccgttccatgggagaccctgtctcaaaaaaacaaaacaaaacaaaacaaaaaggtaaaaggtaattgaggcagacatcaaattttaatctctatcctccacagacatgcacactcacacgtgtacacacacccacctatacagacacacacatatatgtatacatataaaggacttaggactagtcaaagcctcaaaggccctcaaaagtcaccctacacccctacacttttcagtctccctggggctaagaacggctattcctcctaatctttgtctctgactcttaggagactcagctccctagagcactgggtgctactggttgcacagtgtgaagctccacggagggccaacggtggagaatggaatgctgggagcgaagggacagctgcctgccctctccacgctaggtgccacgtgcaccaggtggagggagtgggcgagtcacgaggccctggcgtggccggctcctgccctgctgtttaccagctggagaaagcaggaggaggggttgggagcctcctgctcccagcctggcccctagccagcggttgttgggtaagcaggaaagccaggcacagctaatcaaactctgggcaaaggacatgccgaactgaggcatccaatattcacagaagtcttggctcttggcccttctcagactccagtgcaggcctttatgtgaacagaattacggggtcgtgggggagggggaagggagaaccgggaggaggggggaggattccctcctctcaacttgttggcccagtgcagttgctctcttttgctctccctccaacacccctcacctctcaatttgctcttcctcctccacacctccccccaccacaccagaagtatgggaagcatctagaagcctggaaaatccagaggtgggcagcatggagttagagagaggcaaagcaagacatgtgctgggggaacccaagctgcagggaagtatatctgatcccatcctggagatcagagtgcacacacacacacacacacacacacacacacaggctgtcttttctcttcactcttcctgcctccctttcttgctattctgtcacctgtcctaaaaaagttacagagaccaggttcaaatctcaactcaatcacgaattgcccttgtgaattcctggcaagtcttttctattctgggcagcaattggttcatgattatgaataatcactcgtgcctgtagggggttatcatgtgggattccaaaaaacaaacaaaaaaattctgatttacctacaaggcctggcaaaaactcagcatacagtaggtaattaaaaaatactagctccctttcacctgtttttcctcaagactccagacactggtccactgctgtctccctgagtcccctcctgtgccaggacactctgccagccactcctttcccctgcctgctgacgggccaggtgctccctccctcttccctcctccctcccttgggccctgctccctgccctcctgggcagccagggcagcaaggacggcaccaagggagctaccccatggacagggccccacagagacaccaccggacatctcggggtaagagaccctaaagccctgcaggcaggtggaagggactgtcagggggctcagaggaggggagggaggcgaagagactgggaaagaaagaactggggagaagagaggtgagcagaggggagatggactggcagacagagcaaaacggtgagataggaccgagtctttacataactgtaggggggggacaggaagagggcctagggtaacagcaggagacctgggaagacggggagggcaagaaggaagagacaggttggagtgggggcaggagggaggagctgtgttagggaggcttgatcgagaggacgggaatggggctggctcccaggtgtgagcaggcccctccctgcctgccacagaatcctgggcagcagcggctggaagggtgactctccgccttcctattcattcacaagtggctgccgttctggcgcaggggctgggggtgggggacctgggagagaagatgcagttgcaccatgccagctgctctagcccagcagtcccacgctttccttcaagctggtccgagcacggagttttatctttgctgtgtgaggcacctgtggagcacagaaaggaactggggaacagtcccccgatggagtgaggagggagcccttcagaacaggacatcccctccctccctcccatgcttgtcagctgggaacctagagagagtgaacgacagaagtgccagcttctagggccactagagaaaggctccggggtgggagtgggagtgggggccaacaaggggagtgtccccatgcaagactgctctgaattgcaaagttggaggctggacaagggtgccacgtcagggaggaaactgagtagggccagacaggattagcagggaggtgggcatggcatgaagccacaccctctctgggcagaccttcccctcccccacccggggaacaggctaccaggccccatttactatcacggcaatgaaatgcaggaagcctggctgcagagtgcatctcctggcagagggacagtgaaggagggacaggacatgtgtgccaggcttggacagcagaaggcaaaaagtaacagaaaggaatcaaaggttagggacattacagacagggctaatgggctttctggaacagaagactggccctaggcaccctggatataggaaatgggttgcggcctcttttgccaagggctccctctctaggtgtttcccaaatactgactgcatgctgatttcatcccagatatgtaaacagccctgtaactatgcagtaaccatgactctcccctcagctgctgctcccctggacagcagagcatctctgtaaacctccacgaaccatggggtgcctcctcctgtctgatctccacccagacccatccacgagcaaagcagcaaggcaaagggaccttccctctgcaggcttgtgggcaggtgaagcacagtggcggccagagagggtctatctgcagctcggccctccttgtcttcctcttcgcccaccctccccatgcactcccagccccacacctctgcagctccctcttgctttcaggcacagataagcaaccaaaagactgtattccctctgggtgcagaatatgtgtgtacgtcaaatgcaccagatactagagggttcttgctgttccccagagcaacaagctgaacaagacagacagaggctctgtctccagacgggcttacaatatagaagggatgatggcatacctagggcagttgtctgttacgtcaagtgccaggaaacaatgcagagtgctggctgagtaaaccccagggcaggggacagggcatgggaggctgccccagaggaaaagagagacatctgagatctagctaaatgggggagggagggtagagtgtgacatgaggaagtcctggaggcagagaggagctgggcactttcaggacctggaagagggccagtgtggccaaagggcaaagtgatgggctctgccaaggggcccagcttctcagaggccaggtagtgctggggtaaaaatggggcagggcaggagccaggaactggggaagtctttggcttttcccctaacatcttcaactattcactgatcccttccttctctttacagagctgctggctgcaaagaagacccacacctgtgagtaggggtttgggccaagaaggtggcatggggtatggcaaaagcattcagttcaggaggcatgagtgaaagaacacccgggactggacagaattggaagaatcaggctaagactgcaaagcccaagagataagggccaaagggaaagactttaggccaggaccaaaaaaaaaaaaagaaaaaaaaaagaagcccaaggggtgccaagttacaagcatagaaagaaaaggggaactgggaaagaggagggcagggtgctggacagaggctcagctgctgtgtctgaccagggaggaggtgaaggccaccccagcctcagaactcagcagccacaataggaggcctgggagcgtgcccagggctttgtggtggcagagccaggtttggtgttcatctctgtggttaacacattctgaggtgtgagcaagcctggagagaggctctgcagagctagagagcaggaaagccttgtctctgtaagaatgagtggacaggaacccgaaatcctcagactgcagtgtacgaggaagagaccagagttccagaagggcttcccaatggacacttgcaagtaaacatctgtctcaggccagtgcagcacccccaatccagccacatagagagaagctattcccctacaaaatgtgcccgctccaccaaagtcctccccaggggttcgtgcataccctcagcaccttgggggcactctggaaaagccacaagcatggtcattaagttaatagtgacaatctcatcagaggaggtcacctctactcttccatcacatactcattggttgcccaccaatctgtccccactacaaaagccatctgtggccttcctgtcccagcatccctcctccctgagcttggggctccatcctcctgggggggtcagagctgcttggctcagcataatcctgatcagcctcctgtgcactagccacagggccccacggaaacgctgagcagggccctgggaggaaagcgagtcagaatgacgcaggcaagctgggggaggggaccagggaccacacttgggggtgtagagggggacttttggagagtggaaactgggagagaccaagccaagcttttagacctgcctcccatcctttaacccttaccatgtgtcctcctgaggatccaggctagttaccctcatccatccaatgtccaactcccaagctcgcagagagagctttttactaaccagaaagattgaagacctctcaaggaggttgagctccttgagtttttattgtcttggccccaaccccaggccaagacaataaaaactgcctcccaagtgaaataacctcaagaaaggggtccaagctgagaaacccgggggcacacccagaccaagaggggaccgaatgactaaggggccagaagaggaacctccaaggctgaggtaccccacagagcagatggaaaacaaatgaatccatcaataagaaatctcacaccaacaaaacctgaagagaaactcaagtgccaggagacgggccagtctgagacacactcgaatgcaaacctgaaccagagatacccttctatccctccagtggatctgaggtcactctacctggccataagtccttactcaaccattcactactgtgtgatcttgagcaggttacttaatctctctgtgtctcaccttccttgtctttggaatggtagttatcacataaagtattttatggggattatgaagtccacacagagctgaatcattcccaacactgaattaagcactgctgctaagaggatgaagatggtagtgtcactatctgtgtcccagactagcagtcttgtttccaaaggcctttctgaaggaccaacccatcctacagatcctacagagggtatttgcctgatgatactgccgctatcgtttcctcagcccaggatagcatcatgtgtaggaggaatttgggtgtggtgagggcagcctcccggttgtaccacactggttatggctgttgacagtccacagggtctcagtgccacaagacaccacccaagacagattcctgttacttacctttggaacatccctacccctgatgtcacttggtgaagagggcctggggtactcaggagaggggatttcgagcctggcctctgcccatgagctccacgaagctccccagctagaactcccctggcgagtggaaacagcttttaccgcggctgtagctgtggttttggaattttccaacgccccctgtgattggctgccccgcccctcacaccctgccccagacccagattggccacgtggggtgcctgtcatcatacccaatgcacctctgggggttggggggctgtcacttggccacctgtgtggagcagagcttaaacccccctgcccagaaacactgggggagagctttgtgcagatctaagggctgaggcacccgctgagagggcttcaccccacctccactgccagctgtgtgctgtcctgggctaccctactgaggaggacagggagccaagttctcagtcatgagaagtaagtgaatgggggcatccggtcatgggggagcctgggtcctgtcaccattcctaggcccgctgaataggagtgtatcttggaaaccgtgcctctttggcagggtgtgtcccagtcaaggtcaagatctgctgggagatgggtggagtcccaagagagttactcttccctggcagcttccttggcagcaatggtaatcaaattattgaggagttcctgacataagttctgaagttctgggaagactgagcatgcccaagggtccaaccctttgatttacaaagagaccaagacccaagaggggagtgcatcactgaagagctcaccattagggcctgggagctggtggagtctggtagacattaggacccacagcttatattccttgttcctagtgaagagtttatctttgtgcctccaactgcaggcactgctgtaccctgaggcaggagtcacagtaaactgaggtcagcaggcagtggggatcagaactcatcatctccctgattccctaaccttaaacacacacacgcacacactcataccagggcctgatggctcagtacaatccagctagggactgctctgtgtgtgctatgtgtatatttgtgtgtgtgtttgcatatgcttcaggtgcagttgatcatctatagcaagaagagatgggagcagaaaaccttggtctcactcctttccctgcttgaaaccatgggcccacagctgctgggcagatgtcaggggccctttaggcttccagctgagcaatgtgggggatccgatcctccctgctcatgtaagggaagccagaggacctctcaaagtctacagtgagtgaggaaaagggaagcctgttaccctgaggcctgaggaagccccagctttaacctggggtctttccacaagccacaaaaggggaggccatactgagtcctggaaaggcccatggactgaaaggctagtgagcaggttctaacacagggtcacctgaggcaagccgctgatctctggtctccagccacaaaataaatgccaagcatgggagtctctgagttctaagagcccaagaccaaagagaccccctcgtcccctaatgggtgaaagagaatagacccctatagtatacaaggtcaagttgggattccacttgcatgcatgggacaggactatagtccttggtgagacaagaggaccaggagaagaaccaaaagtcctaaaatggagtaggagccgtggttcttttctggcttcttcccctccgcagcaaaagctggcagatcgatttcacagaaacagccccaggtcggccgaagcagagggcaacagccccaatagtatctgagggatacacttgggtagctctgcgttttatgcacacatgcacgcgcgcgcgcgcaaacacacacacacacaacacatgcatacacataaatatatccaagttttctgacccctttgaattccagttaccacctacttgggagaggtcagagcagagagggtttaggaccatgacacaccaaagagtgaggccagagaaacaaggaatagatggaatgtaggaaataagcgatgggtttgagggtcaagggggaaggggtccagatggagcactaccaggagagccatagagtaagaagtccagagacgaagggcacaggtcataaagtacagacacgggaggtgggaagggaacatggcagactggagggtgtctcaggaagaaacaaagccccttcgacccctacctcggccagtcaatggtgtatgacatagccatctcactgttaggagctagtcagtgtggaatcagtagacaggaagtctaggaatgggaggtcacatgccagtcctcttccttgaatacagccatgattatgttgagcaacgggccacaaagagctccgagtccccagggtgtgtgtgtgtgtgtgtgtgtgtgtgtgtgtgtgtgtatgtacattcggtagctgattccttccttagcaatgctggaaattgaactcatgccacaggcctttgtggctagcactctcacccaccgagccttctcatgggccttttatttggttttgtttgtgacaaaatgtcatagactggctttgaactccatatacagctgagagtgaccgtgaattcctgatctgcctgcctctgcctcccacgtgctaggattgtaatatagagcatcaggccctgctccatcagccttgttccttccttgtatcaatcactcctgcatctttctcttttcctttcttcccattcctacccagaatcctgactgtcccaggctcaagattctaggatgtgaagatcttcaatctgttccatcgcaatgaatatgtgtcttgataactgctgtccctaccaggggctcacccacccctccctcccctgcctctgttgctgactcaaaccaacagggacagggactttccccatgctgagtgctctctaaggaagacagcctggggtctcactcctgccccgtgattatttcctggggtctaatctccactcctgctgcaatgatgacacggcctcttccctgagactccaaggctcaaagagtggagttctgtttgggagcagaacagaaacaggcagaatttcagtaccacagccaggtcttcctgagtctgcgtccctcccagaggcagagccagagctctggaggcaggcaggcaggcgaggctcccactcctcagagcttcttcctcctggtgattcatccccttcccccatccccggcttgttttctttgcgttcttttatttcctctcctttctccagtcccagactgtgggggtggtgggggcagcaagagggggtttcgagtggctggctggctggcttgctttcttggctttgcaaaacctgtctctccctcgcccacctgagttttagagtcaccagtttttcagttctgatatcaggtatgtcagtagaaaattccatgagggcttgcctggttggggacatgcccagcaggtaaatcagtggttcctgtccctgtggtggcacccaccacctgggtttccagcagaaactggaggaactgagaactaaggaatatgggaggctgatgacaggttgtggcacataggggaccactggctggagctgtggtctcagtgaatagagaaggggcctaagctgagagatgcattttctttctcatccagccattcactcactgatgcaaagaaaggcccaacaaggggcaacctagcccataccctcaaggagctgtggacttccagaggagccctgggtcaggagctctgctggggtgcatgggtcatgtgatcttggctctagagaagtagataaagggtgcatgggccagccaggaccactgagggaagccaggcccaaggaatggtatctgtctgtcggtttatctatctctctacctatctacctatctatgtatcatctatgtctcatctgtctgtctgtctgtctatatctttgtacgaggcatgagtcctggtttattcctcacctagcctatcattacccttgtttcacacttgatcattttgcagccaatgaccttgctctatccgctctcttttagtatacttaggtatctcatcctccaaggggatacagcttaatgattgaggactctgactccagttaccaaaacctgaatgtaaactccttgcttgccttttcctggctgtatagactcggtctaatcactctctaggcctcagtttttgtttttttttaatctgtaaaatggggacaatactaacagaccctactttacagaattgttctgatgattaaaagtatatgtaaagagtcctcaggacaatggaatggtactgcaggaccttgccttgcaatcttggcgacttgaattcaatctccagaacccatgagaaggtaaaaggaaaaaacagatttcacagagttgtcccctgacttccacatgtaagctgtggcatttgtgcccacatgtatatatagcatgcacacatgtagtataataattcataaattatttttttaaaggaagctgagtgtggtggttccataatcccagcacatgggaggctgaagcaggaagatcttgcatttcaggccagcctgagtacgcagtgagaccctgtttaaaagaagggctgggaggcagtggggcagctcagtggggaaaggcattgctgtcaagtttgataacctgagtgcaatgcccaggcctcacatggaagaaggagagcaccaatcctagaagctgtcctctgacctccacacattcaccgtggtgtgtggctcatgtgcaggcataattaataagtgaattaatttagccaggcggtggtggcgcacacctttagtcccagcactcgggaggcagaggcaggcggatttctaagttcgaggccagcctggtctacaaagtgagtgccaggacagccagggctacacagagaaaccctgtctcaaaaaaaaaaaaaaaaatttagttgaggctgggggaatagctgtcctttcactctgctccctttgtgcccatgggctggtgggcagtgacccctgaggaaaggggagacccacacatgagaccttggattgtgtcccacagcacagcacaaaacacacacacacacactgtaaagcctggcatacactaaaaattcaggcagtgtctacatcttttgttattcttccttcttactcagtatcagctggaaagcaggaaaagaggaacagaagagagccctagcatgcctctgcctaaaccattccttccctgaaactggggcttctggagtgagaccctcctgggctgtagcccctctccgttccaaccacttcctctctgtggctaggcacctggtcaggacccagggcccagctctggatatagttaaaatgcactatcaatgaatcttgcagctgtgagcagcgtgagattagaggaggttgggggcagaagtggcttgcttctaccgtatttctcctccctggaggctctaaggtgctccttgaagagcgtttcagggcagaagcaatccaaaggagagtcacttttgctttccagggctgcaacataattatagtttttacatcacatccgtagggaagatgcagagataaactcagtgagctgacctgtataaggaatgggtttgggaagtgattatcaaacctaccttgacatcttgggaggagcagcctggcacaaaagcagccagagactaaaatgtttttatgccaagcatagtctgaaggcaaagaatcactgtcctggagtgcattataagtgtggactttccgagccctgccttgggctgcttgaacaaagatcttcatggtggtggtggtgttgttgttgttgttgttgttgttgttgttgttgttgttttgttcctatattttaacaagacctccaggttctctttttttgaaagacaaaagactagagttgctagctgggtgcctcctgcaccaggcatttctgcttttgtaagaataaagatagaggggtttttttttttttttttccttctttcagtttttagagacagagtttctctgtatagccctggctgtcctggaactcactttgtagaccaggctggcctcgaactcagaaatcctcctgcctctgcctcccgagtgctgggattaaaggtgtatgccaccactgcccggctggttgtcatttttaaaacagggtctcaaactatacgccaggctggcctgaaactcatggcaacccacctgccccagctttctgaatgttgagatttcccagcttgagggttttctttgtgatacccttcaggagaaaggcacaatgagggaacagtaagacacaaaaatcctaagaaagaagcagtttggctgctgtgggagccatggggcttgggctgacctgaaggctcctgacctttgattggctccagttcctggcaccgttgggccctgagatggtaagttcctggcagactaggctcccaggcaacagtttgagtaatcctgtgattactcagcaccccctccccaagcggggttcccatcacctgctgttcagggtctgagtcttgaagctttgctgtggaagatgtttctccgctcctctcatgctgacttccctaccagcccttcccctccttccttccccaagtgtctgtctctctctgactttgtttgtctgtctctgtttgtctctatcttcccaccacacacacacacacacacacacacacacacacacacacacacacaccccactggtactttctttgatatttaagtgtttagggtggatggtactgaacagggtgaaggtgtaggggacggagaactagagaaagtcaagaagtttggtcatgtggaggattgggcacaggaccagaacaagcaggggtttcccacgatttcagttgtctctcctttgctataactattttcccccagtcctgaatctctcagtctccccgtttcttgtgcttgtctcattgtagaccactgctttggattggcaatgggaagatagaagaggggctacgctggtagctagggtccagggctcccatagcccccaaactcccagttcttgactggtcatatctcctatgagatggcagggtcttacttacactgtggtaaggttcctgggttaggaccagcaatgggtcaggtatggggcaggaggtatgactggggtcatccatgcggtcagtgtacacacgcacacggatgtggctcttggagaagggaagaggtagggaggcctgtggttgcctgctaggccagggcctgagttcccaccgtggcttggcctaatctccctaccacttgcttttctgggtgacctatgttggtttccccctctctggtcttagggccactgaagagtgatataccacagagtacagaggagaaggtgttgggtaggagcaaaggctgtggacccaagtgttactgccaggctgccattcccatggatttgctttatctcagacagtaataccctgccctgtagtgctctgcctctccacggtgctccctgtactctcttgaatcatgccatgtgacctacaccacaggcaatgttgctttcaccgtcatttgctgccaagggaactgaggttgagagtgactggaagtgtgtgtgcccccacattttccacctctcttccaggcactcaggtcccctcctgttctctcttccccaccaagcatttaacccagcttgtaacttacaggaagccattgaacagagcatttgatacctggtggctggagcttactgtgcagttggcaggtagaaagtatgtctggaggtaggacaaagaactgagttttaatggaaggatttcaggcactcatatggccaatcccttaaagagacagctacttaatctgacccagctctgggctggcttgagaaggtcatagtttaaggatgatggaatactttgggaagtgatgggcaaatcatggtctaaccattccatatcagcagacctatgtgtggttatagattttggacatctcacatagccctggttagccttgaactcatgatgtagccaaggacaatatagaactcttgattgtcttgcttctacctcttaaatgctggaattacagagacgtagcagctctcatatgacagatgctaggcacaggctggacatgagatcctatgtgagtttgctctccatgaggcacttcctctgtccctagggtgggagacaggtcacagatgagatgggactgttactctagatctcttttctagcctgcttcaactctcgactatccactcaggaaaatccagaagtcagtcagtgattgggagaagagccagctcccccactcccaccctacccctttcgccccctagtctttggacttgttgatgaaaagatctggggtggctggaaccccaagctttacctagctgctgtcccttctccctcccaggtccccaaagaactgcagattgaacctggggcttcatgcatgctgctttaccacagagctaagtcctagctctttttcagttttttgtttgtttgtttgtttgtttgtttttcaagacaggctttctctgtgtagccctggctatcctggaactcaatttgcagaccaggctggccacaaactcactgagatccatctacctctgcctcctgactggtgagataaaaggtatgtgccaccactgttgccttggactttagtgtccaggaatcaagctctaaccaacaaatgtgtgtatgtgcactggtatagacaatataccgccaatccacaggccacagagaccaacctaccttcttttctccttccttccttccttccttccttccttccttccttccttccttccttccttcttcttgagcagtcctggctagcctggatcttgatatgtagatcaggcaagtcttgaactcaaagtaatctacctacctctgcctggctagtcctaggattaaaggctggcctcaaactgacatcatttcaacaagccacatatacttttcttctgtgcacacacacacacacacactcaagtatgcctccaaacatgtcaagaagataacagataatgaactgttcaagagagtggggttgtagacctggcactcaaagaaactagctgtgtgagcctgtgctaggtagttaggtcttcatctgtgagaagaacaggtggatggagtgtgctttaatctcagccagttttaacagtcgtgtcctgtgctcatacacatagacccagatgcctttgtacatcctcttacacacttacacagagcattgcctcgtcttggttctggggtcatcagtctagaaatcttatttgggctttaagacaatcagcaaagttgggttgagcccttctctagatttcatctgtttctttctagtctctctgtacctgctgtgttggttcccctcagttcctgtccctgtgtagccttcactttcctccaagagtgactaacatctctgtctagtgctcagtggctgtgccccatactctgttctgggagccaaacttcaatggggggaaggagacaaaatagaagccccctgggcgggaagcaggtgttacgaagcagtaaggcctcctctggccctatacaggatgagaggagggcactgaagatgttcaacttgaaggactgagcaggtggcctctttgcagctgctctctgtctccataaaagctgatacaactcccagctgctttgtgaacaaaacacagcctcctcagaccctatgctgagaatcatttacactttacttccccttccataatgcaagagggcgtgttggagctcactgaagaagtggggggagcaccatacacctgcgtctgcagcccaggctcatggtagtgaaatccagaaaaaaacattatgggctagcttctctttctctcttccagcacaaattgaagtgatcccttgcaagatctgtggggacaagtcatctgggatccactacggggttatcacctgtgaggggtgcaaggtgagttgtacatatttgtctgcatacatgcacttggctgtttcagcggtctccccagggtcaggaacaggagggaggaggaggacctaatctcgatgtaggaatgtgatcacagggtccatcacaattatacagtggaggttcggggactttggtggatgtagaaattcttgagaccagtgcacatgaattggaggtccctgggaccacctcaaactccgagagggtgggataagtccagaaaacctttaccagcatcatcttagtactcttgtcccttcttcctctaatgagttctcttcattcttctttctcctggcctagttcctatccagttcccacactgttacctcctgccttgtttagctccatctccctcctgagtaactatccttaggcataggattgtggcaaggaacaccgtctgggttggcttgagaatgacccagaaggtgggggatcgagtgtggtgttcctcgagccgtatccacctcccttcacccacctcctcacccaccgtcttcaccacaggaggagccctgggtggagtggggggcatgaggtgaggaagacccagaaggagcctgtcagcacttttcagtgctcaaaataacaaagccaaagcgaaaggaaacatgcaggggtgcaaaggggcaggcggggcgaagggctgtgcccccacacctgggaggggttgggggagtgaaaaggcaggaaagagagagcagaagaggatgttcagaagcaagccaccagagcctgggttgggctgtggtgagtatctaggtcaccagggagcctgcaggcctgaccacagggaaacctgtgttcgcagcccttctcttcctccagccctcccagacaggcaagctgaccccaatacagcctgaggccccttactcaacccccacctcagccctagtctcaggagactcgactccccggcccaagcccattgcttgagttctgcactattagcatctagtctagagctgaaagcattttgctggggagatggaaatgctggtggaaccgatcctaaagagagcagagccaggcatgaaaggagcctggagcctaagctccccaaaagaaagctcatagacagagctggggaaatggagcatggagtcagattcatgtgcctgttgccctgtcctgtcttgtcttctcttacctcctgtactgattcctgaaccttcttcagctgtcaagtttggccgaatgtccaagaagcagagggacagtctacatgcagaagtgcagaaacaactgcaacagcagcagcaacaggaacaagtggccaagactcctccagctgggagccgcggagcagacacacttacatacactttagggctctcagatgggcagctaccactgggcgcctcacctgacctacccgaggcctctgcttgtccccctggcctcctgagagcctcaggctctggcccaccatattccaataccttggccaaaacagaggtccagggggcctcctgccaccttgagtatagtccagaacgaggcaaagctgaaggcagagacagcatctatagcactgacggccaacttactcttggaagatgtggacttcgttttgaggaaaccaggcatcctgaacttggggaaccagaacagggtccagacagccactgcattcccagtttctgcagtgccccagaggtaccatatgcctctctgacagacataggtgagcatctgggaagggtgggggcagtgaaaatgagacaagaacttcctccagcacggtgcccatgtaatcaagcattagtcctaaggaattagggatcctggacaaaaagccaagggaggaggcagagcaagggaggccaggcagagggcctctttatgaactttggggtgggaactggctgatatctagctgtgacttcatcttctggccccagagtacctggtacagaatgtctgcaagtccttccgagagacatgccagctgcgactggaggaccttctacggcagcgcaccaacctcttttcacgggaggaggtgaccagctaccagaggaaggtaagggcaagagacatgagggaagggagggcaccaccacacgcgggtgcggtgcgggcgcgcgcgcgcgcacacacacacacacactggtagagcccagatatggcgtctttcacaggaatgggggtagcaatagggtatcacaggctggctaacaggtgtgactgtctgtatccaggcagcaagatgactatttctgtagctcctgcttattgagatttcacctagttagcaacctacatcctcttccacccagaccttgccacactgcctttcatcctccatcagtaactgatgctaatcagtatctgagggtcatttactggacaccctttcctgtcaggcattgtaatagaagctttgaattgtgttcaacctgctgtttgtgaactacaagtgtctaaagatagtgataaatgtggcccaatgcaaaatcatgagaatgtttttggttggttgattggttggttggttggttggttggttggttgttggttggatgttgttggttatttggttgtggttggttgttggttgttggttggttggttggttggttggttggttgattggttgttggttagtttggctggttccaagacaaggttttgctgtgtagccctggctgtacctggaacttacttggtagaccaggctggctggacagggtctctcatagtctagcccggcctatgagtgacctaggtctgctgagtcccaagagatgatttgcctatctccacatctcaaatgttgagattataaacatgtactaccttgtctggcctctctctccctctctctctctctctctctctctctctctctctctctctctctctctctccttccctccctccctccttccttttccttttccttttccttttccttcttcttctttcttgtttttttttttcttttgggtttttgagacagggtttctctgtgtatccctggctgtcctgaaacttactctgtagaccaagctggccttaaacttagagatctgcttgtctctgcctcccaaatactgagatcaaagtcttgtgccaccacatccagttttcacctggttttctttccgtgggttctgggatctgcattcaggccttcatgcctgaaggccagcacgttgttgaccttcatggtacttttggtaaatgtgaggtcagaagctggggtagactgataaagcagaagagtagcagaaggcagcctggaaaccgctggaggaagagcagttaggaaggctttcagtgccgtatgaagagtgaaagcctcacttctaggcaatgctgtactcagagctgcttagggaatttccttctgacctgtgtgaaggatccatctatgtaaccgttcgctcaggcccttgttattcacagtcatcacaggagtcctgagatacagaaatcacttcaaacagtctctccctgaggaatgtaaactttaatctacaacaaaatggatttaaagaaggtctgggaaagcagttggaatacaaatgtggttggatccactttggtgccttttgttctgggtttttgaggcagtttcatgaagccaaaggtagccttaaactcatgatcctcctgcctccagctcctaagtgctgagatcacagccatgtaccactttgcccggcagaatccactttcaaaatatatcacgtgtcccatgatgtgccccccccccatccagctatcagccacaattggactattatactcctaactcaatcccaccccatctttgtctgccacgtcagagccacacagcacttgctcagtaaccaccctggtcattttaaggagacaagacaaaacctgcctcttttgatctccagcctcctattttagccaaaatccaactccagagtccatgttacagtcaaatggaccaccctgccttcctcctcacctgacgttgcaccatcctttgactcccctactctgaccacagtattttttcactggtcccatctctctggggcctcttatacctgctattgtctcctgtcatattctcttccctgtttccaagtattttctccaggccttcattcaagagaggttttccttaaacagttaccggactggagaaggaccccatcccttatcctgctttagtatcagatacaatcatatgctgcttactaacaggaatatgttctaagaaatgcttacccatagcttcacatggtggggtacaactggatatacttaatacaaacaaacacagctgtactgtcgtccatactcccttagccttatgggaccactgaagtttgaggttcataattccccgaaaagttgttaggcggtacgtaactgtgtttatgactccctggctgctgtgcacatttaataaaagcacatctttttattcaccgatgttacaccagagctcatgacagtgcctcatctagatttatggagtttctcaacaaatatcttttgaatgaataaaagaaactattgtagtaacccaggcaaactcaaagtactaaaacacaaaataaattcaagaggcgtaagggactcactctgctacctacttttctgattgttactttttctaaggaactaagctaagaaggggagatgtcaagaaagagtggtttttaagtctcagttcattatgctgtaaattgcgtaggagagatggtgcctggggtctttctccctgcctctgtcccctgggcttctgcacctttcttagaggtttaccttcctttggctggaggcttactatactgacttactacctgctgagttaggcaccttcctagaaactgtttagttaaaacaagcaggtgatgaacatgaattcagcattcatgccagggacagaagatacatagtggcaaaaagacagatggactttatctaagtacatgtggggcaggaaggcagacagactggatccttttttctacagtgtggcaaatgctacacaaagggaagccaacaggacttttgcccagcaagggatggggatgatattctcagaggagataacacttgaattagcaaaataagagttagcagagcctcaccctccagatgaagaaacaacatgaaccaaggcaaagggccatgggagcaaacacaattcattctggggtaggcagagccattgatgccatcattcaagcatgtccttgctccaagcacagtcctgaaggtacagaaatgaccatcaaaattgaacctaggaaaagctcacctgtctcgtgtcagttctaacttagcctgaggtttccagatatgcatacatctaacaaatgggattggctgctcaagttgggtcaagggtcggggaggcatcaagaagggtcatcctagctcagtaacagtgagatgtgtttgctctgctaagcaccgaagtactcattccctcctaacctatcctcagctgccacccaaaggaaaactccggagcctgtgcagccaacatgtggaaaagctgcagatcttccagcacctccaccccatcgtggtccaagccgccttccctccactctataaggaactcttcagcactgatgttgaatcccctgaggggctgtcaaagtgatctggaggaaggacaacctgaggttttaattcatacaggacaccagaattcatcccagctccagctgtcctctgtccctaagagaagcagaggaccggatactaaccagccggaaaacccaaggaccagcacccgggaagatgcccttgacttcagtctttacgctatgaggaaggaaggcagcgccatcccctgctctgtacctgtgtgctgctgactccacatgatggagagactaggaacaggacagggacctgtttctcctccatagtcttgctcagaatttctctcagttttgtaaagctgcagactctcctaggaggtataagcagcagatgagagggagggaggttttttttttttttttttttttttttctctcagaggaagggtttagccaagtaaacataaatcccaacttgtgccattctttataaaacgatttcaaaggctggaagtgtatcgtgcctgcgtgcttgtacaagggtgcagggcacacatgtcgggtgttgggagacttgaatgtgactgcctaggatacatgcttgccctgcagttttgtttctgtgtcaagccagcaatttatctgttttataagaattttagcacacacacatacacacacacaccgcccaagattctccctcagctaagcaatccaccagggagactggtgctcagatacctgacacaagagaaatggcaagctaaactgaaggaaggtattctagactaagaacttccaacaaatgatacccacaggcccgtttagatttagaaattgcacagaattgccctgcatctaaaagactagaggctgtggaagcggtgtcccgggagctctctagctccccaggaggaaccaggatgtcaaaactctctcaagcttcccaggctgtctccgtagcagaccctgccccagccctgggtcccctcttcagttcctcccccgattcgattcgtcatcccgtagtggcgcttgctgcagccctccctggttgctttatttatttattttgcaccaacagggttgctgcagactcattctggtttaaaaagagagaagaggagggaaaaaaaaaaaaaaagaaaaaaatgcttcctggctcttttctctcctttggtcttggcagcgcgaccgcagtagcggcggcagcaacagcagtcttgccagccggctgatgcggcaggctgccgggcagtggggagtggggactcagacacacggggaaggtggagaggccaaggtgcagctcggatgggacaggccccagccctggagagatgcagcgcccaacttgatgccaccccccagcttctccggtaagtgcccctgcccctctgtgggcacgtctcagctgccctttcccatggcattctcaaagacaaggccatgttaaatagcctacaggaaagagagcttcccctctaccctagctgaccattcatcctgtgattggaaaactaaaatgtcccaggtacccctggtagggagagtccaaggagccccccccccccgctttttttagcctctaaaaagctgccctcctaatctgtgtggatactccaaaaatctctctcctaagtgccccttcaccatgcaggtccccatgcctcaatctggcatgctttaaagtggatatgtgctcgaatgaatctgtggctgccacatagacaagaaagctccatctccctgagggggcagtgccccagactctagaccccaggggaagagaaagagtt

SEQ ID NO: 1584 - DNA, 2893 bp, Mus musculus
gacgggccaggtgctccctccctcttccctcctccctcccttgggccctgctccctgccctcctgggcagccagggcagcaaggacggcaccaagggagctaccccatggacagggccccacagagacaccaccggacatctcgggagctgctggctgcaaagaagacccacacctcacaaattgaagtgatcccttgcaagatctgtggggacaagtcatctgggatccactacggggttatcacctgtgaggggtgcaagggcttcttccgccgcagccagcagtgtaatgtggcctactcctgcacgcgtcagcagaactgccccattgaccgaaccagccgcaaccgatgccagcattgccgcctgcagaagtgcctggctctgggcatgtcccgagatgctgtcaagtttggccgaatgtccaagaagcagagggacagtctacatgcagaagtgcagaaacaactgcaacagcagcagcaacaggaacaagtggccaagactcctccagctgggagccgcggagcagacacacttacatacactttagggctctcagatgggcagctaccactgggcgcctcacctgacctacccgaggcctctgcttgtccccctggcctcctgagagcctcaggctctggcccaccatattccaataccttggccaaaacagaggtccagggggcctcctgccaccttgagtatagtccagaacgaggcaaagctgaaggcagagacagcatctatagcactgacggccaacttactcttggaagatgtggacttcgttttgaggaaaccaggcatcctgaacttggggaaccagaacagggtccagacagccactgcattcccagtttctgcagtgccccagaggtaccatatgcctctctgacagacatagagtacctggtacagaatgtctgcaagtccttccgagagacatgccagctgcgactggaggaccttctacggcagcgcaccaacctcttttcacgggaggaggtgaccagctaccagaggaagtcaatgtgggagatgtgggagcgctgtgcccaccacctcactgaggccattcagtatgtggtggagtttgccaagcggctttcaggcttcatggagctctgccagaatgaccagatcatactactgacagcaggagcaatggaagtcgtcctagtcagaatgtgcagggcctacaatgccaacaaccacacagtcttttttgaaggcaaatacggtggtgtggagctgtttcgagccttgggctgcagcgagctcatcagctccatatttgacttttcccacttcctcagcgccctgtgtttttctgaggatgagattgccctctacacggccctggttctcatcaatgccaaccgtcctgggctccaagagaagaggagagtggaacatctgcaatacaatttggaactggctttccatcatcatctctgcaagactcatcgacaaggcctcctagccaagctgccacccaaaggaaaactccggagcctgtgcagccaacatgtggaaaagctgcagatcttccagcacctccaccccatcgtggtccaagccgccttcccgccactctataaggaactcttcagcactgatgttgaatcccctgaggggctgtcaaagtgatctggaggaaggacaactttctatttccttcagccctctgacccgtctccctggactcccttcacccagcctttccctttctgcactctatgaagggtggtatccctaggagtaagcaaatcctaagactgattttctgcccctaggcttgccttgtaggacaacagcagcaagtgatggagaaaaggcttgttatgtttgatttcccataagttccaccctggcttctggaagctgtggggtagatgggatagagataggatgaccaagtcaaataaaaaacagactgacaatcagcagggataaatccaggtacctgggataaggagaactcaaatctaggcttgaaagctaataacagtcctttcaatacctcattgtatttccccatgggtcctcctggggggacatggatctagctcagagactggtggcaagcccccagaaggacctgtatataataagaatatagattcctgagacttttctgcctttcttcttcctagttaagaaatgttgttgaccccctctgcctgttttctgggacctaaaatgcctggatgtgtaaagaatgagggtggggtggagataaggtcccaagataactgttttatggggtttgggtatgaagaaaaacatcactggaaaaattagaatggaaacctctttgcacactttaaaagtgtcagattcgttagcagtctaatcagagacacacatccacacaggtggagcacacagaggctctgcccccagtgacaccattctgtagactttccctctggcacacaatctcttccttgaggttgcagctctgagaagcctgaggttctaattcatacaggacaccagaattcatcccagctccagctgtcctctgtccctaagagaagcagaggaccggatactaaccagccggaaaacccaaggaccagcacccgggaagatgcccttgacttcagtctctacgctatgaggaaggaaggcagcgccatcccctgctctgtacctgtgtgctgctgactccacatgatggagagactaggaacaggacagggacctgtttctcctccatagtcttgctcagaatttctctcagttttgtaaagctgcagactctcctaggaggtataagcagcagatgagagggagggaggttttttttttttttttttttttttttctctcagaggaagggtttagccaagtaaacataaatcccaacttgtgccattc

SEQ ID NO: 1585 - DNA, 1551 bp, Mus musculus
atggacagggccccacagagacaccaccggacatctcgggagctgctggctgcaaagaagacccacacctcacaaattgaagtgatcccttgcaagatctgtggggacaagtcatctgggatccactacggggttatcacctgtgaggggtgcaagggcttcttccgccgcagccagcagtgtaatgtggcctactcctgcacgcgtcagcagaactgccccattgaccgaaccagccgcaaccgatgccagcattgccgcctgcagaagtgcctggctctgggcatgtcccgagatgctgtcaagtttggccgaatgtccaagaagcagagggacagtctacatgcagaagtgcagaaacaactgcaacagcagcagcaacaggaacaagtggccaagactcctccagctgggagccgcggagcagacacacttacatacactttagggctctcagatgggcagctaccactgggcgcctcacctgacctacccgaggcctctgcttgtccccctggcctcctgagagcctcaggctctggcccaccatattccaataccttggccaaaacagaggtccagggggcctcctgccaccttgagtatagtccagaacgaggcaaagctgaaggcagagacagcatctatagcactgacggccaacttactcttggaagatgtggacttcgttttgaggaaaccaggcatcctgaacttggggaaccagaacagggtccagacagccactgcattcccagtttctgcagtgccccagaggtaccatatgcctctctgacagacatagagtacctggtacagaatgtctgcaagtccttccgagagacatgccagctgcgactggaggaccttctacggcagcgcaccaacctcttttcacgggaggaggtgaccagctaccagaggaagtcaatgtgggagatgtgggagcgctgtgcccaccacctcactgaggccattcagtatgtggtggagtttgccaagcggctttcaggcttcatggagctctgccagaatgaccagatcatactactgacagcaggagcaatggaagtcgtcctagtcagaatgtgcagggcctacaatgccaacaaccacacagtcttttttgaaggcaaatacggtggtgtggagctgtttcgagccttgggctgcagcgagctcatcagctccatatttgacttttcccacttcctcagcgccctgtgtttttctgaggatgagattgccctctacacggccctggttctcatcaatgccaaccgtcctgggctccaagagaagaggagagtggaacatctgcaatacaatttggaactggctttccatcatcatctctgcaagactcatcgacaaggcctcctagccaagctgccacccaaaggaaaactccggagcctgtgcagccaacatgtggaaaagctgcagatcttccagcacctccaccccatcgtggtccaagccgccttcccgccactctataaggaactcttcagcactgatgttgaatcccctgaggggctgtcaaagtga

SEQ ID NO: 1586 - DNA, 44577 bp, Homo sapiens
cttctggacttcttattatggaagtcaagtgtccatattgttaagtcagactgagttgggttttctgttttctcacacttttagcggatgtcagcctaaatgatgcccacgtgttatctttaatcctcataccaactctgagagttttattctttctgttttccagatggaaaaggtaagccccaaagagattaagttacatgctagaggtcacacagctagtcagtcgcagaatccagattcccagcccatctgactgatgacaaagcaatgaatactgcagcactccaagaacatggaccctccccagaaacaacaccagggctgagctgagtcagaagccacatgaatggaaggtctggaggccaccagggatcgccacagaagaaacacttgctttgttaaaatcttcaagtattagatgacacaataatcattgcattcactggtttgtttcatcttttttcctgcatttcaggatttgtcttattgttgtttgcatgtttattgtctgtctctccccttagacagctctctattctatgtatccccctagcacagtgcctggtgcattttaggcacttcaatgaatggatgaacaaattgattcaagtataattttgcttactacttcactcatcaaatacatcctgactgagtacctgctttgcaccaagcactgtttttaagattcttagtctagtaagagaggtggacattaaacaaataaccacataaatagagggggaaaaactgtaatcaatgctataaaggaaaagtatgaggtactatgaaagtgtacagcaggtgcccctaatttagatgggagggtgtcagtgagggcctccagagctgaagcatgaaggagaagagtggtcctaggggaggaactagccttgcttcctttcagagactgaaggatggtaggtgtgtctagactgcaactgatggtctcatcttgtctgtggtggcctgtgcttcctaagatctgtcagggatggaggacataggccagcttgatcctgactgttggatccagctttatcttcagtgtttctaagtccagaaatcctgagtctggccacttttcctttagccacaataattcagagaactattagccagaataatgcagacaactgatcactgcaagtcactctgccttggagctattggaatggctccagaacagggcactgggggccaaggcaggatttcaaccaggagggttttacagaagatggacttcacctgtgagggctggggttggaaccgagcaccaaagaagtggccactgtccactgatggccgtctccctcttctctgtagccctcccccacccctaagcagcccagcttcagcagaggaggcctgggcacaggaatggattgttgctagaaacctggcttcagctggaggaagtcagaagaccgggctgatggccgcgcagacagagctgtgtttatccaggaaaagaggtaggacgtaggcagcggaggcccctgccagctcctcccataaggactgcgctgggggagcaagctgcagagaaagctgctcccctctggctctgaaagtgtcagggcctgaggccagaacccaaaagcgacccacaggtgaggccagcactccgggcgcgcgacggagagggtcgctagctcggatcccagggcagagggtcggaacacggtgctcttggtggctccgcgcaggggtgaggcgagcgcgtggtggcggagccttccggagaccgctctgagggtggcggagaatcaatgctgcctttgtgctcggtggtttccgagggagaaaaggagtggagagtaggaggggcgacccaacggcccggccccgccctgcagacgcgggatgcggtagggctgggaggcgcgggagctggacggtcagggctactgggggtgggattctgtgtccccgggaggtgcgtctccttggaccagcccagggtgtcctgaggtcagcagccaggtgtgtcccctggctgccaggagcagaagtgagtcctcttctggcttggagcgactcgaggaggggaaggaggagccagaggaggcaggtggggctaggactgagggatggctcaggccagagaagcttgagccggggcagcctggcaaagggaggaagtcccaaggggcgccagactggatcccagaggaaaacccaagtcttcgaaatgggcgggggaggagggcgtgagcccgcctagggcgcagtgtcccaggggggttgggatctgagtccttttgctataatgcggttattatcctatttgtcctaatagtaccctagggttctggtggatactatatgggccctctaactgtaaggtgaatggggcatctttagtaccagtgggagaatctgtgtacttggtgacggaggcccgtatatgaaaatgtgactgactggccctttgctccctccatttctccccagccccccagactgcgccgccctttctttttctgctcaaataggggtccgcgctcccagtgggtccggagaccggggcgcggtggctgaccgcccggtgtacgccagcatcactcacctctgactcctctgcgctcctcgcccagccccgctccgccgagcactcccatctgagacgggatttggaccctctcggccctgcggaattcggaattccattaccccacccaccgcatgtggctcttggaaaaagctggctataaggtgggggccgcggatcctgcggcccgttgggcgccttccggcctgttctccaagcgtcgcgccccgggcccgcccacaagcgcctgccccaacgtcctcaccccggatcgcatcccgcagttcttcatcccgcctcggctcccggacccgggcggcgcattgcccgcggcccggcggcacgtggcggggcgcggcactccccgcgacctgttcgctgcctcacctggcgggccgcgaatgctgggccttcctgcccgagagcccgcacacgcgccggcgggaatccctgttccacgggccgccacctgccccggccgggggactccccgcggcgcagtcccggctgcacgtctccgccccggacctgcgcctctgccgggcccccgacagcgacacggcctcgtcgccggactcgtcgcccttcggctccccgcggccaggcctgggccggcgccgggtgtccaggcctcactctctgtccccagaaaaagcgagctcggccgataccagcccgcactcgccgcgccgcgccgggccgcccacgccgccgctcttccacctggacttcctgtgctgccagctgcggcccacgcgcgagagcgtgctgcgcctggggccccgcggcgggcagctgcggctctccaccgaatatcaggccgggcccgggcggctgcggctgcgcctagtgagcgccgagggcctgccccggccgcggtcccgccccgggagcggcggcggacgaggatttttttttcgacgggctcggccccccggacctggccgcccgcagcctgagagccaaggtgctagacaggggcgcgggacttcgcagggatgtgctgctgggggagtgcgagacgcccctcattgcgctgctgcccccgctgggtgggggactaggtcccgggtcatccctggcgcccacccatctcagcctgtagcctgagcccctggcttcctcaggacgtctccactgtgtctgcagtccacattctttccaccctgcccggcttgtatttatttttgctaataaaatgtccccttgtccttagccagatatttccccttactggcaccttacacgctcgggcatagagcctaccgatcttccctctatcccggccatacgcggggggaagatgctcattcagacggtctgagtagagcagaccttaagcagtggttctcaagcttgaaggagcatcagaataaccagacatcagaaatcctggaagagctttttaaatatgcagggtcctgggctccatccccatgagatgctccttcagtagatctgggccaagtaggtcctaaggtccccggccaacaaggcccccgaacaatcagggagccctgcaatcactgagtcactctgacagaaaccaacacaagccaccttccacttgaggctgcacagaggaaattaacactcccttcctgtgcccctctaaaacccacatctgtcctgaagacagatgaaatttctggctcttgagagtgagtcaggggatgtcagatgaacacagagtgccctttagtcttccttcttccctcttgcctcttccacacctgtgcgtcccttgaggggtggggcaagtctggagccaagaaccagagaggtgcttgggtaccaaatgaatgagatataatgtcccagggattgaaaggggggaggtggggtactaccaaagtgtgagaactgttctcaggaatgccagaagagcctcctccagccagaaggaggtgggggtggggggaggtggataattgtaggtcacattgtgtttacctctacctgaatgtccctgacgtcagcagtgaccttcttctctctccctccaccttcccaggagccggttcctctggactcaggccaggcttggaggagggagggaggaagtgaggtaggcactaggctaacccaacttctttctccctctcccttgggccctttctcatttttcatggtgccagctgtggcctgcaccagggctaagcttgcgggatctgacaaaacctcaaaagcctcagcacctggacacgttaaattccaacacacacacacacacacacacacacacagagacacacacacagagacacacacacacacacacacacacacacacacacacacacacacacggcttcattcagacagctctccagttccttctcccttccctgattgggtccgcaccacccagccctaggccagagaactcttgctccaggtgtccaccaggtggtggcattgaccaaacaatcctaagtgctaactactacacatggattataaccacatgaggaactgttccaacaattagtcaagccatttattcctcccagcaccttctattagggtgtaaatactattattatccaatgggatcttgggcctcgcatagctagtaaagggaagaactaggactcacatagctagtaaagggaagaattcagggagtctggctccagagtctggactcttaatcacttcaagataataccccccactgccagctgctgcctcccaatcaagtcactctaaaaggggcctccttccctaagatggtagctctgcaaaggtttcgtaccctgccagtttaaaatcccatgtttgaattctgggaagtctacctatagatttaggtctacccctagtactggatttctatttcagcccccaaattctcccataacaacccttggtgagaaactggatttgatgcccatttgaaagtatctggaaagaaagttagaggccgtagaaccttcattcatgcattccttcaacaaatacttcgggaaggtccatcaggtggcaggcattggatacagcagtgattaaacagacatggggatcagaaaagtgataaaataagccattaaaatgtaaagaatgctacttggtgatatgttacagagaaaaataaagcaagaaagggaatagaaaagaggggtcagataaagagaagggaagattatagggacagaaagagggagggaggagaggaaactttttttttttaaccatagtactttggaccaggtcctgaactttatctgtgttatctcagttgatcatcacaaccactcagtagagtagatattagtattcctctttttttggggtggggggacggagtctcactctgttgcccaggctggagtgcggtggtgcgatctcgtctcactgcaatctccacctcccaggttcaagtgattctcctgcctcagcctcccgagtagctgccactacaggcgcgtgccaccacacccgctggttttttgtatttttagtagagacggggtttcaccgtgttagccaggatggtctcgatctcctgatttggtctcatgatctcggtctcggtctcatgatccacccacctcggcctcccaaagtgctgggattacaggcgtaagccaccgcgtcacaaccactcaggagagtaggtattattattcccactttacaaagaaagaaatggatcagatagataggttaagtaagcttgcctggggaacagccctggctggagggaaaggttctgacctgactccacccagacacccccactgccaccccaactgcttaggggaagctgtgaggaaatccaaggccactcctcccaggagcagttcactcagcattcacagccctgaggctctgtgatgggggccctagcattgctggaggaacatcctgggtagctaaagtacagaaacatgggagtgaggaggtcctaagaaaccctccagtgtgcagattgctctggccccaaagcacttctataaacactagtcagaggccaggtgtggtggctcacgactgtaatcctaacactttgataagtggataaatgtgggaggctgaggcgggcagattacctgagctcaggagtttgagaccagcctgggcaacatggtgaaaccccatctctacaaaaaatgcaaaaattagttgcatgtggtggcatgcacttgtagtcccaactacttggggggctgaagcaggaggacctcttgaacccaggaggtcaagcctgcagtaagctgagatcacgccactgcactccagcctgggtgacaaagtgagaccttgtctcaaaaacaaaacaaaacaaaaaaatccactagttaggacaggtattattgccccatttttactgatgtggtagctgagggctgagatttccctcagggcctacagctagtaaatggcagaccacattcttataagtgattctgccccagcatttaaacccttcttgccacctccaagcctgtgtgactataaatgttaattggtagaggagaggtacaagcagggtcactgtggaaagttcaaggccaggagctagggtcaaactcccactgttcctccacccacagtggcctttgtgacaagaagggggaggggtggggactgtgagatctggaggctaccgaaggttacagagcctgggctgtcctttttcaacggttgaggcacaacccatccctgagtcactccagtgggttgaggcgtccccaggcatggaaccccctagaacccaaagaaaagtggtccctaatcactggatcaggcatcccaaggagagggccctccaaggatggggctggggaagtgtgtgccaccgcagactacccaggctccacatattttccaccttgacccccaggccctccctgaaagggcagatttgtgctgagctttaagtggtttctgtggtttagggttggggaaggaaggaaagagatgctggggactgctccccagttccaagccaccaccaccacctcccatcccttccagagtgtttgcccccagcatggagatttccccaataaggggactgggcacgtggggatgaaatgattctctgatccctatcagccccttccttatataagattgtatttgaagaggaaataaccaccgccctgctttgaaaggacgattcttccagataaggggctgtgattgcagcaagagggagaaagtttagacaagagggggaacttcccaaaaggataaccaagggatcttcttgccctggggagaaaaaaaactcaaactatccatgcttagggcaggggagaggtagagaatgcctaggaagcatgtgacactcctaggcctagaggtcaggatactgtcttctaaatctccagtcacttcctccccaccctacatagtagcacaaagtggcacaactggggagtcagctgtgcctgcagtgtctggggatgctctgtgtccatccgcaagcattctacgtgacctccactctgtgcctgcaattggtgggttgtagaagaggtagtcacgaagggcccctgggagacccagagtcaagaggaagagaggcctaaaaaggagaaaagatagagaggggacagctggagaagagccacagacaggcaggagccagcaaagagagacagagagatgggggataactgaggagttctggggaggaggggagcagaacggcatctcccctgcactcccacgcccggcatgttgctggctcctcctgtcagctggagggtgctgggggggcgggggggaagggagctgcaaagcactttacctctcactccaaacctgcccaaggtgcagagcccccaaacagaccaacatcctgttctgtgcagagatgcatacatggatgcgtgggcccacatttaccaaaagaacacgggggataatcagagcctcagaggcataggcacatacccttagactcagtgcagaaggtccccaaaacttcccctcctctttctcactactcatccactgtcaatgaccctaggagttgaaaagtccttctccacttctacctttatctctcaatctgcagccatggggagactctgggagctacctaagaacagaggtgctgatggtagcagagtgtgaagctccagggttgggcaggagtggaggatggcgagacgagacggcagaagagggaagggacagctgcttgccctctccatgccaggtgccacgtgcaccaggtgggggggagtgggcgagtcacgaggctgtggcatggctgactcctgctctgctgtttaccagctgggaacgagagcaggaggaggtgccagggagcctcttgctgcagcctggcccctggccagttgcttgttgggtaaccaggagagtcaggcccagctaatcaaactctgggcccaggccatgcaggagaaaagcagcaccaggatccccagaagcctcgtcctcttggcccccttcagagccttcactgcaggcctcagtgtgggccactaggtctgggagcctctccttctcccaatgagtccagtgcagcatctctcctctcctcttccccaccatggcttctctgcctccaggcactcctccaggcctgccccttgccccaacagatgaggagcacgtagaagcatcagggggtcagggagtcctggcaagagcagcaagggttaggggcaggggccgagcaggcagaggcctcagggaactgaacagtcactgggaggagtctgactgcatcctagagaagagacacagtcccccaaacctgccctctccatctcccctatgcctgtcacctgtcttaggtagaaatcacaggattctaaagtcacaaagacttgggtccaaatcatagctcacccatttattgttcttgtgtgagtccttgggcaaaatcattaatatctctgagaatccctccactcactgatcaatctggaataataatgtttccctgtggtgggtgctgtgaatatttacacaaagtaaaagcatggatttacataaagtgtcctgcaaagggcccagcacacagtaagtgattaataaatgctagttcccttcctttctcctgtcctgtttctcctcaaggctccatgcactggtccactggtctctcctcatgtcccctcctggtgccaggacactctgccagccactccttttccctgcctgctggagggccaggtgctcccgccttccaccctccgccctcctccctcccctgggccctgctccctgccctcctgggcagccagggcagccaggacggcaccaagggagctgccccatggacagggccccacagagacagcaccgagcctcacggggtaagaggcccatggccctgcctgcaggtggaagagactgctggaggttcagaggagggcagaaatggcaagagactgggcaagaagtgaggaggggagggagggacaagagtgcagaggagaaagccctgggttggcagggagtgaaactggaggagaaacaggaggaggggctggggagatgacagaggagaagaaatcgcaaaaggagagaaacaggaaagaaagggagaagcgggagaaggaagaaacaggttggagggtagatggggagggaagagccaagtcaggggagccagatctagacccagcgaggggtcagaatgtggacaggccctcccaggtgtgggcttaccccccaggaggcacagggacactgcttccttgatctggccaggaccccagacagcagtggccgggaggctggctgctccacgttctgttcattcaccagtggagaaacctgtcctttaaggagtgacagacttggggagtgtggcagggggaaccacaccctgtcagctgcccatgaccacgtagcctggtcctttcctcgccactcacccagggatgtgggatttcatctctgcagagaatgtggggcactgggccatcagcagggaaggacagaatgtcaggccgtccttggccccacccatggtccaagtcaggaaccccctcagagcaggatcgcagggccacaggcttggtcagctgtgagcatggaggaggaaagtttgagggccagagccaccaagctccagggccacctggtggaggaagaactggctgcctgggtgagcaaggggagcacccccaccacaggactgctctgaggtgcaaggctagaggccaggagccggtgccacgtcagggaggaagctgggtggggccaggcaggagcaaggggaggtgggcggggctgggtggggccttgccacctcggggcagtcttttctcctccctcaccccagcagagcccaggccatcaggccactcgcctccacacagcctagtgaccacggcctgccagtggggagcatctcccgggcagaagggcactgtatgtgtgtgtgtgtgtgtgtgtgtgtgtgtgtgtgtgtgtgtgtgtgtgtgtgtatgtcaggtgtcaagactgaacagcagaaggaaaaaaataacagaatagagtcagaggttagggaagctatagggggtatagggcatggttgaagcagtcttttctcctccctcaccccagcagagcccaggccatcaggccactcgcctccacacagcttagtgaccacggcctgccagtggggagcatctcccgggcagaagggcactgtgtgtgtgtgtgtgtgtgtgtgtgtgtgtatgtcaggtgtcaagactgaacagcagaaggaaaaaaataacagaatagagtcagaggttagggaagctatagggggtatagggcatggttgaagggctttctgagacaaaagactggccatgtgttctgtgatgagctgctatgtggatgtaggaaatgggccaaggtctggcaggggaatcctctttccaggggctccctggctaggtgtttcatagatgttaactgcatgaatgggtgacacccccccacccaccaaccatgctccagctaaggccctcccctcaacggctgctccccctggaggtccgagtatccatgtgacccccatcgacccactcatgctccctactgcccaatctccacccagacccggccacgcagcagcagcagagaagggaggccttcctcttcaggctggtaggccagggaagcctggcccgtggaagccagagaggggtctgtatttgcaactctcccctcctcttcctccaaacatcctctccccctactcccaacccccacatctctgaagccctggtgttttcaggcatagataagcaaccaagagatttcagtcccacagagatttaactctggctgtaggatatttcttgtgcacctccaatgaaattacaaagtaaataagaccaacacagtccctgccttcacagggctttacaatttggcaggaaagacccatttcatagacaatgacacaattacagcagttaggtgacagttggtgacatggtgagtgccaggaaataaaatgcaaggagctaaatgtgtcagcacaagggcaggggaagggggtgtgtgtggcttctccaaggaagaaacataatcagagacctgagggagaaagagaagttggctagattaaggggtacaggagggacaggcattctaggcaaaggagcagcttgggggagtcccagaggcagtgaggagcctgacacttctgggtacctggaagagggccagtgtggcccaagggcagaggaggagagaggggcactgcagggggtggcctgcctgcccttcagacgccaggctctgagggaaggagtgcggcagtgggatcctaggagtggggaaagtgtctcagcccctcatgatcttcaacctttgacgtcaaccccctctcttgtctttacagagctgctggctgcaaagaagacccacacctgtgagtagggggtccggggcaagaaaatggctggggcataatgagatggagaataattcagcaagtgatctgtggggggactgaggttggacagaggtggaggagtcaggaagagatggcaggcaacaggaaagcaaggggaggtgcgaggaaaccacagatcagggcagtgggaggagatgaggaagaagcctgaagcatgaaaggaaacactgtaaagaaactaggagagaacaaaggaaaagggaaccgccttgtgaaaaaaggcgaggagaaatgctggacagaggcagggagatgggagggggtggggccgactgccaggccggggaaggaaggagatagaggtaggggggtgtgcggaggcggggtggcctcaggaactcaggaactcagcgctgctgccaagggagacagggagcctgcaccaggcttttttttttttttgagacagagtctcacactgtcgcctgggctggagtacgatggcacaatctcggctcactgcaacctccacctcccaggttcaagcgattctcctgcctcagcctctcgagtagctgggactacaggcacccaccaccacgcctggctaatttttgtatttttagtagagacggggtttcaccatgttggtcaggctggtctcagactcttgaccttgtgatccacccctctcggcctcccaaagtgctgagattacaggcatgggccactgtgcccagcctgcaccaagctctgtggtcctgagccaggtttggtgttcatctctgtggttaacacatcctgaggtgtgaacaagcctggagccagcctgtgcaggactagagagcaggagagctttatctctgtaggaaacagaatggacaggggcactctgtgtcctggggccctgaaagccagactacagcaggtaagaagggcactagagctcagagaggacttcccagtggacgctagtgaataagaatcctctctagggaccactcagcacatcagctctcctctcctagtttgtggcaaaggctagtcccccagagaatgcacacagtcccaaagctatgcccatcagggccatgcgtgcccttctgtgagcatgggtccctgaatcgagaggatccctccagggtaggagtggccacaccatttctccatagccgtcccttgactgccttgccagttcctcctgagagctcactgccatctcgcccaatgccaaaattgtctagagcctccctgttccaagtagagacatctcagagagcaaagcattgcccttctccatgagctgggcagcccagggctgagggccatccaggatgctacctcctcctgggtgggggttgctttgctcagcataatcctgatcagtgtctcgcctgcccctagccacagggccccacggaaatgctgagcagggccccgggaggaaagcgggtcagggagtgacgcgggtgagctgggggaggggggtcacggaccttatgtgggtggggggagtagggggactttcggagcagcaggaactgggagaggtcaaaccctattcctacccttaacccctgacctcagaaacctcagccaggactatacctccttatccctttcccatcccaccagtcctcgtgtccccaccccaagagtgttgtcctgaggatccaggctgacagcctctcccccactccacggcccagctcctgaagccccaggaaggcccaggaaggcaaggaaaggcctgtgcctggatgagagggtctggagtcccagcaagatcagacacctctcaggagtttgccccacagaatccaggagacattaaggcctcccccaggccgagagactctgaaaattggctcctgaattgagacaaccccaagatgggggtccaagatggggaacccgggggaactccccagaccaagagggagcctgaatactgaggggccctgaagagggactctcaaagccaatgtaccccacaaagcacctaagaggctgagaaggtctctggaattgtttggcccctgagaaggacccccctcccccaggccaaaaaacactccagagagactcacataccgagggacctcccaggctgagacaccctcaaaagcagacttgaaccagagaaaccctcccatccttcaagtgggatccgaagccagtctgcctgggcttgaatcctgactctgccacttactagctgtgtaaccttgggcaagttacttaacctctctgtgtctcactttcctcctcgaaatgaggataatggtagctacttcataaagtttttttattttttctttttgagacagagtcttactcagttgctcaggctgtagtgcagtggcattatctcagctcactgcaaactccgcctcccgggttcaagcgattctcctgcctcagccccctgagtagctgggactacaggtgctcgccaccatgcctggctaatttttgtatttttagtagagatggggtttcaccatgttggccaggccggtctcgaactcctaacctcaggtgatccacccaccttgggctcccaaagtgctgggattacaggcgtgagccactgcccccggcccacataaagtattttgtgaggattagattatccacataaaacatcgagaaccatttctgacacataatagtaagcactattattatgattatgagtatgatgatggtgatgatgatcattatctacactccaatttcagcagtttggctcctaaggaaatttctggtttccttctgtggattgtgggtatttgcctggtgattattactgcttctatcatttccatgtattccctagcgcaagatatatgtggtgtctgcagggaggagcgtgggcatgggagtggtgggacagccccccaggctgcaccacactgggtatggctgttggcagtccacagggtgtcaggtggcacatgccaccaccccaggcagacatcctgtgacttacctctgaaaacatccctgtccctgaagtcacctggcaaagagggtcaggcttggaaggtcctcgggggtaggaggagtagaaatttggcttcaggctcgtgtgagctccattctggctccccagccagaactaccctggcgggtggaaacagcttttaccgcgtgtggctgtcgcatgtggttttggaattttccaacgccccctacgattggctgcccctcccctcacaccctgccccaggcccagattggccacgtggggcgcctgtcatcctactcactgcaccccttgggggtggggtggggggttgtcacttggccacctgtgtggtgcagagcttaaaccccccagtccagaagcactgggggagagagctaggtgcagagcttcaggctgaggcgctgctgagagggcctcgccccgcctctgccgccagctgcaccccactcctggaccacccccctgctgagaaggacagggagccaaggccggcagagccaaggctcagtcatgagaagtaagtgaatggggccacctgggggcgggggagcctggaccctgtcgtcacccctctggaaaggaggatgtcttgggaacagtgtgagcaaatctgagcaaagcagggtgcgtcctggtcaaggtcaagatctgttgggagatgggtggagcagctggggagtcctgctggccaggcggctccctgacagcagcaatggtaagaggactgttgaggaattcctgagttccaaaaagaacctccaaaagtatctgaggtatccaggcccttaattttacaaaaagactgagagccaaggaggccgcgtacttggcccaatgttacacagctggtatctgatgggggctggtaattactaggggccctgaacgcactctcctgttacagtgtttcccttgttacagtgtttccctctgtgcctccagcctgcttgtgagtaaaaggaggccagagcagttgctgtgctctgaagcaacaggacagcgagagtcaactgaggttggcaggcagcagggcacagaatccccgcgtccaggcctcaaagccaccaggctttctgcccaatccagggacatgaggactatgtggaatccagtcagggtgcacccgggcacatgcctgcgtgtgtgtgcatgtgtgtgtgtgcgtgtgtgtgtggggtgtgtgtgtatgtgtgtgtgtggttctccagggtcagtcacccatttgaccggggaagcaaggcaatggagatgggattggaaagacctcggcctcacccttttcctggcttggagccctgggccaacagttggtgggcagatgtctggggttcctgtgccttccagcagagcaagggtgggcaacctcaggaagtcccctgtatttgttgtgaagggaagccagggaagccagagaagctctcagagcacaaggtgaaggaggaaaagggaagccccatgcccctgtggctgaggcctgaagcagccccagcttcaacctggggtcttcccacaagccacagaagggaggccgtattgagtcctggaaagacccctggactgacagtgtaagaccaggcacttgtgccgcctatcactggctagccatatagacttagacaagccaagtcactgggccctggtctaccatccgcaaaacaagggagctgaattttaagatagaacaacaaaaccaactatggagagtctcccattccaaaggcccagggccaagagagagcccagtgccctaaggcaggcatccccaagggtgatgatggagactcagctctcccagaggttagaaggaagggaaaccaaggaaagaaaagaattccacttctgtgacagggactgaggccacagtgcaggcatatgagctggggtggataaggagggctggagagaagagccaacagcttctacacagaggaaagggccccttggagcttccgtttcccttctagcttctctctattagcagcaaacgctggcagactggtcttcccagagatggcccctaatgagcaaatcaaccctgggatgaaatgactaggtgtgcttctagcccagcagcggggcaggagtccccaggaggggctgagggagacacttggccagctctccattattcccacccccaccacacacacacagccccacccaggcggggaagtaggagagagggcctcctccaacgagggggtcagtgccactggtccttctcacttggacatttacaggtatctcatagccccaagttatctgaccccaatgagtgccaaccaccaccagcccctccaaccgccgatggcaaaagtcaaagcacatggggcttgggactgtgacacacccagagaccaagggcccgacaaaaggagcagaaacaaatcaagaaataaggagagatgcagaggcccaactcagagggcgagtttctggaacacctagggagagagtaatgtccagctggaggtgtggttggagaaacaccaatagagccaaacgcatggaggtgcagccgggcgtggtggctcatgcctataatcccacttcaggaggctgaggcttgaggccaggagtttgagaccagcctgggcaacaaagtgagccgctgtccctacaaaaaaagttttttttaattcgctgggcatggtggcgtgtacctgtagtcccagctactcaggagactgaggcaggaggatcgtttgagcccaggagttcaaggctgcagtgagctatgatcaatgtcacagcaccctagcttaggtgacagagcgagaccctgtctcttaaacaaacaaacaaacatgaaggtgtgaagcccagaaacagagctggaatgcagaagatcacaaggcacatagacacagggagaggcggagagaaaagataactggcagtaaagggaagacagggagacacagggtctaggcaagcggtaagagggaagtagggtggctctgacaaggatggcaccagcaccctgccatccgacctgctgctgtcaagtggagataatgtgtctgtacgccaaagagactcccagccagccagacagagggtagcccagacatcttcccctaagggcatggccagcgtggcgccaataggcactcaggccctggcatttggtctggatggggaggtgggaggccgaggggtgtgaggtcactgtctatgagctgatctttcttaggtttggtcatgatcatgaggaacagtgggccagaaaggactccaagtccccagggtacacagatatcaccctgagagcccagggccatcttaggactccgtgaagggcttcttccttcctttcatcactccagcacccttctctttccccgtcttcccattcctaacagaaataccaaaccaccgagcccaaggtgctagactctgaaaagactcagcttgtcccagcagaatgaaaatattcggtccctaccaagggctcctccccatcccctgccgctgtgctgctgactcaaactaacagggaacaggactttccaagggctaaggtctctcccaggcgggcagcccaaggcccgcgctcctgttcccatatagctagtcctttctgaagtctcacctccacgcctgctgctgcagtgcagccccttccctggggctctgaggctcaaaaaggatggagatgtctatttcgggggagggacagtaacaaggcagggcctcagggccagagccaaggtctttctgggtccactaccctcctggagcagtgaaggtgctctgggatgagggacagatggccctgaaggcagggaaggtgctgatggtgacgtctgggctcccactcgccagagcttcctcctagtgattcatcccctcccccattcactggttgttttcactcgcctttctccagtcccagactgtgggggtggcggaggcaccaggagggggtttcgggtggctggctggctgtcattcatggcttttcaaaaccccagactctccctcgcccacctgagttttagcttcactattttctcagccccaggatctgggtgtttcagcagaaaattctcaccaggagctgcggtgagggccctggcctgggctgggggtagtgttcgccaggtagaaccacttctcccccagtccccacccagccctcccgctcctgctcccctgtggtggcacccaccaccttggtttccagctttgcagaagctgggggaactgagagctgagaaaggagggaggctggtgacaggttggggtgtgcaagtgacccctgaccggagctgtggtctcggtggggatcgagacagagagttctggctgtggggagaggaggagctcaagctaaggaaagagatgcattcctctttctcactcattcattcattctgcaaagggaggcataccaagatgtatggaaacctagtctataccctaaaggggctgtggtgttcctgaggagtccccgggaaccctgttgttgatatataagtcatcccacttggccttagagaaagggttaagggcaggaggaggctgggacctcagaggaagagttgggacagagggaataatatctcttgggatctttatacaaacaggagtcctggctttagttctgtgggtttcctctgtgaattctgttcctagaccaccacaatcacctcacacttttacccctacagccaaataaccatgtcctctacccaggtctccggtgtgcatttgggcgtcttatcctcataaagtatatagcttaaggcttgagggcactggctgcagaattacagagatctaggttcaaatgccagatctgccacttctggctgtgtgaccttagtcaagctgtttattctctctaggcctcagttttctcatctgtaagatgaggatgatactagcagggcctatttcacagggtggttgtgatcattgaatgaaaatgcatgtaaagcctggcacagagtaagaattcagccaatgcttatgtctatcattatcctttctccttaatcagtatccactggagaaaaaggagagagaaagaggagaggaaaaggcccagctctagattgacgaggcaccaggaggagatgaggaccccggggtttctctgtgtgaacccattctctaccatgatggtgggggggtggtggttctggggtttgagaggagagatccccctgggttgcagcccctcccctgctcctaccacttcctctctgtggcatagggcacctggacagggcccagggttggcttcctaagctggcacagggccaggctctggaagtactcaaagcactatcattgaatctcacagctgtgagaggctcgattagaggaggatggaggactttgcctctaccgtatttcccctcataggaggagctactaggatgctcctgggggtacttcagtctctaaagcaattcagaggagattcagtttctttttctagtattgtctcagaatgaagtcttagaggtcacactggatggcagaaaagatgcaagaatgagctcaggaaaagatcgccaaccccagccccactccctggaaggagcagcctggcaaaaaggcaggaatagggactaagttcttgctactcaaagtataagctgaagaccagtaagcttaggcaccaactaagagctgaccaaagtgcagaatcttgagtcccacctcagatccccaggtaatcttgtttgagatgcagaaagccatagtcattcagtcattagatgacttaaggagctggcgggtgcatttgggcatttgtctctccttttggaagatgtggaattggagttttcttttggagaaagctctctctcaggagagagctacagtgagagagctgcaggtgagatgcaaagatctttccaagacagcaggcgagggtagagttagggctgccatgggagcagtggtgcaggggctggttcgaggttcctgacctttgcttggctctagttcctggcactggcaggcccttagatggtaagttcctggcaggcctggctccagggcaacagtttgagtaatcctgtgattactcagctccttctccccaatctgagttcccaccacctgctgcttcagggacgtgtctcccaggggtagcttttgaaggtgagttatcatcagaggtgttttcagctcctctcaccaacccccaagtctaccagcccccttcccgttctcccccaccccttctctacaagtaacacacaccctcatgtacacagcactggtactttctttctgaggtttgggtggatggcattgaagggagtgcaggtggcaggggaaggaggggggagcaggactagagggcctgaagtgctgagggggccatgggttgggcaaaggccaggatacaagcgtggattttctgtgtttcagtgtttccgcagccgtctctccatccctagatctatgtctctgtttttcctggacccaaacctcttggtctctccagctcagtgaggctagggggtctgacattctagctcagagtctttggccttgtgtgtctgtctcactgggtacttctgtcttggactgggaggatggaggatgggctgaccaggtggctggagtccaaggctttggtgttgcccaaacatgggtatttgcgaagggggtccttgactggccgcatcttcctatgagaaggtcaaggtcttggtgacactgttgtgaggttcctagggccaggagaagcagtgggtcaagcatggggcagggagatgtgtctggggtcaccatgtggtcagcacacacacgcacgcggatgtggctcttggagaagggaagaggcagggaggcctgtggttgactgctgggccagagcccgagttcccactgcggcttggcctaatctccctcccgcttacttttttgggtggcccacgttggtttctcccatctctggtcttaggccactgaaaagagagatgccacagtgttggagggggaggtgttgggcaagaacagagtccacagggcccgagtgctcctctcagccttgccaggcccactggtcttctcagcctgacctctgctcaggagtaacttgaatacacagtgctttccatgggtgatatcatttcattactctctgttacctacaatcaccccatggacaggcaataatacttttatcctgatcttgctgacaagaaaacgtaggtctagagggagaatctaagtgactagaagtatgggggccccaacgttttctgcccctgttccagacacccagtgccctcttattctctcttcccctccatgtattaaaatctgctcttaatttactggaaagaacctggaaaactcacttaccgcctggtcctggggggaccacagcttacagtgtgagcactggaagcttgctgctgggcaggcacgtgtggctgggggttgggtgaggaattgagtgctaatgaagggatttcagatacccatgtgccctgtccccgtcagggtcagctactgcctctgactcacctcaagtctggcctgagggatgatggtttaagaatgatggaaataatattttggggaatggcgggcaagccatggtctccctgcccacttcacatcaacaggccctacatgtgaccagtgtccaggccagggactggaggtgagatcacagcaatgtgcattcgccctccagagaggctgccacttcttttgcccctttggtgggagacacgtcatagattaaaaggggctttggcccttctcttcacttttctggcctgtcccgccccagggctccccactcagaggggaggcagcaggtcagtgatggtggaaaagagacccatgtgctctgggaaatgctaaaaacacctacagtaaccagggatcccaagctttgcccagctacctttcaaggaagagctgggagaaggcctcctgtggtcccatgaagctcagcagagagtcgtgggcattgacaggaacagggcaaagcagagatgagcctagggccagcagcaaaccacaggggtagggaagcaggtacaggttacagtgagttcagtgggagagagaacctggggtcctagtgccccatgagcagacactaacatacaaatatgcacgtgtggacgcaggagcaaccagatatgtcgtaggctcacaaatgacacatacttttcttgcatatgcacacccacaagcacaccttcaaacatgcccactgaaatgtgtacccgaaaagacaggtacacagaacagcataatggaaagctcaggggaactgggatgtagatccagctctcaggcaaactagcctatgaccctggcccaaccgctttgcctcatctggcttagtccttcatcggtaaatgaagaggttgaatgagatggtctctagtctcagccatttttaacattgatgattcatgttcacacaaatggatacagatgcctttgtacaaacataagtgttcacactcagacacacggatgtacacaaagccaccctctctctgctctggggccaagagcctaagagccctggctaattctttccctaggctctcaggcatccagcagagctggggtgttgaggccccgtttcctgggttcctccctgccatcccctcaccctgtctctgtatagcacctccctgagccttcactgtctggctgggaaggactggcatctctgcctatcccccaccccttgtgtaccacatcttcctgctataccctacactttgcccatgggagctgagccccagcgagggagggaggcacagaggaagccccttcggcgggaagcaggtgttgtgaggccgtgaggagtcctatgtcccaaggcgggagggaggcaactggagcttttcaactcgaagggctgagcaggtggcccctctgcagctgctttctctgcctccatagcactgatacaactcccggccacccctccacactcccctcctctgtgaaacaaacacagcttcctcacaccctttgctgagaagcatttggcatttcacttccccttccattttgcaagagggaaacagcaagctggagctggttggagaagtagtggaagcaccaggtacctgtatctgcagcccaggtacatggtggttgaatgcagaaaagcctcctgggctgacctacttctctttctctcttccagcacaaattgaagtgatcccttgcaaaatctgtggggacaagtcgtctgggatccactacggggttatcacctgtgaggggtgcaaggtgagtcataggcatgtgtatgcctgcatgtgtgcgtgtgcatacacaagcgcgcgcgcacacacacacacacacacacacacacacacagtgtctccttagagataaacaagggggttaatggcctttgttctgactccagggatgatctcctgggcagccaggaaaatgcctgagtagcgccttcctgcagggccctcaacactggcagggccctgtcttaagctggggaaatgactacaggataaattgcaattacacaaatagatggaggagagagaaaactgacaggtcgtgggatgtagaaaagctgccagagcttgtgggctggaggcctttgtgagtgagctgggcctgaccaggataagcagtcttgccctccacctgctttccccagggcttcttccgccggagccagcgctgtaacgcggcctactcctgcacccgtcagcagaactgccccatcgaccgcaccagccgaaaccgatgccagcactgccgcctgcagaaatgcctggcgctgggcatgtcccgagatggtgaggccaagtcgacagccccctggggttttcctggtgtctccagaggggcagcctggcctgctgagctagacaaggcttaacctgcaagacggcccatcctctggtctcctctccattcctccccgttacaaccccttgtctcctcccctccagggatggatgggtcacccccatcaaagttctttggagtccccaactttaggctttgctagaacaaacatcctctttccaaggtcccatacctcttcatctcttcttacttggaacgaattctcctcactctgctgccctctggcccagctcccatgcagctctggcaccttcccctgctaccctgttgttgtagttctagctctatctccttttctaatcccccattcccatacttggacacaggactatagccaggaatggaaacagaattggcctgagaacaaccagagggtggtcgtgggggagggctggtgttcctggtgccttatccaccctcctcacccaccacctcctcaccagtctccctgcacacctccaccaccacagaaggagcctagggtggagctgggggggcatgaggtgatgaggagccagaaggagcccgtcagcacttttcagtgcccaaaataacaaagcaaaaggaagcacgcaggggtgcaaaggggcaggcggggcgtaggctgtgcccctacacctgggaggggtggcggggggagtaaaaaggcaggaaagagagagcagaagaggatgttcagaaacaagccgcggagcccgggttgggctgtggtgagtatctaggtcaccagggagcctgcaggcctgaccacagggagacctgtgttctcagctctcctcttcctccgaccctcccaaagaggcgaggtgaccccaatacagcttgaggccctctgctcgaccacccccagccccaagatctggaggccagaatccccagcctagactcattgcttgaattctgccatgattcaaatctgatttagaacttagaagattttgcttagcagattgaaatggcagactggacagaccccagaagcaaacaagagtgagaggtggacggggtcttgagcataagttccctaaaggctagagaagctgtgcttggagtcagccattcagagagcagcaagttaatcctttaatgaccaaatgcctcctgaccctgccctgtgccatgttctcctgcctcataaacccctggtccctggacctctttcagctgtcaagttcggccgcatgtccaagaagcagagggacagcctgcatgcagaagtgcagaaacagctgcagcagcggcaacagcagcaacaggaaccagtggtcaagacccctccagcaggggcccaaggagcagataccctcacctacaccttggggctcccagacgggcagctgcccctgggctcctcgcctgacctgcctgaggcttctgcctgtccccctggcctcctgaaagcctcaggctctgggccctcatattccaacaacttggccaaggcagggctcaatggggcctcatgccaccttgaatacagccctgagcggggcaaggctgagggcagagagagcttctatagcacaggcagccagctgacccctgaccgatgtggacttcgttttgaggaacacaggcatcctgggcttggggaactgggacagggcccagacagctacggcagccccagtttccgcagcacaccggaggcaccctatgcctccctgacagagataggtgagcagctggggaggtggagagggtggtagagatgagggaggggtttccaccagtaccccgtatcaatcaaacatgcgcctgagggaattgaggggtccagacgaggggcggagggaggaggcggagcaggataggccaggctgagaagtgcccttgcatgggtaggcgtaggagctggctgagatcaagccatgccttccttctccggccccagagcacctggtgcagagcgtctgcaagtcctacagggagacatgccagctgcggctggaggacctgctgcggcagcgctccaacatcttctcccgggaggaagtgactggctaccagaggaaggtgaggccaggagacctgcaggaagggaacgtatcccacccccaccgggagagttcagagatggctacctgcgcacgactgggtcctggggcagggcgggacatcacagacacaggctggccaacaagcatgtgcacaccttttatgtacagttgcgaatgtgtgtatctgtctacaccccagcagatggatgagcgcttttccttagttcttgcctattaaaattgtacctggccttcatcctacctcctctaccatgcagaccttggtgcaccctccttcctcctcttccatcaacaataacaataatcagaaccctgattaccatttgttaaacaccccttctctgccaggcattgtgctaaacgctttatgtaaattatcctcagcccctaccacaaccaacctatgagggtggcatttattcctacttttaacagacagaaactgagcctagaggggttaataggtttcctcaaagtcacaaagtggtggaaccaaagtcaaattcagattcatcaggctccaaagtttatgctgccttttcgatcacactctcataccacctgctctaaacacactcgtttggcacttcacatttgcttctccaggttattgagaccttgggcataacctttgtgggggaaggggcagctgtatgtcctgttcacctcaacgagatataccttgttggagggcaaagctgtatctcatactttttggattccctcacaacagctaactcggtgtcagcagccggtaggtgctcagtgtgtgggactcactggcaggaatctgtgcatttgtgctaagaccaggcttttgaaaatgctagttgagaacataggagttcagagcctaccccttgcagtttattaggtggggctccagggctcaggaggatcacagggccacacagagcgctacagcgggaccctcctccctccctgcagtccatgtgggagatgtgggaacggtgtgcccaccacctcaccgaggccattcagtacgtggtggagttcgccaagaggctctcaggctttatggagctctgccagaatgaccagattgtgcttctcaaagcaggtgcccagggatgggtgggcaggcctggggacaaggggacagagccaagtggagggaggtggcttaaggaaatcagggggacagagtcagatcctggctttgcttgacactgtccctgcatcttctctccccactgcccaggagcaatggaagtggtgctggttaggatgtgccgggcctacaatgctgacaaccgcacggtcttttttgaaggcaaatacggtggcatggagctgttccgagccttgggtgaggggcagggagaaatgagagggaagattctgatgccaaccccaggcaaagctttgtgacccagggcaccctcttttcagggcgaattgccccctctgctctaaacacaataagggcggtgtcctcgggcaccatcgctccagccactctctcacttttctcatttccactccatcaggctgcagcgagctcatcagctccatctttgacttctcccactccctaagtgccttgcacttttccgaggatgagattgccctctacacagcccttgttctcatcaatgcccgtgagtgttgctgggcttgggtgaaggacattcaggtggcaggggcatggcagatattgaagaagagtctagaccttcagatgtagttaaatctgggaaattgctttaaatagcagaatgagccctactcagtattgctataaaataaaatgagttaaaataaagattcagaggactctcagagagggacaagagcagcataaggtggggttgtgggaagtggggagaaatgaggttgagaggaaatgagccactttcctgacagaaatgtgtctgattgttagtctatggcagtgatttcattgtagcacacatcagaatcacctggggagctttaaaaactattgctgcctgggtcccacttccagagattccagtgtacatgtgctccatgacttatgatggggttatgtcccaataaacctatcgtaagttgaaaatatggtaagttgaaattgcatttaacacgcctaacttactgaacaccatagcttagcctagcctaccttaaatgtgctcagaatgcttacattagcctacagtctggcaaaagcatataacacaaagcctattttataataaagtgttgaatagctcatgtaatttattgaatatggttctaaaagtgaacagcaggatggttgcatgggtattcaaagtatggtttctactgaatgcaagtggctttctcaccaacataaaatcaaaaaatagtaagtcaactcatcataagactgggaccatctgtaattgataaggggtgcactgaattttaacagccacccccaggccaccaagattaagaatcactgctctgtgtgaactaattttaaggctgtatgcctataataggaagactctggatatcctatccactcccctggcatggagtagctgggctgagccagatgaatactaaatattcagagaacctagggaagtgggtcaagctgctaacctgagtttgcagatcgagactatcagtcttctggctctgccagtgagtggacacctaaatatgcccttcaaactagaagataaaaactttaaagatgacttctggatattttatagaatcagggcaaaagttagtcacagattgctgcaagccccctggtgcaggcctgggcaccttcaggaaggccacctcctatcaggagcccttttcgtacatgggggagctcttttccaactcttgttacccctatgacagaatcctagtgcctagcattgaatgagctatgtggaatatcaggttaccagggagaaggtagcttggagtcaggagatcagaaattctcatacctttcatctcttcccagttttccttgtagacagctagccaagcccaacgtccagagcttaccattatcaaaccaaggcacacacatgcacgcgctcagcttagaagacctctatccagcacagatgtccacaaagatacacccttttgttgggagttaatgtccatgttctttcttgttctcattacggtcccaccccctcctccagatcggccagggctccaagagaaaaggaaagtagaacagctgcagtacaatctggagctggcctttcatcatcatctctgcaagactcatcgccaaagcatcctggcaaaggtaggagcagtccctggggtagaagaggccaggcccatcgctagctctgtaacatcagagtttgcgagggccggggtctgtgggtacagaggagggagtgcgggagtaccactctctgttagagagcttgcatcagcagtgggaactaagggaatgaacagctacttccacgtgcataaagactggaaagttagagggcctgggattgggagggacctccagggaacaattcagtttaatatagccagcacttacccagcacctgcttgtacaaggcactgtggaaagacacagagatttggtcgctgcccccaccaagagattttaatctggtatgaagaagagatctgtgtatcactaactctaacatagagtagaatgtggtatgtgatataataataatgcaattaacagagtgcttttgctgacatgctttctcatcctcatggcaacccagtcaataggacaggtgttcaaatctccctgtgtagcagccgggcacagtggctcacgcctgtaatcccaacactttgggaggccaaggcgggtggatcacctgaggtcaggagttcgagaccagcctgactaacatggtgaaaccccatctctactaaaaataaaaaaaattagccaggcatggtggcaggcgcctgtagacccagctacttgggaggctgaggcaggataatcgcttgaaaccgggaggcagatgttgcagtgagccaagattgtgccattgcactccagcctgggcaacaagagcaaactctgtctcaaaaaaaaaaaaaaaaaaaatctccttgtagctatcaggagacttcagtgacttaaatgcaagattgaatcccagtgctctttgcgctctttctatccctgtgtcccctatgtataactataataagtgacaccaggaaaatgttatgagagtataaaacagggattaaaaataatttgggggtaaaaggagtgggtcataaatacttcccagggaagatgacatttatactaggccatgaatgatgtaagattttaacaggcattcatgggggtggggcaggcattccaggcttagggaacaataggagcaaaacaaaaaaaatgaaaaaaaatccttttcctgaggtttaaccaaaaaaatggatgagatgagtatgagaggctggggataattgttttatgggatttgggtgtgggactagggtacaatgaagaccaagaacaacaggagaaaaataaggaggcaaaatagtgtgtatgtggagaatcactcatggtacatcctcactaaagtgtaaaatcaggagctgggatagactggtggggcagaagagcaccagatgatcagcctgaaaattaggtcaggggcaaatcagagaggactttcaatgccatataagagttaaagctttatttctaggccacagggagctccaaaggctagaaaaatgacacaatcagagctgtcatttaggcaatttactttggaaccagtataaaggaaccatttatgtaattattcaagcaggcctttgctatgtgccaggcacagggctgggtgttaaggatacagcaatgacttacacggtctgtgctctcaagaacttgaactttaatctgctacaggatggatttgaaggaggagagacaggaatctgggagagcaattggaaagcaaatccggttggatctgctttcaaaatacatcaccttccctactattaccaccaccctggcccctaccagctctcagctttcacttggactttaagagaggcctcctaactgagcccctgttccaccctcatctgccctgtagcaaccacacctactccgcacccacggtagcccttttaaaaatgcaatctcatcatgccctactcctgtggtttttttcttgtttttgttgttgttgtttgtttgttctgtttgtttgttttgaggcagacttgctctgtcgcccaggctggagtgcagtggtgtgatctcggctcactgcaacctccacctcccaggttcaagcgattgtcctgcctcagcctcctgagtagcttggattacagggattacacgcccggctaatttttgtatttttagtagagacagggtttcaccatgttggccaggctggtctcgaactcctgacctcaggtgatctgcccaccttggcctcccaaagtgttgggattacaggcgtgaaccaccacacctggccttgactcctgttctcagccctcctgtagctgcctgtgatgccgagaatcaaatctagagtctgcgtcatggtcaagtggctcataacatgatccctgccttcttttctcacttgatcttccactgccccttcaaacacccattgcagccacacttgcttccttgctattcctcgaacacatcaaacccagtcgcagggcttttgtacctgctattgtagtcacctggagggttcttcccccagttttccaaatggcttaccccatctcttcattcgggagaggtttttcctgaccagtaaccccatacaaaaagctttagttttctttaaagaacttattatctgatacactacatatttattttctgggcccctcaccagaatgtaaatttaatcaaggtacagattatactttattgactgatatatctgatatatcactagaggccatcacagtgcctagctcagatccagatgtgttctcaacaaatatttgttgaatgaatgaaggaagctattgccatagcccaaaaaagctcagaataaagcagtggtgaggaagagagagaatctaggagatatgaagggatcacaccctgctgcctgcttttctctgactgcctctttccaaggaaactaagctgggggagggaggcaatggcaggcaagagacatttttaagcctcttggttgtagaggagactgcaagagataaattgttctttcagccttgctccagtgaggtctccctgcctccgtctgctcactggtttctgtgcctttttcatctcccctttggctgagtgctggcagcattggtttgctacttgcagtgttaggtgcctgcttagaaagtctgtttagttcaaagagttattaagcatgtgccatgtgctaagcattatgataggtacagaggagacagggaaagagagacctcagccaaggagctgaaatctagggtgggaaggcagacaaattggaccattttcctgcaatgtagtaagtgctacacagaggaaagcccaaaagaagggcccttaatccagatgggaggcagttagggaaatagtcttaggagaggtgacactagagggtaaggattagtaatgggaagaggggaacaacatgcacaaaggcagaggcatgtgacagcatacaacaagagtcacagacaatcactcttataaaagcaggaagtgcacattagagtctttgacaaggttcattctagaagtattgggaacataaattgagggcttcacccagaaaacattcacctgtgccccacccactctcacttccctccagtgtcctgaacacacacgtacttctaccagtgggatttggctggtgccaaagtgccaagtacataaggggaaggcaaggagggtttgtcctagcccaggaagaataagcggacttctttgctctgaggagagctgaagtattgaccctcccttccccattaacccatatccagctgccacccaaggggaagcttcggagcctgtgtagccagcatgtggaaaggctgcagatcttccagcacctccaccccatcgtggtccaagccgctttccctccactctacaaggagctcttcagcactgaaaccgagtcacctgtggggctgtccaagtgacctggaagagggactccttgcctctccctatggcctgctggcccacctccctggaccccgttccaccctcacccttttcctttcccatgaaccctggagggtggtccccaccagctctttggaagtgagcagatgctgcggctggctttctgtcagcaggccggcctggcagtgggacaatcgccagagggtggggctggcagaacaccatctccagcctcagctttgacctgtctcatttcccatattccttcacacccagcttctggaaggcatggggtggctgggatttaaggacttctgggggaccaagacatcctcaagaaaacaggggcatccagggctccctggatgaatagaatgcaattcattcagaagctcagaagctaagaataagcctttgaaatacctcattgcatttccctttgggcttcggcttggggagatggatcaagctcagagactggcagtgagagcccagaaggacctgtataaaatgaatctggagctttacattttctgcctctgccttcctcccagctcagcaaggaagtatttgggcaccctaccctttacctggggtctaaccaaaaatggatgggatgaggatgagaggctggagataattgttttatgggatttgggtgtgggactagggtacaatgaaggccaagagcatctcagacatagagttaaaactcaaacctcttatgtgcactttaaagatagactttaggggctggcacaaatctgatcagagacacatatccatacacaggtgaaacacatacagactcaacagcaatcatgcagttccagagacacatgaacctgacacaatctctcttatccttgaggccacagcttggaggagcctagaggcctcaggggaaagtcccaatcctgagggaccctcccaaacatttccatggtgctccagtccactgatcttgggtctggggtgatccaaataccaccccagctccagctgtcttctaccactagaagacccaagagaagcagaagtcgctcgcactggtcagtcggaaggcaagatcagatcctggaggactttcctggcctgcccgccagccctgctcttgttgtggagaaggaagcagatgtgatcacatcaccccgtcattgggcaccgctgactccagcatggaggacaccagggagcagggcctgggcctgtttccccagctgtgatcttgcccagaacctctcttggcttcataaacagctgtgaaccctcccctgagggattaacagcaatgatgggcagtcgtggagttgggggggttgggggtgggattgtgtcctctaaggggacgggttcatctgagtaaacataaaccccaacttgtgccattctttataaaatgattttaaaggcaagaagtgtgtgtgtcagagggtgggggagattcttaaattagattacctgcatgcctgctctccagtctcattcctgggtcaagactcaggtttccagctcagcaatccatcagcattatacagatccaacccaccctcacccgacccctgcagtttctccccaggtggagcagtccctcagtgaggactgtgaacgaatcttcaggaacccccactgtaggagcctcaaactgagccccacgggagatgctctagactgagaacttcccataaatgatacccacggggaacgtttagatttagaggttgcacagaattgctccacatctgggagaccaaaagacagtcctctggaaggtggctggcccaagctccccagtgggggaatcaggatgtcagagagatcctctagaacctgctgttcttgctattgcatgacccctccctggcaccagagcctccctcctggctccctcccctgtcacttgccagcctgtagtggtgcttgctgcagccctccctggttgctttatttatttattttgcaccaacagggttgctgcagactcattcttgcctggtttaaaaagagagagagagagagaggaaaaaaaaaaaggagaaatgctttctggctcttttctccacctcagtcttggcagcagcggccgcagcagcaacagcagcagcagcagcggcaggcagcagccgggcagccaggcagcgggggttgaggcacacagggaaggtgcaggggcctgaggtgcagctcgaatgggacagggcccccagcgctggacagatgcagtgccaaacttgatgccaccttccagcttctccggtaagtgcccccactctctgtcccaaagatgcagccgcccttttccataacattctccgagacaggccagactaggggccagacaggcccctcaaggcaagagggtttgggcccccacactgctaacaattaatcctggccccatgggactttgagggggaaactcaaatatcccaagtacccctgggtggaagggctccaaggagacctcccttccatctccccagtgcttccccttcctctggaagggtttttctccacaatcggtgtggatcttccagaaatctttcccccaggaaccctctccccacacagttcccatttgtcagtcaggtgtgctttaaagaggatacaggatacccaggttcaaaagtgtctctggactgccacataaagacaagaaaaaggctccctacccttgaggggtgatgccttcaagggtcatgtcttggtgatgtccccaccccactgaagggacaaaaaagtggttctgacatctcgcttcctgcaaagtggccggaagccggtcctgcagccatggaggttggcaagggaaatttgtgattaaattagccaccttagaaataaaataggttgctccagctccctcagcccctggcccagcggactcaggggaaactcacaggagcaggaaggaagaaagctgggttacatgcttcactgcacttttgctgaatgcagagcgaggatgggcaggaactgcagcagtagtgatgaagagctagctgtcaggtggacttcccagaacaagcctagggagaacaagggaggctgggccatctttcccgggagagctctgggcatgccacagagacctgttaggtcagtttggggcgagaagagtctgctctgcagtctttgccccacgttattctttttcatccccaagcctcacaccagttttctgcatccctctgctcttttggcctctttctttagtttcccaactaggacaatcctctcaagtggctgtaggatagccactagaatgatccttctaggaggtggagagtgggaaggaaaggggaagaaatgaccatctcttaaactgcctctcctaagttccacatgagaaaaaacagggcatgtagtagaaagctgaccctgtagagcccagagagcctgaagcccacaagcccaaaggtgatcaggattgccgctcagcagagactcagacgcgctgtatcccagagagcatccatgggcttttgctcctatctctgtagccatcccttgccaattccagtacttcctctgccttggggtccctgttgacatctaacaggatgagtcaggggccctcatcacctagagggccccttctcctctgtcacctcagccattgtagtcaccatcttcctgagggttcccggaacctggtacccagaaactgactataagtctacaggctctgcacactgtctgtgcccagatacctgctgtgccagccaacagctcccttcctccccaccctacagcacttggtcagatgctgtctctcctcacttatctatgctccctggtccacaatctgtctcttgggaatttctcaggcagctcaggccaaaagggacaagagctctccctcagatccacacactggaccagaatccaaacaccattaaggagggatatgagggaagcccaagactgaagaccaagcaacagaactcaaaacctgggcatcctttgggtctctcacacaccccaacttcaattgcagtagagaagcagttgcccctgggctcttgcaggggattcccagcttcccagtcaagtgcctcctgcatcctatgccacagctaatgtacagcttggcagttgtccacacaggcattttggggagattggatcttgttagtccagggctcaggccctgggccaggctggaagagggctcagcatgggggtggagctgaggcctgcatgtttcccagccttgggtgagctagtcaaggtgaggacctctccagtcaggacagggaactctgggccaaggacatgatctccctgagccttaagcaaaactatgggtacataatgtgaaagaataagcgtgagcagagagggacagagcagagcttgggaagagcaggtatcagggagaagggacctgagatcctcctggatctcacagacatcaggaaaccccatacagaaagactcagtacctccctgctgttccctgccccattcccataagctttttccccacagaaatcaggcttggctagggttccatgagccagtaagcacttggctggttatccagggctggaagagggaggaaagcagagattccccaaagagaagctccaggaagccccagggaggtggcacacaagaattcttcctggttctgtgccctacttattggcaatgctgagacagatagaccaatttctctcctctctaagaagggccaggaagtccagggtcaccgtcatctgaagccactttccaaaaagggccatgtcatcatctattccaggactgaagagggaatggatgcagccacagctccaaagcaagcctggcccccatggcccccgctccttttcctcctcctcctacctggagggagcggtggcagctgccctgctgtgtgtgactgcacctcccagccccaggctgtgctctgtggccacaggcaactggaggctgtacctggaggactcccactggacactgagctcctggacctgagtgggaaccgcctgtgggggctccagcagggaatgctctcccgcctgagcctgctccaggaattggacctcagctacaaccagctctcaacccttgagcctggggccttccatggcctacaaagcctactcaccctgaggctgcagggcaatcggctcagaatcatggggcctggggtcttctcaggcctctctgctctgaccctgctggacctccgcctcaaccagattgttctcttcctagatggagcttttggggagctaggcagcctccagaagctggaggttggggacaaccacctggtatttgtggctccgggggcctttgcagggctagccaagttgagcaccctcaccctggagcgctgcaacctcagcacagtgcctggcctagcccttgcccgtctcccggcactagtggccctaaggcttagagaactggatattgggaggctgccagctggggccctgcgggggctggggcagctcaaggagctggagatccacctctggccatctctggaggctctggaccctgggagcctggttgggctcaatctcagcagcctggccatcactcgctgcaatctgagctcggtgcccttccaagcactgtaccacctcagcttcctcagggtcctggatctgtcccagaatcccatctcagccatcccagcccgaaggctcagccccctggtgcggctccaggagctacgcctgtcaggggcatgcctcacctccattgctgcccatgccttccatggcttgactgccttccacctcctggatgtggcagataacgcccttcagacactagaggaaacagctttcccttctccagacaaactggtcaccttgaggctgtctggcaaccccctaacctgtgactgccgcctcctctggctgctccggctccgccgccacctggactttggcatgtccccccctgcctgtgctggcccccatcatgtccaggggaagagcctgaaggagttttcagacatcctgcctccagggcacttcacctgcaaaccagccctgatccgaaagtcggggcctcgatgggtcattgcagaggagggcgggcatgcggttttctcctgctctggagatggagacccagcccccactgtctcctggatgaggcctcatggggcttggctgggcagggctgggagagtaagggtcctagaggatgggacactggagatccgctcagtgcagctacgggacagaggggcctatgtctgtgtggttagcaatgtcgctgggaatgactccctgaggacctggctggaagtcatccaggtggaaccaccaaacggcacactttctgaccccaacatcaccgtgccagggatcccagggcctttttttctggatagcagaggtgtggccatggtgctggcagtcggcttcctccccttcctcacctcagtgaccctctgctttggcctgattgccctttggagcaagggcaaaggtcgggtcaaacatcacatgacctttgactttgtggcacctcggccctctggggataaaaactctgggggtaaccgggtcactgccaagctcttctgacctttccttccccagtggggaacccaccaagtccgcttcagataccaaaggggaagacagaaccaaggctgcttgaaccagaacctagtcccgagcagcaccgctctcctgcacctcccgcctgcgttgtgcctcctgccggagagtctgcttcctgagcttttccggtctgaggatagcattgtcatttcttctctgagggtcccagggagctgcagatgcagaccccgtcgttagtccagcccccgcttcaccccctccacacacaaaacaggaaacataatcaaagcgctagtcagctagtctaaccactaggctttcttcacacatgcttatatcctttaataaccaattgccaaccacggctataagattatttcagaggtggggctgggaagtgccacttgctccttagagtctgtttgtcaaccaggcagagtccctttcttttctgctccccaccccaaccctgcccctatgtacaggaataagagcaaaggacccacaggctacagagaagaggatggggacagagtgtgggatggagaggacagaccatatactgcactgtgtttgcatgagcctctaccaccttcctctatctaccagatcattaaacctgctgtcaaagggccacaacagtagcagccaaaactaaatgtcatctctggagttttctttacttcagtctatttcctaccctcatttctgttatatctccccagctccttctctttctgcttgcccattgattatgtgtcccaatggcattgcctccatctaacctgcctgacaaacagggtaaggagtgcccctcccaccttcactttcctcaccgccctgcacccccacctccatgcccggagggatcagcactcctagccccggtttcagcctcaatcctttccctttcactccccatccctggaactggagaaggagcgatcctctaccttccaggggacccctacatagaaattccacctgggacacccagttgctgcctctctttcccatttctccatgggagctcctcatcatttttgcgtcacagatccctagtgcccttggggaaaactcagaactccaagataatgactaacaaacacaagaatccgcagttgtcaaaggagagagacccaggacactgcagagactaggcttggaggaacagggaggagggcacagcaggctgtagtgagaagtggagggaagggggaacagcagtaactgcctgcctagttaatttccaccatccttctgcagcttcctctggttctgtgcttagtgcagccccagtgggaagctgtctccgggtagaggtcactgatttacagagacccccagatggggaggtggagtaggaggtgaaactgctgagtaccactgactgtgcttcaaatagagggcaaagcagagcccaaaaagaagtagagatgctggaagctcaaggaacagagcaacagcctcagcatcactggaagggaggagtgacagggagaggagaggagtcggaggagggactgagaagggaagaatcacgtggccctagggagcctttctgcgcagtagcatctacccagcgtccttagtttcctcccacccacccctacaccaaaccagatgcaagcattgtgagctttctagttgattcctgctgctgttgtccttgctctgaggagactccactcattagaagattcccagctcaaactgcccgacagatgagacgctcagagccactgaggaggtgaagctggacttcacaggcaggccgctctttagtggggcagagataggaatatgggggtagtaccagaggtgaatgtgagaaccaggcagacaggagagtggggctggagaaactgacctgcttgagaaacgagtttccctgagcctgcaacctccccacccaccatgcacacacaactcaatcagcatcccagcaacttccccttctttagtgtataatgtaccagacagatttcctggggcacagccctcccgctcctttccataaccttccaccagcagcttattaggttgggacttgggagtcagacgctgaaggttctcactctagttgccctctctgcaatgcggaagcagcaatgctgttcagagaaatcttctctgggaagcccctgacgctctggggaacagatgactgtctggtgctgggacatgctgctgcccaaggtctctgaagtctcaaagtctccagagcagagctacccaacagacacagaatctaagtcacacatgtaatttcaaattttctagtagctactaaattaaaaaatcaaaatgaaacggatacatttaaatacttactttatttaacccaatatacccaaactattatcatttcaatatattatcaatataaaaatcaatcataaaatatttaacattttttcatattaggtctttaaaatccagtgtatattttacacttacagtacatctcaacatcgcaattcagttactaaattttcaccagaaaaatctatatttcatacaggtcactgttgagaaagtggattcacacatctaagttttttcaaacataaaacattttccaataactgaatcgaatctctgtcttaaattttaaattaaacaaatttaaaattccattcctcagctgtaccacctacctttacaagcattcaatagccacatgtggccaatggctaccatattggacagcaaagcttcagacattgcaacctggcgtatagactaaggtctccttggcagtggtgggtggacaaagtatccctcaagaaacacatttaatctcaaggaaatgcctatggagttagtcccaccacagccccttagtctcctttcacagctttaccagaacacttttgaggggtgaagcccattcaggaaacaagcttactatgatgagcacttccacagcttgtccaagcgttagcatgccagtccctcatcttacctgtcgggaagactgccctcagctcagctgtgatggcacaggctgctgtgtgtgtgctgatgagtgtgcaaatgcagccaaggacatgagtgggtggtgtgtatgcagaagttttgtggcccatgtgcagggatgtatggtaccacatcatggggacaatctaatggaggctctgcccagggtgggacagcagttcaaagagaagaaaataacatttattgagggcctattctatgtcagtggctttatatatattttcttatttaatccttacatcaaccctataaagtagggaggcatcttagctggtgaaactaaaggtcaaagagagtaagtgctcaagtgcacagagctagttagtaaatagtaactagctatttgagctcatggctgtctgattgaaaactccccctttccaccacactgccatcctcactgccatgccctcacggctctctctcccagggcctttcagttgcaggacacgacctgtaagaaaggagaaatcttccaatgcatccactctgaactttcagtggggactgggctaagttattggtccttacattcttcattaactctaatgcacctgattcaggatgttggggtttttctttgtttttactctttcttctcagtcccctctcccaatgtccttacagcctctgcctcagggac

SEQ ID NO: 1587 - DNA, 1819 bp, Homo sapiens
cccctgggccctgctccctgccctcctgggcagccagggcagccaggacggcaccaagggagctgccccatggacagggccccacagagacagcaccgagcctcacgggagctgctggctgcaaagaagacccacacctcacaaattgaagtgatcccttgcaaaatctgtggggacaagtcgtctgggatccactacggggttatcacctgtgaggggtgcaagggcttcttccgccggagccagcgctgtaacgcggcctactcctgcacccgtcagcagaactgccccatcgaccgcaccagccgaaaccgatgccagcactgccgcctgcagaaatgcctggcgctggggatgtcccgagatgctgtcaagttcggccgcatgtccaagaagcagagggacagcctgcatgcagaagtgcagaaacagctgcagcagcggcaacagcagcaacaggaaccagtggtcaagacccctccagcaggggcccaaggagcagataccctcacctacaccttggggctcccagacgggcagctgcccctgggctcctcgcctgacctgcctgaggcttctgcctgtccccctggcctcctgaaagcctcaggctctgggccctcatattccaacaacttggccaaggcagggctcaatggggcctcatgccaccttgaatacagccctgagcggggcaaggctgagggcagagagagcttctatagcacaggcagccagctgacccctgaccgatgtggacttcgttttgaggaacacaggcatcctgggcttggggaactgggacagggcccagacagctacggcagccccagtttccgcagcacaccggaggcaccctatgcctccctgacagagatagagcacctggtgcagagcgtctgcaagtcctacagggagacatgccagctgcggctggaggacctgctgcggcagcgctccaacatcttctcccgggaggaagtgactggctaccagaggaagtccatgtgggagatgtgggaacggtgtgcccaccacctcaccgaggccattcagtacgtggtggagttcgccaagaggctctcaggctttatggagctctgccagaatgaccagattgtgcttctcaaagcaggagcaatggaagtggtgctggttaggatgtgccgggcctacaatgctgacaaccgcacggtcttttttgaaggcaaatacggtggcatggagctgttccgagccttgggctgcagcgagctcatcagctccatctttgacttctcccactccctaagtgccttgcacttttccgaggatgagattgccctctacacagcccttgttctcatcaatgcccatcggccagggctccaagagaaaaggaaagtagaacagctgcagtacaatctggagctggcctttcatcatcatctctgcaagactcatcgccaaagcatcctggcaaagctgccacccaaggggaagcttcggagcctgtgtagccagcatgtggaaaggctgcagatcttccagcacctccaccccatcgtggtccaagccgctttccctccactctacaaggagctcttcagcactgaaaccgagtcacctgtgggctgtccaagtgacctggaagagggactccttgcctctccctatggcctgctggccacctccctggaccccgttccaccctcacccttttcctttcccatgaaccctggagggtggtccccaccagctctttggaagtgagcagatgctgcggctggctttctgtcagcaggccggcctggcagtgggacaatcgccagagggtggg

SEQ ID NO: 1588 - DNA, 1683 bp, Homo sapiens
atggacagggccccacagagacagcaccgagcctcacgggagctgctggctgcaaagaagacccacacctcacaaattgaagtgatcccttgcaaaatctgtggggacaagtcgtctgggatccactacggggttatcacctgtgaggggtgcaagggcttcttccgccggagccagcgctgtaacgcggcctactcctgcacccgtcagcagaactgccccatcgaccgcaccagccgaaaccgatgccagcactgccgcctgcagaaatgcctggcgctggggatgtcccgagatgctgtcaagttcggccgcatgtccaagaagcagagggacagcctgcatgcagaagtgcagaaacagctgcagcagcggcaacagcagcaacaggaaccagtggtcaagacccctccagcaggggcccaaggagcagataccctcacctacaccttggggctcccagacgggcagctgcccctgggctcctcgcctgacctgcctgaggcttctgcctgtccccctggcctcctgaaagcctcaggctctgggccctcatattccaacaacttggccaaggcagggctcaatggggcctcatgccaccttgaatacagccctgagcggggcaaggctgagggcagagagagcttctatagcacaggcagccagctgacccctgaccgatgtggacttcgttttgaggaacacaggcatcctgggcttggggaactgggacagggcccagacagctacggcagccccagtttccgcagcacaccggaggcaccctatgcctccctgacagagatagagcacctggtgcagagcgtctgcaagtcctacagggagacatgccagctgcggctggaggacctgctgcggcagcgctccaacatcttctcccgggaggaagtgactggctaccagaggaagtccatgtgggagatgtgggaacggtgtgcccaccacctcaccgaggccattcagtacgtggtggagttcgccaagaggctctcaggctttatggagctctgccagaatgaccagattgtgcttctcaaagcaggagcaatggaagtggtgctggttaggatgtgccgggcctacaatgctgacaaccgcacggtcttttttgaaggcaaatacggtggcatggagctgttccgagccttgggctgcagcgagctcatcagctccatctttgacttctcccactccctaagtgccttgcacttttccgaggatgagattgccctctacacagcccttgttctcatcaatgcccatcggccagggctccaagagaaaaggaaagtagaacagctgcagtacaatctggagctggcctttcatcatcatctctgcaagactcatcgccaaagcatcctggcaaagctgccacccaaggggaagcttcggagcctgtgtagccagcatgtggaaaggctgcagatcttccagcacctccaccccatcgtggtccaagccgctttccctccactctacaaggagctcttcagcactgaaaccgagtcacctgtgggctgtccaagtgacctggaagagggactccttgcctctccctatggcctgctggccacctccctggaccccgttccaccctcacccttttcctttcccatgaaccctggagggtggtccccaccagctctttggaagtga

SEQ ID NO: 1589 - DNA, 21898 bp, Mus musculus
tgtgggcagaaggccgtccgtctcttaacagacgggcctctcctccagttctagtctggaagctgctctccagggaactgcttctgctgtcactgcaaaggcaacacctacgctgtttccagaactgtgggatttggcaaaactgatctagaagtatgccatctggggctaggtcaagaggctgggggagcaggggcaggagagtgcagggttctggtaggaaacccctgagtgttaacctcagcgggataaaactagtcacaccatagccgccatgtaggttaggtgagatctgcttgatggcttttttttccttcactttttgagactcttaggccctgcccagactggccttgaggtgttcccgagggctgggattacaggagtgtgttgtgaacttcctgtctttctaggcggggaggctgtttctgggctggctatctgccagtaagtaacacaaatgaactagaaagaggctgtctgcactgtggagccactaccgatgctgactggagatgttttgttgacgtctctctaccgtggctccggctagcttggaactcactatgtagagcagactggccttgagtttgcagagcccggactgcctccgcctccagaccgcacccaccagcttaagtaggatttttgttacagaattttggtgagaatgaagaaaactggtctggcgcctggtaagtgtcaagggacatgagtccatccctaacacacagcagcagatctccggcataacaccaagtaaaagtttcaagtcctctggccggcccagctgatcatgtgacaaagcatggatactttgtaaggtgtttgtggcattattacaaggagagaagcaaaactaagggggtgggggtggggtgagtggagctgggatctgacctgagcagtcaactgcaaggtaaaaaaccatcaaagaaacaaagtagtcactgagctgaaagctaggaaatgtaaagaaagagttgcgagctatgcggctgggtgtgggagacacaagcctacaacctcagcacttgggatgcagaggccagcctgagagactcggtaagaccctgactcaaaaacaaaaacaatcgggctggtgagatggctcagtgggtaagagcactgactgcccttctgaaggtcctgagttcaaatcccagcaaccacatggtggctcacaaccatctgtcttgagatctgacgtccacttctggcacgcctgaagtcagctacagtgtacttatttataataataaatatgggcaggagagagtgcggttgccctaaaattcaattccgaacaaccagatgaagactcacaactatccgtaccgctatagtgtgtactcatatacataaaataaataaatcttcaaacaaacaatcacaccacgctagcacacaccccttagttgattgggcgatgttaggataagcttttctgttactagagaggtatggccacatcccaaccagggatcttcaacagttcccaaggaccaaagaactagcttatttcccaactattttgttgtgtgatacagggtctctctgtagtcttggagctcactgtgtaggctacatacttagagagattctcctgcctctgcttgcccagagtcaaaagacctgcgccaccacaccaggcctttatttcccacgcattctttctagttcagacctggccagcttctcaagaccagttcccacggacccactcaccatcagggccctggcgggcagcagcgtgcagcgccgtgtcgccatggcggtcctggtgggcagggtcagcgccgagacgcagcagcaggcacagggcaggggcatcgtggcgggcgcaggccctgtggagaggcgggggctgcccagcgtccacatcaagcccgggatgtcgctggaggagagcctgggctcgcaccagccgtcctgcagacaagtaccgccggaagcgtcgctctcggcggtgccggcgggaagcggaggccatggaacaactctggggctgaggaagaagtgggaaatggcagcggtgaggtcccagctccgctcttccccgtttctccctttacctcccatttcctcccccttgcatctccagcaagagataaggcctattctaaactctcatcccttagcagatggcaagtttggggcgcagggtggggatggggttggagttgggggctggtggggaggggggaatcacagagttaatttttgatgtaatttttgagaaaatgatacatagttgttttaaggttccagagcccaagaaaaaagttaattctgaactttggagggaaacaacaacaacaacaaaaatcaagtaaggccagatgggggcaattttcattagccacaaatctggagaaaagtcacaaattcaaagagcgatctagaaatggaatataatgtacccgacagacagacgtagaggcttcttcctctggggcctggggggaggggttactcatcagacctgctccccgccccccccaaggaccctcagagacggaggccggaggcctgggcttaagacgctcggagaagggaggtggggagggaggaggcgcgccaggatgcaggaaatggcgcaagcacacgcgcaagtttcgggcggaaatgaactgtgtgttccatcccggaaatcgtaccgaacgctcggactgggtgacttgtgattaggtctccggaggggaaacaagacaatttgcgacatagggtcctcctgcaagcggaagatgagaggcgagctttcgaagggaggcagaggcagaggcaggcctggtctatagggcgagctgcagcgacagccaggactacagagagaatccctgtctcgaaacacacacacacaatctcacacacacacacataatcacacacacaccacacaaccacaatgaggccaaatatatgggtagatcaaaaaagaaaaacacatggttagacactaacaaggcaaacgtaggacagagcagggagatgtgtgcagacgttcggatttggggggaaagtctgaagagaagatggaggctgaaaagaggggggaagggcggagggaggcgtggagacacagttgggagtgtaagtgaaacccagcgtactgtgtccaagcgcatccttaccttcccacaccattctcatcgcctttgtgtctccttcgagaccaccaatcaagatctcacacccaaacactctgccctccgcttcccccagacccatctctgtggaccctggtgacacggagaggccctgcacctgctgcagtagtcagcacagggctggtctctgctgccctcgggcggccgtttcgggtactacctcagtgaggttcgagaggaggaccagtcatcagtgtgaggatgacagacaccctcccggtgcaggagactgagtgaaaacgggagcgctaagacccagtgggagtggaggaccgcatcaagggcccggaggagtaggcgctggagggtgggagccgtctggtacctcggtcgccttcggaacagcatcctctctagtgataaaaatggccagtcagacccagggtatccagcagctcctccaggctgagaagcgggcagcggagaaggtggccgatgccaggaagagtgagcccccctttcctctcttaggaatatggaaggagaatttaggaatagaggatagcgggcatttgagtccttaggaaaaaaaagcccaaggacaatgagggcagatgggggactgaggctattagggtagaagaaacgggtgggttttacagtctagcatttggttggttgacaggaaactggataactttctagagggcactgatcccattaacgcacctggttgtgtgtgtgtgtgtacactcactgtccttctgcctctagggaaggcccggcgactgaagcaggcgaaggaggaggctcaaatggaggtggagcaataccgcagggagcgggagcaggagtttcagagcaagcagcaggcggtgagttgagggggacagggatggccccacccaggtgcaaatcggtgggtgcctcttgccaggtgtatacaggtgactaagaaattagggtgtctgagagctgaagaggctctgacaaggaccacacattggtaaagctttgacgggatctgtaaggtctgagggttttaaagggtacatgagacttgtggggcggccttcacagtctgtatggtggggacagttttatggtcagtctcagaagtaaggattgtgcccacctgcttggtatctacatgtttttgtggggtgggaatagtttcgaaaaggcttcccaggccttcctctgaacccttcctcctacatgctgggaccctcctttctctgtgtctgcttttttctttctctcctccgcccccatcccccaggccatgggctctcaggggaacctgtctgctgaagtggagcaggccacaagacggcaggttcagggcatgcagagttcccagcagaggaatcgggagcgcgtcctggctcagcttctcggcatggtctgtgaagtcaggccccaggtccaccccaactatcgggttactgtctagaaccatcgctcagggacacatccctagagtgactccttctgtcagctccgtccacagagaaatatcccaactcaaaaccacttgtgtcgcatgcgcagagccttgggttcaatccataatatcatcccccccacccaccaaatcgcttcacataataacctgttgctggaggggaggcttctatgtgacaggatccaatattcccccctgagacttacaagtagcctgttcaaacccgacaaacccgaatctctctgttccatgacacccactggaagtttactaatgaatgcccacgtcatccccaccggacccctctgtgaaatatatgtcctggtgacagttatgaaagcaccctgacttcagagcaggggaacctctgttcctctcccacccctggtccttgctggttacacaactgggacaactatttaacctggaagcctcagtgtcctcatctttgtgactggaatgacagcaacaacgctcactttgtaaggtggctgctgtgaattatctgtgagaattcagcatagttccagatgacggagtgcctgtatcatgaccgcactctgcgtgcctgccagaattctaaccccctctcctgacttttttattcctcgtgttccagctttgttcagccactgtgacactagtaaccctctaaagaatttgtttctctggctctcccttggcacatcatgcccccgaacagttaaatgataatgttatttagcccctctgtccgagtcccaaatatatatcaaatctcttagcacctctctgtttctcctgagctggtctttctcatggttggcccccctctttctctgttttcccaaatcttgctgcttccgggagctgaagatatctatgacattcacatgcatgcattcctttgtgtgccctcagcaccttgcctccttgtgtaacagcggagtgtcaataaaatactggtggatgagtcaattgtcggtgaaagcagcctcctttttgccttgccgttgctcactttggttcgctgtcctcagagttatgcatttatatagtttccaaaacactgcaaagggctgtcctggaagctttatggagaaacaaaaggacacagtactgtgtcccctcttgaacagagagttgcatagatagttgtaagggaaatgttggcagagcagcactctgtccctttcctggttttacactgctcatcagcaccagagacagagacagacagacaggcaggcaggcagacagacagacagacagacagacacacacacacacacacacgagagagagagagagagagagagagagacagagagacagagagacagagagacagagagacagagacttactatcttactaagtatctctgactaccctggaatttgctaggccaggctagctttgaactcacaagagatccacatgcctctgcctcttgagtactggaattaaagacgtgcaccaccacgcctggcttgacattatgtttgggtattggctctcattatgtatctgatgataaaggtcgttgtatccccagagcctagatagcacttggcacacacttggcagttgaggaatactttggaataaaaagatgctggggtggggaaggaggaagttggggtggtggtggtagggggtgagggggtgggacactactggtctctgacccccattcctttatcagttctcttcactgctcatttcaccctgaacttgaatcaatgaggtaattcatagtcttatatgacttttctgtagagagacattaaaaaaaaatctataagccaggtgtggtggcgcatgcctttaatcccagcacttgggaggcagaggcaggtggatttctgagttcaaggccagcctggtctacagagtgaattccaggacagccagggctacacagagaagccctgtctcaggaaaaaaaaaaaatctatgccaaataaggcagtcatgaaacaccaaagatatctcaccacccaagtctcacttggcagaccaaagagctcgctggagttattggcagtatggtgggtgataggttacttataggagtgagactggagtagcttcccatcagaaagtcgcccaccagcgtgacttgtatgcagaccaaagagtcctgccaccaggagctgtttattggtgacacaatctgggagaagtgttccgtgtcttgcaactttttttctgaatttcctgagccttctccactctcatcaggaggaaatgtttcgggggaaatagctatacaaaagcaaggagatttttgaagaggagggacacatgtgataggaaattggggtgcttacaccctggtgtttccctgctagctgtattgccttggccaccttgttttatttctctattttcatatgtttacaggaagagtggagcggggcatgggtctgcattcaaatcctccagcaggagaattgagagcttgaggccagtctatataactgctcaaactcagtaacagagaaaggaagaaaaaaatggcaagacagatgaggggcactcaccttgctgtggccccagtggcccaggttttaagcattgttaaaatcacagccagctgttaagacaatcccttcctgccctggctaccttaacaaggactgtcagcatggccattttgaatcttctataaagtctttgaggaaaccacacagctaatggctcagccaggattgtttctgtcctctctctcctcccccagtggagggtggaacttcccatagtccagtagcaggaagatgtgttatcactgatgccaaagggacaatattatgattggtgcaaacacaagtcttcatttgcacgagtttgctgtttgctgtgtttggtgcaaacaccctttgctggctgtaaagcagaaagtttggctcacttgggtcagctgggacaaaccttactatgctaccctccacaatgtcaccacattaggtccagtaacaggaagacagtggctaagagcccgccaactaggtcactaggagagttcctggaaacgcttcaaagctaaaggcccaggtaccgcactttctggagctacagttcgtaataagttaccagagccgaggaattcccactcctctctgatttatacaaaacccgccggcctgctgcttagggctgccaaatgcggagggatcaaaagctaccaagccccagcccagagagcttatgcgatgagcaggacacagccagctggttggcaacactgatacttagtgttactttgtattaatattaagtgtccttaatagggaaagcccgagcttgtgtttatgtagcaaggcaacaggacaacacttctgctatatgtaacatctcaaagggaataccacatggggggagggggatgtccaggctgaataatggaactgagattattctgctgctctagttagcaagaattatggaaaggtgcataacctcaaaccccaccatttatttagcacctagacagaatgtaagcctccatctttcgatataattttgggtaaatcctgcctattctctgcacgactgtaatgggcgtggtcacgtgtccccctcccctccagcagaggcctgagttagccgctctcgggtcaccttgactacgaggctaaggaccccgtgagaaacgcttctcattcgatcgcggagtcctccatgcccacagagaggtgcccagggagaagcctggcgtggcaaacaaaactaaagtagagccgaccgtcggagggtgttgcataagcgtagaagaacaaaatggagagctctgcgggggaagacgtgagtttcctgtcgcgctcttgctactggcgaccggaggaggcgtcgtcagaagcttcatttcaagtgggcgttctgcaaagccagccgcggagcgcgcgcggcgaaagcctgcttccggctccttgcgcgtgcgccctggcggccgggaaggcgggaggccggggcgagcctggaaccggaagtgaaggcagcttcccgcctccgtccccgttgctgccgccatacacgctcgcagtgcttaggtaagctttggccctgtgcaccatccaccgccatctgcttctcccgcggctcgccccgccgcgcgggtccctgatacccggtgccgggtcggcgccgtggccgccggcgcgcaggcgggcgtccagttctgttgtcttcacccctttctgagagcagatcttggcggggagctgggagacaaggggggaacgatccaaaatggtggcctcggccgccattgtgtctccgcgcttcctgggtgttccagtgggtcctctgcccacccggggccgcggcggccggaggcggcgccaggaggagggcggggcccctcgcatctcccctccgggccttttcttgctcgcccagggatgggaagatctcgctccggggcccgtccagccctttgaccccgctttcgctgccttatttggagctctctgtgaatggctgcctctgtgcgtggccgatggtgtcgcgcacttctggggaagcttttccgagagcactgcaaggcgttcctttctaaggccacccagctcacactcttaatcctgcatcgttctcagctgtgaccttaattccttagtgcgactttttaaattaactttggcagcgctgagccgaaccttgcggcctctcgcgttactaagcaagcactgccattgaactgcacacacccatctttttcaaaacaaaaaaaaaatttttttttcttgaaatggagccattcatacacttcccactctccgccccgcaccaccctccttcctgcttctgttccccggtccaggtgtgcgccgctgggacggccactcgggggtttctgagcaagagaatagcggcagccacatgatgtttgcatttgggaagtgagcgctctgcgcagtgctgacccttatctatcacccttgactgatggctgacgttggggatcaccaccgtgaggtggcaggagaaagcgcagtctctgtcttcccttgtcctttgtgtctcaaccctcgtgtgagtcgttagtcacgcttattttactgcggtctcccagttggctcctgcctgtcgaagtgtgtgttacaaagtctggttagcggtggagcccactctgtctctcccgtctggtgttcccgtttcttatgtcatgagactctttgttaactcttctttcgggacaaaggtttcacagtttagggaagaataggacgggtgtagggatcgacgagaagtgacgagtccattcgtgactgatgagtttttccggtttttttgttgtcccctctcccagctcttctgtcggaaactggtgtctttccccttgctgttcttcaacccctctctttggcccttgcttcctcacctgctctgggacacctaactcagagacctcccttctccccctgccggcccaattatggcagagaacgatgtggacaatgagctcttggactacgaagacgacgaggtggagacagccgctggggcagatgggaccgaggctcccgccaagaaagacgtcaagggctcctacgtctccatccatagctccggcttccgagattttctactcaagccagagctgctccgggccatcgttgactgtggctttgagcatccatcagagggtacattttattgttgtgtgtagagaccttatttagcacctctggtgcaagaaaagggaggttcaagtctagggtcataggatttgaatttatttgggataggccaagctctgagaatgtacccaagacggcagctgtagaagaggcttttgttctccattaaaccgagggctgccatttgttctgtgcctggcttttttgcttggtttttgtcattctgactgttcgaactcccagagagggcctggttggacctttagttcccttcttttgggccaggccaagtgtcgtttccggaaaccttaacgatcaggatgctggcttctgtggcttctgggtcaggtaccaagtccttcattttgttcaaggttgcagggttacatgacccaaaagcacagcaacctatgtaggagaaatggcctgtggcagtcgaattcatagattgttacggtgtaagaaaagtaagtttagccaggaacgtggaaggtggcctgttggtagcttctcgagggttctttcttagcggaactggggagctggggtaggagggtttgacttgagtgtaagagtgatgagggtcagggaaaggatggggtctgaaaggtgacaaggtgacatatgatgagtcggctggggagaaaggggtttggcatggtgcaaaaatgtctctcctttctccttctagtccagcatgagtgcatcccgcaggccattctggggatggatgtcctgtgccaggccaagtcaggcatgggaaaaacagcagtgtttgtcctggccacactgcagcagctggagcccgttactgggcaggtatgttgggggcagtgctggagagggtgtggagattgaatcaccaggaggccatttctggctccatgtgctctcagctggtgtcctctgcagttcaaggggaatgttcaccaacatcactgacaagttgctggatgctcttgtgacgaggggctgactttactgtgtctgtctccatttgctccctcaaaggtgtctgtgctggtgatgtgtcacactagggagctggcttttcagatcagcaaggaatatgagcgcttctctaagtacatgccgaatgtcaaggtaaggggggaaagaaacctgggacaggaggctgtggggagacaggcactgggagggaggttggctgtcctcgggcatccctgtgctgtcagtggtgtggtcacatgagagacttcagttagtgccacacccttctgtggctgcccttccaggttccatactgtgaatacacctgtgtgttcctgagagttcgtagctttaggtgataccaccgcaacactttgtggttagttggttttggtattgcagattccattccagagccttgagctactatgtgtgggactgagccacccctgggtcctttgtttttatgttcacgactgtctcttaaccaccacgttgtcctggtaggccttgaactcaccttagtctagagatagtaggccttgaacctgaggctcctgccacaggttcctgagtagttggggcaggcctttgccacctggcttggccagagcctctgttctgttctcctgaattgcttggtagattgtttgagagttgggttgtatgtggcaagaggaagctagatgctcttaaaacagccctggtgtggactttaactctagagtggttaaagctttccgggggtcataacaagtggcctgtgtcctctgtgaaggaacgtggtgtggcctcacagttggcatcctttggaacttttgagattatatatttccatgcttgggtgagtggcctgctgggtttgaaaggccttgtaagctggccctgtgagtagagagatgtgtgcagacttcctattctggttagggtggggaaagagcagcttggatcagtctgggctgacctttgagtcaaatccaccttcctctgcctctactgggattaaaggcgagcatctccacaaccgcccagcatgacagatttaaaagggggaattctagaagaagaaaaggaaaggcagtatgtgcaaaatgctaaaggaggccagagatcttgtgatctctgaggtttccattgctcggcataaccaagcattagacattgttttcctaacctgtctgtgtgcaagcttactggcctctgaaacattttagcgtatttatatatctttttcctaggattttgaaaatagattgtaatctggaggcattgtctatgtctgtgtgcctgtgcctctggctgtatgtcattataccttgccaaaaaactaatagactttcagttccttggctgacccttccccttgtggtggatttaatagttgggaactgaagctggatcagtggctcattcctgtattcccaaggcctgggaggttgaggtgggcgtttgctggagttgaaggctgcccggggctaaggtctcaaaacaaagagggagggtggcaaagctgcagtccttctctgcaggtcccacagcacccttgtgctactcaaaatgctctgagagttgggatcaagtctgaggttgggtttggtgtaggagcctgcagattagctggttaggtcccccccccccatcataaaatcagaatcatctgtacttctccttggctgtgcagcacagtgtcctctagggggctgtctagtccctcccttagttttagctcgcttttccctcagtatttgtaactatgtctgaaagcttaactgataccagtaaaccatcgtgaacaggagtggagtgctcctgtgtgcatgtgttagccattgtggttcaggattgagaagaggaagaggtttactgtagagtaagcgtcctggttatttctttccccttgaaattggacaagtccacgtgtcacagctcacacatccagcactcacctggtgtcacagctcacacactcacctagtgggttgcacatggtgtgacttttatctcaggcaccgaggaagcaaaggctccaggccagggagactgtctgacagttcagttaggaaagcttgcttgtggtttgatcgttgggtggcgcctcacacttgctggtggcttcttgctttcttcatctgtgtaaggaagctgtgactttggagtcacacgtgcctcgttgtgtagatcagctagggctgtgcagagcgatcctgtcttggagtttgagtggaggcggagaagctgagtgttcatcccttcctccatccctcttggccccctggtgctgaggaggtcgctttgtttcttatgggaggcacaggagtcactgcaggcctgaaagctaagagttggtttacagtcaaccacagaatggacacactggtattggcaagatggcccactgcctttaatctgtacttggtgccagacaggctgatctacaaagtgagttctaggccaaccagggctatacagtgaggcctctcaaaccaaagggatgggggagaattctgggagactggaacattgtcctttctcgtggttgacaggtggcagtgttttttggcggtctgtctatcaagaaggacgaagaggtgctgaagaagaactgcccacacatcgtcgtggggactcctggccgaattctagccctggctcgaaataagagcctgaacctcaaacacattaaacactttattttggacgagtgtgacaagatgcttgaacagctcggtgagtggcggtgcccaggccgcagctcaggtggtttggggagcagccctttgagccaaatgatgtatgtttgacataggagcacttgtgtgcaaggacgacccttatctatcacccatgactgatggctctgggcctccttctcttcccctggtgctgtacagtgatgcggtgtgctcagccctgcgctcctttctgtagcagggaacggaatgtgctgacgctacaagtcctcaccaccaccctctccttagggatggaccatgtactgggtgttacacaagagcagcaggtgcctgcccttgtatcccagtatagcatgcgtgataaggatgaaatttcattaagagtttctttggggagtgctagagaaatggctcgttagttaagagcacttggctgctcttgcagaagacctcgtttcattcccagcatccatatgaaagcatataaccactatacatagctccggtttccaggggtgcctgaaaccctcctttggcttttttgagcactaggtgcattcgtgttgcttagatgtacacggaatgaatataaataataacataacggagctccgggtgctagttttggcacatgcctttaatccaagcacttcaagagtctaaggcaggcgagtctctgagttggaggcccatctggtctagagtcagttcaaggatatccaggactacacagagaaattcttgaaaaaaaggcttaacctgcctttaatcccaagggctacatatcgagctcttatctttaaaagaggtgggggagagaattgattctgttgagttgggagagtagaaaagagtgtagctctagagaaaagtctttacaaatggcctttgactgtctcaagatggcactctggtggcattagatcggctgtatatgtctcatggaacagggtatgtgaggcgagaggtgaaggtggaaggcacagtggactggtgtagagattaagttctgagatgggcgtagggagagcagcaggaaagggccttcagcggtattttcttggagactgtatgtatgtatgtatgtatgtataggtcttcttgtgtagaactagttggactggaaattatgttagaaaccaggctggcctcaaactcagatttgcttacctctacctcctgagttctgggattacagatgtaagtttttttttttttttttttttttgagtcagggtttctctgtagagccctgtctgtcctggaactcactttgtagaccaggctggcctcgaactcagaaatccgcctgcccctgcctcccgagtgctgggatcaaaggcgtgcaccaccatgcccggcaagtttattatttttaagtgtgtatgtgtgcatgcatgcttgtgcccatagaggacagaggagtgaaccgccctggagctaagttacaggcaatcgtgggaactgggaagctaatgtggatctctgtaagagcagcaagtgcccgtggctgctggaccgttgtccagcctcatactccatatttaagggcttctgtcccctgagcctctcgtgaactttttccccactttgtagattcggtcatatttcttgtcaaaacaagagtggaacttgaccccaagtctttttctaagcacattctttattccatgctgttactagtatacacagctcctgggcctcctaagtgctgggattacaggcatgtgccacgaagcctggctcgttcctgagatcatggaaccgccacatctctgcagtggctcccctcagagtttcattggcctcaccagacttatgtcacagactcacttcttactgtgtgtgtgtggtttttttctcccctgcagacatgcgtcgggatgtccaggaaatttttcgcatgaccccccatgagaagcaggtcatgatgttcagtgctacctgagcaaagactggtcttgtgggtttgaggtcttgtgtccatgcagctcagaggccaggatgttcagaaattaaggcctagatgtacatgcagtcaggttgaagggcagaaaaaaaacattgtgaaaggatatttgggttggagtaagggacggaggaattcctttagaaattctgccaggtctgggaggtggtagcacatgcctttaaacccagcattcaggaggcagaggctggcagctcttaagtctacaaagtgcaatgcaggacgccaggactacacagagaggggctgccttgaaaagcaaaaagccaaagttctgccaggtgtgttagcagacatctttaatcccaagcagtgggcagagactggtcgatctctgtgagtacaagtggggccagcctggtctcgtgtttcaggacgactagggcaaatagagaaaccctgtgtcaagctttctgctctccagagaatgcacattgagttcatagccctgtccatgtaactggccccagggcatcaacaaacactcctgaaagtgcacttgccagacacccacaaaaccacacacacagaaatcttcaaaactccaaaaatcagatttctggggctggggaagtggctcagaggtcaagagcacttttgttcttccaggagttcccaagttcatttctctatgtcagctcccagtcatgtagttacagtggcggaagaagatggtccaatgtcctctgctggccctccaggcaccaggcacacatgcacaagtgtgtgtaggcaaaccccacacacttgaacttaaaaaaacaagactgataagctggtgcatacatcatgcccgtgctccctcaggtggtgatctttgtgaagtccgtgcagcgctgcatcgccctggcccagcttctagtggaacagaacttcccagccattgctatccatcgtggaatgccccaggaggagaggtgggttggaggcgcgtgcgtgcctgcccgtccatctgggtcctgtcctgtggaggaggcagtgtggagagaagagagtctcaaccctctcatttactctctcacaaaggctctctcggtatcagcagttcaaggattttcagcggaggattcttgtggctaccaacctgtttggccgaggcatggatattgagcgtgtgaacattgctttcaactatgacatgccagaggactcggacacctacctgcacagggtaagctgcccgcccaccccacttcccgtgtgtgctgagcaccccccctctcctttgtcttccctgggaggcttgcagtctaacccttctccttccaggtggccagagcgggccggtttggcaccaagggcttggccatcacatttgtgtcagatgagaatgatgccaagatcctgaatgacgttcaggaccgtttcgaggtcaacatcagcgagctgcccgatgagattgacatttcctcctacagtgagtaccaccctatgtgtgtgtgtgtgtgtgtgcctgtgtgcgcgtttcccattttgtatcttactgtgactttttttctccagttgagcagacacggtagaggactcgcgtggtcagtctgctgtagaagaggacacgggtcaggaggagacactaccgccccacccgacaccgacgcctctgcccaccctatctatgcttctctctgcgtcaccactcctaaacctagtcctgatttatcagagttgtttgtttgtttttgttttttaacaaaactaagaatgaaacaaccgtgtctgtgttgtctgtaagtgctctgttcatggcttgaaccagggtcattctgagggccgtgagccgggttgtggggcagcgtcattgtcttctttctaaggtggctgtggacagggaggctgggacactgctggggcccggaggtaaagagagcaagccccacgtcctggtacctcagctccttcagctgagtttcttgtacctcccaggtatctaagcggggcctggtaggccatgcctgagcgtgtgtgcacaggcatgcgcgcgcgcacacacacacacacacacacacacacacacacacacacacacacacacacacacgcatactggcagcttagctgtgtaaagagcctggagtccctagctggactaagtgtcaaccagggcaggggctggaagccttgggaagctgtggagaggtctggcctgccttccctttctgtttttggtctgaggctcagaaggtcataggtgaagcccaggcagcttcttacctcagctgtgcatctgaggtagagcgggcctgttgcaggattatcttggggttcttggcagtgggggggccggaggtgggaggtgaaagtaacagacctgagctgctgctccctggaaccggaaccgcctctctgtagaccttgattgcacttcagggccaggcattgctaaggcaccggcccatgggccccctgcccgctctgacctgacaggctggaacttgtgttgctggcttgagatctcagatccacacaactgcagttgcacccttagcctcagcacaattgggtgttgtgatggatgccatgtgggtgggcgtgcctcagaaggggtggatggtattactccaggtcacttgggggagacacccatttcttcagacatgccccagagcacaggcctctgctctaaggtttgagcaaaagtctcattcataccttctgtgcccctgcctgtacctctctatgcctccctgggatagcaaagaggaggttggtctctgcgccgaagagcttccccacagtcagggtctcatcaggcggaactatacatacagccaaatgcttcagtctccgtttcattctttgtttttattttcaaaatagtttattaagttttgacagcatctatctaaatgcactaagtgtgcattgcctatggtggccagcagagggtgctgggtcccgaggagcaggttaccaggagctgtgagccacctgacttgagagcaagtgctcctgccccttagccctctgctcctgagatcctcatttctgaagagatctggccaccacatcctggtaggaagggatggatgttcacagagaaagccagaagacttgcaaggttccccactcaagacaattaccattagggttccctttgcccagtcacgtgtgctggatagttttatatgtcaacttgacacaagctatgtccatcacaggagggaaccttaattaagacaattcctccataggactgggctgcaggcaagcctgtaaggcattttcttaattagtgattgttggagaagggctggtggtcctgggttctataagaaagcgggactgggcacattcttggaaaggggagggaggatggggaaggaatgtgtgaggaggggactaggaggagatggggtgctgcaaagtgaatacataatggaaaaaatgaaagggcatgatggtgcacgcctttaatcccagcacttgggaggcagaggcaggcagatctctatgagttcaaagccagcctggtcttccagagctgtcagagaaactcaatcacagcggtgggggttgggggagcaggctgaacaagccagtaagcagccttccatggccttcacatcagctcctgccgctaggttccttccgtgttttgacttccttcaatgatggacagtgatgtggaagtataagccaaataaattctctcatccccaagattccttggtcatggtgtttaccacagcaatagaaaccctgtgacatgtcactgtgaggttggtcctcacacagtacagtctccataaaagccctagcaagcaagaggccaatgtctaacaggagagtccaagattcaaatcctataatcggtgcaaccccttaactcttccaaaacaccaaaacagctgctgccctcttccaactatctctagaaatgttcttgcaggtggcagctgcagtaggagctaatgagcccccagatctatgtaaaaacgaatcagatggtgaggctggagaggtcgctcagtggttaagagcactggcagctctcgcagaggacatgagtttggttcatagcacacacgtggtagctcacaatcatctgtaattccagttccaggggagggatctgtcaccttgttatggcctccatgggcactccacacacatggtgcacagacatatatacagacaaaatgctcatacataaggtgagatttaaagtctcaaaaaaaaagattcagtgttttctgtgggtaatgttgctccgtggatacagcatgcatatgatgcacagatgtgcatgcaagcaaaacacatacgtagaaataaatcagaagttagagatggttcagtagttaagagcactggctgatcttctagaggagccgggttcaatccccagcacacacagcgcagcttacaactgtttgcaactccagttccagagactcccacatcctcacacagacatacatgtaggtaaaacaccaatgcacatgaaataaaaataattaaaaaacatacttattgagtacctcgtagtagattgaggcatctaagaggctgcacgtctccctggaagcaagagctaacagtgccgatgggcttttattcttttcatttacactctttcattacacactggaaggtgggacagacctgctcacttcagcaccctgccagttaaacagaacccccttctggcagaagcctggtccaagtctggtgaacgtttacaaggaaagcaggcagtcagcaactgagctttatccacaagcactgactctcagatataaactgacagtcgctttatcctgggagcctccctgggagcatccagtgacgtgtgtgtgtgtgtgtgtgtgtgcgtgtgcgtgtgcgtgtgtgtataagagagagaggggggggggccgggtgtggtggcgcacgcctttaatcccagcacttggtaggcagaggcaggcggatttcttgagttcgaggccagcctggtctacaaagtgagtgccaggacagccagggccacagagaaaccctgtctcgaaaaacaaaaacaaaaagagagagagagagagggagagagagagagagagagtgtgtgtgtgtgtgtgtgattgagtgtgagtgtgtgtgagagagaaaaagtgtgtgtgagagagaaaatgtgtgtgtgtaagagagtgtgtgtgtgagagagaaaaagtgtgtgtatgagagagagagagtgtgagagtgtgtgtgtgattgagtgtgagtgtgtatgagagagaaagagtgtgtgtgagtgtgtgtacgtgcacaccagctcttgtctctgctctttggaacagtcctgagctgtcttgtgttcacaatgacccgggaaacgtgctcagaaccctgggccgctgagaagaacctaagccatgttatttgacagcaactgagatgcaagcaagctttgcagtagtttgttagcatggcagctgagttttcaatgctctgccacattaattagttaattaattaacacatcagctcctgccactaggttccttccatgttttgactttctgtcttgacttccttcaatgatgaacagtgatgtggaagtataagccaaataaactctctcgtccccaagattgcttggtcatggtgtttaccacagcaatagaaaccctgtgacatgtcactgtgaggttggtcctcacacagtacagtctccataaaagccctagcaagcaagaggccaatgtctaacaggagaatccaagattcaaatcctataatcggtgcaaccccttaactcttccaaaacaccaaaacagctgctgccctcttccaactatctctagaaatgttcttgcaggtggcagctgcagtaggagctaatgagcccccagatctatgtaaaaacgaatcagatggtgaggctggagaggtcgctcagtggttaagagcactggcagctctcgcagaggacatgagtttggttcatagcacacacgtggtagctcacaatcatctgtaattccagttccagggggagggatctgtcaccttgttatggcctccatgggcactccacacacatggtgcacagacatatatacagacaaaatgctcataca

SEQ ID NO: 1590 - DNA, 1634 bp, Mus musculus
cgctcgcagtgcttagctcttctgtcggaaactggtgtctttccccttgctgttcttcaacccctctctttggcccttgcttcctcacctgctctgggacacctaactcagagacctcccttctccccctgccggcccaattatggcagagaacgatgtggacaatgagctcttggactacgaagacgacgaggtggagacagccgctggggcagatgggaccgaggctcccgccaagaaagacgtcaagggctcctacgtctccatccatagctccggcttccgagattttctactcaagccagagctgctccgggccatcgttgactgtggctttgagcatccatcagaggtccagcatgagtgcatcccgcaggccattctggggatggatgtcctgtgccaggccaagtcaggcatgggaaaaacagcagtgtttgtcctggccacactgcagcagctggagcccgttactgggcaggtgtctgtgctggtgatgtgtcacactagggagctggcttttcagatcagcaaggaatatgagcgcttctctaagtacatgccgaatgtcaaggtggcagtgttttttggcggtctgtctatcaagaaggacgaagaggtgctgaagaagaactgtccacacatcgtcgtggggactcctggccgaattctagccctggctcgaaataagagcctgaacctcaaacacattaaacactttattttggacgagtgtgacaagatgcttgaacagctcgacatgcgtcgggatgtccaggaaatttttcgcatgaccccccatgagaagcaggtcatgatgttcagtgctaccttgagcaaagagatccgcccagtctgccgcaagttcatgcaagatcctatggagatcttcgtggatgacgagaccaagttgacgctgcacgggttgcagcagtactacgtgaaactgaaggacaacgagaagaaccggaagctctttgatcttctcgatgtcctcgagttcaaccaggtggtgatctttgtgaagtccgtgcagcgctgcatcgccctggcccagcttctagtggaacagaacttcccagccattgctatccatcgtggaatgccccaggaggagaggctctctcggtatcagcagttcaaggattttcagcggaggattcttgtggctaccaacctgtttggccgaggcatggatattgagcgtgtgaacattgctttcaactatgacatgccagaggactcggacacctacctgcacagggtggccagagcgggccggtttggcaccaagggcttggccatcacatttgtgtcagatgagaatgatgccaagatcctgaatgacgttcaggaccgtttcgaggtcaacatcagcgagctgcccgatgagattgacatttcctcctacattgagcagacacggtagaggactcgcgtggtcagtctgctgtagaagaggacacgggtcaggaggagacactaccgccccacccgacaccgacgcctctgcccaccctatctatgcttctctctgcgtcaccactcctaaacctagtcctgatttatcagagttgtttgtttgtttgtttttgttttttaacaaaactaagaatgaaaaaaaaaaaaaaaaa

SEQ ID NO: 1591 - DNA, 1287 bp, Mus musculus
atggcagagaacgatgtggacaatgagctcttggactacgaagacgacgaggtggagacagccgctggggcagatgggaccgaggctcccgccaagaaagacgtcaagggctcctacgtctccatccatagctccggcttccgagattttctactcaagccagagctgctccgggccatcgttgactgtggctttgagcatccatcagaggtccagcatgagtgcatcccgcaggccattctggggatggatgtcctgtgccaggccaagtcaggcatgggaaaaacagcagtgtttgtcctggccacactgcagcagctggagcccgttactgggcaggtgtctgtgctggtgatgtgtcacactagggagctggcttttcagatcagcaaggaatatgagcgcttctctaagtacatgccgaatgtcaaggtggcagtgttttttggcggtctgtctatcaagaaggacgaagaggtgctgaagaagaactgtccacacatcgtcgtggggactcctggccgaattctagccctggctcgaaataagagcctgaacctcaaacacattaaacactttattttggacgagtgtgacaagatgcttgaacagctcgacatgcgtcgggatgtccaggaaatttttcgcatgaccccccatgagaagcaggtcatgatgttcagtgctaccttgagcaaagagatccgcccagtctgccgcaagttcatgcaagatcctatggagatcttcgtggatgacgagaccaagttgacgctgcacgggttgcagcagtactacgtgaaactgaaggacaacgagaagaaccggaagctctttgatcttctcgatgtcctcgagttcaaccaggtggtgatctttgtgaagtccgtgcagcgctgcatcgccctggcccagcttctagtggaacagaacttcccagccattgctatccatcgtggaatgccccaggaggagaggctctctcggtatcagcagttcaaggattttcagcggaggattcttgtggctaccaacctgtttggccgaggcatggatattgagcgtgtgaacattgctttcaactatgacatgccagaggactcggacacctacctgcacagggtggccagagcgggccggtttggcaccaagggcttggccatcacatttgtgtcagatgagaatgatgccaagatcctgaatgacgttcaggaccgtttcgaggtcaacatcagcgagctgcccgatgagattgacatttcctcctacattgagcagacacggtag

SEQ ID NO: 1592 - DNA, 53106 bp, Homo sapiens
atcttttattatcacttatcaataaactgagtaaaataaatgttttcaggggaatttctctcagccagccttaccaggggatgatgggagaggggtggggaggtgaaccggcaacaactatggccggcggcagagcaagctctttccaaatgactgctgacctagggcaggggaaagggagtggagtgtgacagagggtctcacccatgggctgagagaaaacaggagaggaaccgacgttcctgaactccccttttcttcagtcccaaccttgctgcatctggcccaaggttagctgagtgccatgctacttccttcactgccaacccaggcatcctggccaggcccacctgctgtggccaccaaccacctctttcacttgggggatagaagaaggggagggaggcagccttccttcctgtggacctactttctttccccggggtaagaggaaatgggctagcagtccttaaatctttatttggtagtgctggaaagtactgtttacctggcagaaagctggaataggggaaggcaaggccaggaaggcaagaagacagaatggcccaggtgtggctggcgaaggcccaccatccctacccaaatcacatcagggttggtggggggggcacttctccctagtgctgctgtgacctgtcacagaccctctcaacttgtcccacccagaaagtacctggtcctgtctctcattcgcttgttccccacctgagctcaggtggtgagcatggtgagtgctcaggcttgcatgggaggtttacattcataggttttaaggagtagggcctccaactataaaaacataatattaaacagccactacaactgaggcatgtgtttgaaaaaagctggctacaaaactgtagagaggatcagatgtggccaggcacggtggctcacgcctgtaatcccagcactttgggaggctggggggggggacaatggatcacaaggtcaggagttcaataccagcctggccaagatggtgaaaacccgtctttactaaaacaaacaaacaaaatatatatataattatattttatattatatataaaattagccaggcgtggtggctgacgcctgtaatcccagctacttgggaggttgaggcagagaactgcttgaacctgggaggcggaggttgcagtgagccgagatcgcgcctctgcattccagcctgggtgacagggtgagactctatctcaaaaaaaaaaaaaaaaaaaaaaaagagagagagagagaggatcagataataactgtctaaaacaagagaccaaatcctatggttggaaaaaaagaggccgggcgtggtggctcatggcctgtaatcccagcactttgggaggctgaggcgggtggatcacctgaggtcaggagttcgagaccagcctggccaacatggtgaaaccctgtctctactaaaaatacaaaaattagccaggcgtggtagcatgtgcctgtaatcccagctacttgggaggctgagtcaggagaatcacttgaacctggaaggcagaggttgcagtgagctgagatcatgccagtgcactccagcctgggcaacagagggagactcccatctcaaaaaaaaaaaaaaaaaaagaaaaaaaatagactggcaaaaaatatgtaaaaattctagcctatgggtggtggggctgtaggtggcttttcccccaattttatttgacattttaatgtgaaagggatataattaagttgaaattttctttttaaagaaggacgaacaaatttgataactattaacagtgtactgtgatcccttccagtcccaccttggtgtacctaaaagcatacatatgacacatttatttggagatatgtaaccatactacaaatattgcttggcaacttgcttctttcatttaacatctcatttatatttttccacaggaatatatacagtctacctcatactttttgacgactttataattagtgttccactgtgtgtacaaaacaaatctccttaccccaatatcgatagactttgtttcaaaaaatgttcagcctcatgagtatcttacagtctttctgtgggggtagattttcataagtggaatttctgagtcaaaggacatgcgcaatttggtcaaactgctctcaataagtttgtgccaatatacaagtgtgcctatgtcttcctttaccaaaattgaatatcatcaacccttttaattttgccagttggatagattaaaaaattattttattaacaatgtttttttctttttcatgtcttttggctatttgtattttttgtgaatgaattgctcatattctttatccactttttctttggaaattatatatattgatatgagggttctatatactgtatgtgttatacatattgcaaacattttcttctatctatctttaaaaaagctttttttttctttttgagacaaggtctcaccctgttgcccaggctgcagtgcggtggcatgatcttgctcactgcaaactctgccccacctgggctcaagcgatcctcccacctcagcctcctgagtaactgggactacaggacgacagccacgtaccaccacgcctggctaattttgtattttttgtacagaccaggtctcactgtgttgttcaggctggtcttgaactcctggctcaagtgatctgcctaccttggcatcccaaagtgtgggattacaggtgtgagctaccgcacccggcctaaaattttcatgtagttaaatctatatcaatatattattttctgactttttatttcacttcactcttaggaaggctctattttaagattataaaacattctctgcattttcttctactactttagatgtatactcatttttatttttagaaattaaaaaactcggccaggcgcggtggctcatgcctgtaatcccagcactctgggagcccaaggtgggtggatcatgaggtcaggagttcaagaccagtctggccaagatggtgaaaccccgtctccactaaaaatacaaaaattagcctgacgtggtggcggatgcctgtaatcccagctacttgggaggctgaggcagagaactgcttgaacccgggaggcagaggttgcagtgagccaagattgcgcgactggactccagcctgggtgacagagtgagactctgtctcaacaacaacaaaaaagaaattaaaaaactctcaaaaatacaaagtataatacaatacacaaccccattcctaccacagggtttgttaatgtactgtcatgtttgtagtataatttattttaaggaaataaaatcatcacagataaaggtagtttaccgtgataccgccttccaagtttcattcctccccaggccatctgtcccatgaatttggtgtgtaccttcctgtcatattcaggtatttaatctgctggaatttactttttgattaggtgtgaggtgggactcttgtttttccctagatgagccaaatgttccaatattatttataaaatagttcacctggtcaggcacagtggctcatgcctgtaatcccagcactttgggaagctgaggtgggtggatcacctcaggtcaggacaggagtttaagaccagcctggccaacacggtgaaacccccatctctacaaaaatacaaaaattagctgggcatgatggcaggtgcccagctactcaggaggctgaggcaggagaattgcttgaacccgggaggcggaggttgtagcaagctgagattgcgccattgcactccagcctgggtgacacagcgagactctgtctcggaaaaaaaaaaaaaaaaagttcacctttctccagtattagaaatgccccctttaggcctggcgcggtggctcacgcctctaatcccagcattttgggaggccaaggcgggcggatcatgaggtcaggagttcgagaccagcctggccaacacagtgaaaccctgtctctactaaaaatacaaaaaattagctgggcgtggtggcgggcgcctgtaatcccagctacttgggaggctgaggcaggagaatggcttgaacctgggaagcggagcttgcagtgagccgagatcacactactgcactccagcttgggcgacagaatgagactccatcccccacttcgccaaaaaaaaaaaaaaaaaaaaaaaaaagaaatgccgcctttatagcgatttaccagatcaaccgttctcaatgctctttaatacgctggagtttcatactaagaaaaataaacataaaaacattttggccaggcgctgtggctcacgcctgtaatcccaacactttgggaggctgaggtgagcagatcacaaggtcaagagatcgagaccatcctggctaacatggtgaaaccccgtgtctactaaaaatacaaaaaattagccaggcgtggtggcatacgcctacagtccctacgcctatagtcccagctacttgggaggctgaggcaggagaatctcttgaacctgggaggtggaggttgcagtgagccgagattgtgccactgcactccagcctgggcgacagaatgagactccttttcaaacaaaacaaaacaaaacagaaaacaaaaacaaaaccaaaagacattctgtgggatgggcacggtggctcatgcctataatcccaacattttgggaggctgaggtgggtggatcacttgaggtcaggagtttgagaccagcctggccaacatgttgaaaccccatctctactaaaaacacaaaaattaggtcgggcatggtggctcatgcctgtaatcccagcactttgggaggccgaggcaggtggatcatctaaggtcaggagttcgagagcagtctggccaacatggtgaaaccccatctctattaaaaatacaaaagttagtcgggcatggtggcaggctcctgtagtcccggctactcaggaggctgaggaaggagaatcacttgaacccaggaggcggaggttgcagtgagtcaagatactgccactgcactccagcctggggaacagagggagactccgtctcaaaaataaataaacaaataaaaatttaaaaattaataaataaaaataaaaaaattagctgggcatggtggtgtgtgcctgtaatctcagctacttgggaggctgaagcaggagaatcgcttgaacccaggaagcagaagttatagtgagccgagatcatgccactgcactccagcctgggcgacaaagcaagactccgtctcaaaaggaaaagaaaaaggaagctggaagctgaatgagatgggcctttcaaccaaggagttagaaggccatctggtggcagggctggcagaggaccaggagtaaataaggccagagaggacaccagggtctgggagtgaaggcactgagcttgggtccccctttggaagacaatgacctgagagctgtgagatttcagacaagttcccgaaccttttgggccctgctttcctcatctgtaaatgggataatatcagtctcaccagcttcttaaaattcaatacaatggagttgggtgtggtggctcacgcctctagtcccggcactttgggaagccgaggtgggcagactgtttgaactcaggagatgcagaacagcctggataacatagcaaaacagtctctaccaaaaatacaaacaattagctgggcatggtggtgtgtgcttgtagtcccagctactagggaggctgaggtgggaggactgcttgagcccacgaggtagaggctgcagtgagccatgattgcaccactgcactccaggctgggagacagaatgagaccctgtctcaaaacaaacaagcaaacaaacaataaaggaaatccctaccacactatcaggggcattttggctgagcgcggtggctcacgcctgtaatcccagcactttgggaggctaggctggcaggtcacctgaggtcgggagtttgagaccagcctgaccaacacggagaaaccgtctctaccaaaaatacaaaattagccgggcgtgatggtgcatgcctgtaatcccagctacttgggaggctgaggcaggagaatctcttgaacccaggaggcagaggttgaggtgggctgaaatcgcgccattgcactctagcctgggcaacaacagggaaactccatctcaaaaaaacaaaacaaaacaaaaaacaaaactcccatttttgcgaggcaaattgggctcacagaggtaagctgcatgtccctgttgatggcagagctggggtctggatgcaggtctgcttcggggtaatctgctcttttgccttccagggtcctgcctcttacaatatgagctgtcaagttagatgcctgcactcagtaaacctactctgttttaagtaaaaacaacaagaaacaaatctgaatatgctagcctatctcaggtacgttaaaggaaatttttaaatagggggttttttgaccatttgggggagttttgggggaggggccttctgtctatacttgagctgggggatgttagggttgttcatctggatctagaggttttcctgtaatgttcttactccagaaggaaatctctagatggggaaagaaggtttcagcttttattctagtaagcagggctctacctataaagagctgcttccaccactcttttttttttttttgagacggagtcttgctgtgttgcccaggttggaatgcagtagtgcaatctcggctcaccacaacctctgtcttccgggttcaagtgattctcctgcctcagcctcccaagtagctgagactacaggtgtgtgccaccatgcctggctaatttttgtatttttagtacagatgggggtttcactatgttggtcaggctggtctcgaactcctgacctcgtgatctgactgccttggcctcccaaagtgctgggattacaggcatgacccaccgcacctggcctccaccactattataatatcaccaggttccccatttgaatccttcagtgccaaaggttttgcagaattcaaatgtttttgggacttgatagggctgacctaaaagtacactcactctatattaggtagcccaggagggcctaggcagcccaagaaccaaacacatgagtgtttctgcagggaaatgtatgaatattgacatcagtaggatgaaaataaataatagtcttactttagttcagattaggtttctgtcaccaaatgaattttggtggcagcctgatgaaaaatgttggttctcagagtgtttttgagtttagaattgtggttaagggagtatggacctgttgataacaaaaacaggaacaaggccaggtgtggtggctcacacctgtaatcccagcactttgagaggctgaggttggtggatcacctgaggtcaggcattcgagatcagcttgtccaacatggcgaaaacccatctcttctaaaaatataaaaattagctgggcgtggtggcatgcgcctgtaatcctagctacttgggaggctgacgcatgagaatcacttgaacctgggaggtagaggttgcagtgagccaggatcgcaccattgcattccagcctgggcaagaagagtgaaacttcataaaaaacaaaaacaaaaacaaaaaacagagaaacaggaacaacaatcgccagcatataccaagtgcttatcgtgtgtgccaggtactctaattatgtactatgtcagttgattctcaaaacatatatggcacaacatgggtactctgaacatgggcacaatcaatgtacaatgctataatgtataacacaggacaatgtagctgttaaaagcatggacactctatctagtccatctgggttataatctctgctctaccagtgaataactgtaactctggcaaatgacttctctatgccctgtttcctcagctgggaaatgggggataatatcagtactcacctcctaagattgttgtgaggattaaatgtgttactttataagaaatgtctggcacatagcaaaggttgttattattttaatttttacacatgggcaaactaagcctcaagtaacctgtccaagaatacgtagctatgaagtgtggagctgggatttggagctggggtttgaatccaggcaatctaactccagagcctaccttctatgctactttttggctacgagcaaacaatctgtcaagaaacaaagtagctactaatctaaacagatgtgaaatttgaagaccagttgatctttggggaatgttgggttcttcagacaatggtagctcagtaatgtaaagggacaaatgacagccacatgccaacttggttaactccttccctaggtcctgatgaccaaataaccagcttatttctcaactattggttggctttcatttcaggtctggtcagctgcttatgaccttgttccccactgagcagactcaccatctgggccctggcgggcagcagcatgcagtgccgtgtccccatggcggtcctggtgggcagggtcagccccgagccgaagcagcaggcacagggcaggggcatcgtggcgggcacaggcccggtgcagtggtgggggctgcccagcatctacatcgaggcctgggtgtcgctggaggagggcctgggcccggaccagccgtcctgcagacaagtaacgacgaaagcgacgttctcggcgttggcggcgggaagtggaggccatggaactcttgggctggggaaggaaaaaaggcagcagtcaggacttcagccttggctggtccttctccctccatctctgacatcccctgttgtttctccctttggttccgtctttttttaatatcttcagcaagagatgaggcctaacctaaccctgatcctttatcagatgatagatttgaaaaaaaattttttttgaggggggtgataggatcagaggtttaatttttttaatgtaaaattcgagaaaagggtaaataattggtttaaggctcaggagcccaggtaaatttttaatttttaacaaagaactttaaaaaaacccaacagggccggatggggaaaatttttatcagcagaaatctgagttttaaaaagtcacagataatctccaataatgatctagaaattgaatatcatgtacccggcagacagatgtggaggcttcttcctctggaacctggggggaggggttactcatcagacctgcccccgcccccccaagtacccccagagccgtaggcccaaggcctgtgtttaagaagctcggagacgggaggcgggaagggcggagacactccaggctggaggaaatggcgcaagcagagacgcaggtggaggacggaagtgaactgtgaggggcgttaccggatgtcgttccgccccgaccgggtagttcttggccagatctcccaggggaaactagggaacttaaattaaaggggccgtctgaaaccagaagactggactggaggcgaggaaaaggaggcgaggggaggggagggagaaaagagagttatttggaggtttttccccgcctcctctaacttggcagagagaggagatggttcagtgatggacgaaaagatgagaagacagagaaaatagaggagataaagacaggataaaaatcacattaaacatggaaaacaaaaacaaaaaccacagtgggacaacaacagggacagatcaaaaaaaagaaaaaatacagacaaaagacggaagaagactatcgtaggatggggcaagtgagatgcaaaaatttggacttgagaaatatgtagaaaaagatggagatgttaacaacgggaggcaggggagggggcgggatggtggagagagagagaaaggtagagagttagtttagaattaagcccagaatgctcttttcccaacacaggttgcatgatgacatccttaccttttcaccgcattcacaaccctttatgcttcctctgttaccaccaatcaagttctccttctctcacctcagtactcccccgtctccgcccctgcctcatccctagacctttccgactgggatggctaacctgttgtaagcccgcagctttgggcctggtctctgctgctcccaggcggcccctttgggtactgcctgagcaagaagtgctggagaggaggaccagtcatcaataggaggatgagattgggagagacactcggtgcaggaggctgagtgagcaggggagcactaagacccaggggtagtggaggactgcagcaacgagctggaggaggagaagtaagcggtggggggtgggagccatctggtactttgacagcattcaaaacagcatcggccataacaacagaaatggccagtcagtcccaaggtatccagcagcttctgcaagctgagaagcgggcagctgagaaggtggcagatgccagaaagagtgagtctcctctttcctcccttaggagtttggaaagaaaattgggggtgggggacagcaaacattttgggaaaacccaaggctggcgggaagacagctagggtctggaggctggttaggagggaagaaatggatggatattagaatctggcacctggttggctgagagaaggctgtataactttctggaagggactgactcctgctattacattgtgtgtgtgtgggtccatccccactcactgtcctttcttctgcctccagggaaggcccggcgactgaagcaggcaaaggaggaggcacagatggaggtggagcaataccgcagagagcgagagcacgaattccagagcaagcagcaggcggtgagttgaggcagagtcgggatgagaccccactgcaagttggtgggtgcatctagtgaggtgtgtaagggtgactcaacaagaaaatatggtggcagagggctgaggctgaggggaccctggcagggaccacaacattggtgaaactttgtgatgatatgtaggagagtctgggagttttgaaggccacatagagcttgtgggcggaatgccacagtctgtgtaaagtataacatctatgtggagtatgattaacatttgtggtggagggtagagttttatggtcatggatggtgaggtggtggggatattacggtctgttttaggatgaagttgcatgttaggtctaaggggaaaggggactgtgttgatctctttggtgttgggatatttctgtgggatgggggtggtttctgagagggcctttcttctaggctttgtttcaggatctttcccctcatatgcctggacccttgtctgtttctgcttttccctttctctcttccacccctctccctaccccccaggccatgggctcccaggggaacctgtctgctgaggtggagcaggctacaaggcgccaggtgcagggcatgcagagctcccagcagagaaaccgagagcgtgtcctggcccagcttcttggcatggtctgcgacgtcaggccccaggtccaccccaactaccggatttctgcctagggccaccgtagggcctgactccttctgccagttccctccctcaaagaaatcctccaatcaaaatcacctcccaccataatccctgtcttctttccatcccctagaaatcctgggaggcaggatccaataattttcctgtgacacttataaatatcctgctcacatctgaatctccttgttgttctttaaccctcactgggactttgtaaacttccaagtcattctcacctaaaccctctgtgaaatttgtaatatggggaagtaggaatgtggaaaacatcctgacttcagtgtctggccgatgtgggtccctctcttgaccctgtcacttgctggctgtgaaaccaggacaagctacttaacttggtagcctcgatgtcctcctctgtgaaactgggatgataataatgcctaccttgtgagggttgcttcaatgattaggaatcattctgtaaagtctagcacagttccttgcatgttgtagcagtgattcagtaagtagcaaccctgtgatactattaccaccacctgctcactggtcaaaacctacacagctgtttcctcacgtccatcactggctctctaattccacttgttcattctgtgaccctagttattttctgaaaaattggttcttctcttttcccagagaccttctgatctccaaaaagaggagatgactacatttagcccctctcttataattccaggtagataactgcattttgtagcctctctttgtttttcttttgctgatctttgtctttattagattttcctcctttcctatttccccaaagacttatcagatgctcattgctttctaagatctaaaatgatactgtgttccctcatatgcatgcccttcctttctatatccttgacaccttactttcccattgtaacaataaaaaaagtatcaataaaataattattggcaaataaattggtgagttgaagcagcctccttttgcctcatcatttctcattttcagtcactttgttttttttttttttgagatggagttttgctcttgttgcccaggctggaatacaatggcgtgatctcagctcattgcaacctctgcctcccaggttcaagcgattctcctgcctcagcctcccaagttgctggaattatgggtgtgtgccaccacgcctggctattttttgtatttttagtagagatggggtttcgccatgttggtcaggctggtctcaaactcctgacctcaagtgatccacctgccttggcctcccaaagtgctgagattagaggtgtgagccactgtgcctggccttcagtcactttcttgttttttgtttacatattccctaaacagcccaaatggctatcctttgaaacttcttggagaaacaagaacaagtagtactttattatttctctaaagtgagaaacatggttcctcatttgggaatctgaggactatagatcgcaactgtagagaaaagctggagtgtaggagcaagtgctctttgcccctttaccttgcattttcttcatagcacttactgctactggttttttgagacaaggtcctgctgtgttgcccaggctggagttccagctcacggcagccttgaccccctggactcaaatgatcctcccacttcagcctcctgagtagctgggattacgggcgagtgccactatgccttgctaattttaaaattttttgtagagatggggtctcacttgcccaggctggtctgaaactcctgggctcaagcaatccttcgggctcggcttcctcaagggttgggttacaggcctgagccactgcaccctgaccacttatcgatacttgacattatatttgtgtttatgtgttttctttcctgtaatgtaaacactgtgagaacagggctgttcaccgttgtgtccccagatcctaggacaacatgtggcacaagggaggcagttgataaatacttttgaataaattaaatgatacttgggaaaataccttctatgacaccattcttgaattagttacttcatttgtcactgaagacaagcttacttcaccaagaatttgaaccaataaggtaacctgcagtgtatttactaaccagattctttgagcagggaggcagaatacaatagagaatgagagatgtttgcatcctggctgtaacctcaccagccgtactgcttgagatatgttgctttgcttcgcttctgtcaataagatgagaataacggtacctactccttagtattaaatgattaagtatgttaacagggagagggccaaacgtttgttgttttattacacagcaggacatcaggtcttacttttgtggctccccatctcaaagacggggatagcaaatgtttcattcaggaaaaaaatccaggttgaacaatggggctgttggggcggggccaagaacattctgctcgaattaacagtattaatgggccgggcgcggtggctcacgcctgtaatcccagcactctgggaggccgaagtgggtggatcacctgaggtcatacatgggtgaagccccgtctctactaaaaaaacaaaaatttgctgggcgtggtggcgggcgcctgtaatcctagctactcgggaggctgaggcaggagaatcgcttgaacccgggaagcagcggttgcagtgagccgagatcaggacattgcactcccgcctgggcgacagggcgagactctgtctcaaaacaaaaacaaaaacagtattaatggaatgtagtataaccctcaagccctactattaacacttggggccgaatccagaccccgtcttcccgctcggattcagaacaccttcctgactcactggccctagggcatcagctacctcggacagcatccttttgggaaaataccgcccaccagccccacgactgggaaagagtcgggaaacacccccgagcaatccagttccctgagacttccctcctccctcccctcagctagggcctgccggttcctagtgcgtgcccagcagtcctcaggtcaccttcactaccgggccaaggaccccgtgggaactcgcagccttcgccacactcgttcctcgcgcatccacggaggggtgcctacagagaagacctgcgtggcaaaaacctaaacgaagagatgaggggcatggagaggagtaggataagagaataaagataacagtgggggggagacgttagtttcctttatatcttttgttactggaggtagcagtgaagttagaaacggttttaaaacaaatttcagacaggcattttccaaaggcaagcctggagcgcacggatctgtataaccgcggaaggccctgtttccggtcccttgcgcctgcgctcttgcagccaagaaggcgggaggctggagtagagggaagcctgcaaccggaagtgaaggcagatttccctccttcgtcgctgttgctgccgccatacgcgctctccctgtttaggtaagctttggccttcgctacaatccgtttccatctgcgcttctccgcacccatcccgtcacatgggttcctgatacccttttcacaggcgatggtctggtcgctggggcctagttggttcgctatttccttagcttgcatccctttcgagagcaaagagctcctgggggaaggaagggaagctaaggggggacccaatccaagatggtgtcctcggcgccattgtgttcgttttgctcccttcttccaatgggttcttctcatattggaggcctcagcatcaatgagaggcggtgctcggcgtcccttggtcttggtatttgcggagggcggggctcttctcaccttccttgttctttcttgagctctttttcggccctcggtgggactgggaggaggagctggtttctgggcccagttggatttttctcaccttgacttgcccaacttaatttggagtgccttccaagtgtttacgatacgattggtgtcattgtatgtttctccaaaaggagtctcaccttcgtagcgtaacagtgatgtgagaccacttggtaaagatcctgttaaagcctgggcggggattgcctttctctgtcacctattagctttcttattgtagggtggagacatgaattttgtttttttgtggccgagccatttgtcttgcaccgcccctcccccccatgctaattacacaaggcttgcttaaacagcggaagggaggatactgagaagtgggaggctgagagctatgggaggtggacggcggccatatgatgttttcttttcgaaaggtgagcgctttgcgcagtgatgaccctcatctatcacccttgactgatggctgctgagttaggcatccataacggtgggattataatagggaaagcggagtcttcctttgaggacttttcaggactctacttgtcatctccattttccactttactaagttattagtcatattttaccttttattatctattctatttcctcactgttactttcagatcaagaatttataagttggtcttccccttccaacttttctggtttccgctactgtgattgctaatcttgttgggaacctctgtcctaaccactttccctggtactgctttttctgttctgttatatttgcttttcgtttttatgttttgtatctgtttttctttccaggtaaaagtttcctggtttagggaaagtgggaactggggatggaaaaatggtgaaggctgtgctcgtgattaagtcttgctttttttttcccccctccagctcttctgttagaaatagtatctttgttttcctttgctgttcctcaatcccctactcttcaccccttgttttcacctattttgcgagaacccatccagatcccccttcccttcttcccctgccggcccagttatggcagagaacgatgtggacaatgagctcttggactatgaagatgatgaggtggagacagcagctgggggagatggggctgaggcccctgccaagaaggatgtcaagggctcctatgtctccatccacagctctggctttcgtgacttcctgctcaagccagagttgctccgggccattgtcgactgtggctttgagcatccgtcagaaggtaaattttctcttgggcatgtagtgctcattgggctctttaagggtacaatacaaagatgtgtttgtcgttgctcaggtggtggtaagggtttatacttaaggctagatcagggccaggtgcagtggctcacgcctgtaatcccagcactttgggaggccgaggcaggagggtggccacttgagctcaaaagtgcaagagaagcctgggcaacatagcgagactcctgtctctacaaaacgttcagaaattaagcaggtgaaggttgaggcttcagtgagccgtgattgcaccactgtgcaccagccggggcgacagtgaggaagaaaaaatcgggataagtatcaaaaacaattttggatagaggaggcttatacaggcttattctttctttcgtgatagcaccaaagtgctaatgatccaaaagtgacttccaggtctgccattcattcttgtgactggcttttcttgtctgcttatttttaattttgtcacttgacttctaattttaaatttccagaaaggtcctgcttggacctgtagtctccctctgttgggccaggccaactgtggtctctggaaacctctatgactggtttagagatgactggcttctgggtcaggtaccaagtccttcattttgtccagggttgtagtagttacgtgacccgaagtatagcaacctaagcaggagaagtggtctgtggcaggtattcaaatgtcatgaattgttacagattaagaaaaataaggacagagctaggatcattgaaggtgagcggttggtagatgcaaggggtttgttactaggactgggaaggcctagatctggaggaggctaaagctaggaggaattaggagagtctgattttgaggtgaatgtaattgagcagagagaggtaaaatgggtctggaagttggcaagaaccaggtaaatactagactttgagaattgagtggtaagaaatgggcttggcatggtgaaaaaggtagagttatctggagactgaagtctaatttatcttcctccccccccaacttttagtccagcatgagtgcatccctcaggccattctgggaatggatgtcctgtgccaggccaagtcgggcatgggaaagacagcagtgtttgtcttggccacactgcaacagctggagccagttactgggcaggtatatttggggagagtgctggggaggggattttggttaggactataagggaagggtgtttttgtcctaactacatgatgcttgcagagccatgagcacatgacctctgttacccttgacaacctgacagctgtgggggatgttctgtcgcaagcgtggggttcatgatttagatcacagaattgaagtcatttattatcggcccaggtgtgtttttgtgacagtcacttccctagaggggataatgaagagctacatttaccatatgtctccgtatacttcctgcctaaggtgtctgtgctggtgatgtgtcacactcgggagttggcttttcagatcagcaaggaatatgagcgcttctctaaatacatgcccaatgtcaaggtaagccaaggtaaagagacctgagagtgagggtgtggcaagttggagggataagaaacttgtaggccaatagtctctttaattttggagaagctttagtttgctgtggtgtaacagagtgttgagttcctatgtaacaggaggattcgtaattgggctatggatgatgcttaacacaagaccacccttttcttactactttatactgactttgaatcatatcagtttaataattttggggtatgtggcagagaaagccggaaactttaaaacagctccagtggtgtgtgaatattgaggattctggccaagtgcacaatggcttacacctgtaatctcagcagtttgggaggccaaggcgtgtggattatttgaggtcaggagtttaagaccaatgtggccaacaggatgaaaccctctctctactaaaaatgcaaaaattagccgtgcatggtggcacacacctatagtcccacctgcttgggaggctgaggcaggggaatcgcttgaacccaggaagcagaggttgtagtgagctgagattgtgccattacactccagcctgggtggcagagtgagactcccatctcaaaaaaaaagaaaaaatctgattgaagttaagcatttttggcaagaatccttcataggtgatgctgtatctcctgttatgccacaaatctggtcgacttatgttagttattttattttatttttatttatttgttttgagatggagtctcgctgtgtccttcaggctgtgagtgtagtggcgcgatctcagctcactgcaacctgcgcctcccacgttcaagcgattctcccgcctcaaccccccgagtagctgggactacagtgtgccatcatgcctggctaatttttgtttttttttagtagtgacagggtttcgccatgttggccaggctggtctcgaactcctgacctcaagtgatccacccacctcggcctcccaaagtgctgggattacaggagtgagccactgcacctggcctcattaatgattttagatttaccataggattagcgtcgtgacagtctgattccacagttgttcttttcccccttgaaaccagaaagtagtttctggtgttatttgatactgtaccaaggcccagatccccaaacaactattcacctaatggttttaacatgaaatgataatatttagcccgaagcagtaatttcatggggtttgtgtgaaaagagtttgagattctgggtttatttaggaaaccttaatgttccatgtgttttttgtggtactttacactaatctggtgatttcttgctgtcctttatttatttattttttattttttgagatggagtctcgctctgtcatccaggctggagtacagtggctcaatctcgcctcactgcaatctccacctcccgggttcaagcgattctcctgcctcagcctcctggctaaattttgtattttttgttttttagtagtaaatttgtaaattttgtattttagtagagatggggtttcaccgtgttggccaggctggtcttgaactcctggcttcaagtgatccactttccttgacctcccaaactgctgggattacaggcgtgagccactgggcctggctttattttatttttatttattttatttctttttgagatggagtatcactcttgttgcccaggctggagtacaacggtgggatcttggctcaccacaacctctgcctcccaggttctcgtgcctcagcctcctgagtagctggaattataggcgtgtgccaccacacctggctcctttattttttaaatgaagcctggcctcataaatgaaggaagttggttagattaagtcagtagaactgaattattgtcctgactgctccgactagccatgtaactttaggcaatcaccctcagtgtttggtgggggggacataaaatttttaaattaggtgacctctaaagttagttttagtttggaaacatgctaaaaattggtttagctcaaacagagtgggaaccctggggggattggactctttccttcctctgttttgagactctttgcttctggctcggcaggttgctgttttttttggtggtctgtctatcaagaaggatgaagaggtgctgaagaagaactgcccgcatatcgtcgtggggactccaggccgtatcctagccctggctcgaaataagagcctcaacctcaaacacattaaacactttattttggatgaatgtgataagatgcttgaacagctcggtgagtggcagtgctggggcttggctaatgctggggagttgttctttggagccaaatgatgtttatttgaaacaggagcacctcagtgcaaggacgactcttatctatcacccatgactgatggctctgggttccctggttggtctttattatgcttttaagcacagtaaagggtgtcatctatcatctttctatgatttttgtttttaacctttgagaataggggactttgataattttaggcataagtcatcaccaccaccaccgttttcattatagattcatatactgggagtcataggggagattctaaactgaaagagaagacagtacccttctggcatctccagcacagcatttacagtcagaatttatagctgaataagtgtctagactcaggtctgggattaatgtagagagtgtttgtagcagtttgtgtgatgtggtattctagtgtgccaggtggggttaatggaagatttttctgtaagaattgaatcttggtgaatgagagtggggttggacataggccccataagtcattacaaatgatctttggcaattctatatggtgagctataaaggtgggctccaggtagggatgtcatatttgcctgacttgatagaaaagtaatccagagagtcatagatggactctgatatctggaatataatatgtgcttgatatttgtagtctgctgaaggctggctggggcttgggcaggaaagggttgggagaaggtcccataaagcatgttttgaaggccttgagagcctctgcactgggctttatccccatttcatagttgggaactttggggttttaccttatttcttgcttggttaaaacaaacagctggaatctgatcccacttcttgattccaagtccattgctctttccattgtgttgttactatttccagcaatcttcacctcactgggaagtctacctctaatctttgtttatcatacctgcttattttctcctacaatttttttccttgttcttgtagacatgcgtcgggatgtccaggaaatttttcgcatgaccccccacgagaagcaggtcatgatgttcagtgctaccttgagcaaagagatccgtccagtctgccgcaagttcatgcaagatgtaaatacccttctaccttctctccctccactccccgcccgctgcctcctccccttcctcgccctcttcctcagactcccttgtcattcaagtgccaagaaggcggcttgtgcccaactgggagtaatgactccttgaagagacatacagaagcagagacagctagtgttagggcctgcgcgggtgccagggaaactccggaagacttggtcgggttaatgtgagagcgggtagtgttcgactttttcataaatcacaacatttttgaacctcttctcccttcgggggagggcaggatttttctgccctaccacccacccatccatcgtctcttacatgcaccctacagccacgcaccctcaaggtggcatcgagcatacagctggagccttctgctcaccaaaactcctacttcccggtggcaggagagcaagagagggacagacagatggcagggcatgtccaaaagaagagcatcagcacaaatgaatcctccccttccccacctccaggggtgggggcctttggcacctcaatccccgataccctactccttcccacccacatctccttgcacccatctggaacctcggttgatgtgagccggcaacagagaagcaccgtggcgcggcgagggaatgcagacggcacccagcggtggatggcggcagcggaggccgcggggaaacctgaccaggaagctgaggaccaaaccagcctctttttccgttcccggtttttttcctgaacccaacgcgtgccgtgccccgtttcccccaatatgtgttggggaggggtgtcctgaatggggtggtagattttttttcttaaaaaaatttttttgttttttttaatactcagaggagagggacataggaaaggtaaagtggatgtaatcgggtggttgttagggtttggggctaggtggggccaattgcataagcagtggagtgtgttcttcccctccctgcagtgttccttcccgtgggatgatcactctttagctgtatttggggctagaatgagatttgaaggaggccatggaacttctctttagaaagcctgccttggctgggcctggtggctcacctctaatcccagcactttgggaggccaaggtgggaggattgcttgagcccaggaatttgagactagctggggcagtgtagtgagactttgtctctaccagaaaaaccgggcgtggtggcgcatgcctgtagtcccagctacttgggaagctgaggcaggagggtttgcttgagcccgggacgtggaggtggcagtaagctgtaattgtgccactgtactccagcctgggtgatagagtgagaccctgtatcaaaacaaaacaaaaaacaaaacctgccttctgggattgggcttctggtttttttcccatgacacacacatcctttcctattttgtcctctgggtcttcatattaactatcttcccccaggatagtataaaaagtgttaggaaagttgggctttggagttgtggtaatttctgtctttgttactttcctccccttcagggggttttttaattttaaagatgaatgcagtgaggtataatggtgtgtgcctgtagtctcagctattcaggagactgaagcaggaggatcacttgagcccaggaatttgaggctatagtgtgctatgattgtgccagtgaatagccactgcactccagcctgggcaacatggtgagatcctgtcccttaaaagcgtatctgctgctctgaatttggtattttaacaccacttactgatacctttcctgtaaacctgtagatggtttaattcttagtcaagagaccagtctcatctaaaactatcctgttgtggtctgacggcaagtaactcatcttgagtaatttttgtttctccttaagtggcattttgactgtccattgcagcattctgatcttaaaagacatccactttgctaatgcacacgagattctcttagttgaagtaggagaatcaaatggagcagttgtcctccccccaccccatgttcttagaagcacctctgatggagttattctgaccttgagtcactgcctcccatcatttcccagatgtttggtccttgctctccctttgagaatcatctcccattttctttcctctcccacctctatttgaggtaatggcatctgtgccattgggtggtttcactgctccttgacttcatttgcagtttctttcccatgatagtttttagttgggcagtcttaaaactcatctgataggaaggaaattagatgtaatgtgagagagaccacagtaaaatgtgggtatttttgggagtggggtggggttttcaatcttctctttcctccccatccccccatggggtgtattggagatcaacttcctccacccccccaggtttaacccccccactctgccctcctcccgttccccacccccttcctcccccccagccaatggagatcttcgtggatgatgagacgaagttgacgctgcatgggttgcagcagtactacgtgaaactgaaggacaacgagaagaaccggaagctctttgaccttctggatgtccttgagttcaaccaggtcagttagacgtccagtagggggatgagcattggagcactccagctgtagcagaaacctggatattaagtacacttttattgaggaaatcacatgtgtgatgtgggagagaataatgagggtataaatatcttaggggctgagcatgagtaaggtgggagctgcttttctattctatggctggcacgggtatgtcctcaataacctcaaggaaaataaacttcaaaaattaagatccttggccaggcacggtggcttatgtgtgtaatcccagcacttggggaggctgagggaggtggatcacttgagtccaggagtttgagaccagtctgggcaacatggcgaaacttcatcactaccaaagaagaaaaaaattagccaggtgtggtggtgtatgcctgtagtcccagatactctggtggctgaggtgagaggatagcttgagcccaggaaattgaggctgcagtgaactatgattgcactactgtgctccagcttgggcaacagagtgagatcttgtctccaaaagtccttgaaggattttaggaagttgttaaaagtcttgaaacgatgtttgggggcatgttagggttcttgaatgtttaattcctctaataactgcttattcaagagaagcatttctgactgggtgcagggcagtggctcatgcccataatcccagtactttgggaggctgaggcaggagcattgcttgagcccaggacttcaagaccagcctgggtaacatagggagacgcccgtctctacaaatagtaaaaataaaaaataaaaaaagtagctgggcgtggtggtgtgcacctgtggtcccagctgcttgggatgctgaggtggaaggatctcttaaacccaggagggtggaggctgcagtgacttgcgattgcaccactgcactccagtctgggggacagagtgagaccccatctcaaaaaagtgtttaattaatatacttgtgagtggtctatttgcatttaaaactgctttctagaattaggatagctcccttaggtttaatgttttggtgagcaggaatatcagttacccctccagatcttaattctagttttttatcactttttcatgaggtgatctcatcctcatctcctagcatgtctggcaattttgatttctgaactctgtgctacctcagaggccagcttccttagggaaaaatcagtgctgaaataaagttatatttccttttctgctctaaatatatagtgggggaataagagaaatgaagaggaattcctgagaacgtaattactagaaactcccctctcccacgtaatgtctctcacacaccatggacccctattcccccaatttgcgaccccccaccccaccccacaacaggtggtgatctttgtgaagtctgtgcagcggtgcattgccttggcccagctactagtggagcagaacttcccagccattgccatccaccgtgggatgccccaggaggagaggtgagctgaagatgggaaagatattttgtgtccttgggagaaaaagacagttgagagaagggaatctcaacatgttttaaatttcctttctcacaaaggctttctcggtatcagcagtttaaagattttcaacgacgaattcttgtggctaccaacctatttggccgaggcatggacatcgagcgggtgaacattgcttttaattatgacatgcctgaggattctgacacctacctgcatcgggtaaacctcacaggctgaaaaaatcccactctcccattcccttgttttctgtttgtacatcttcattcctgcctctgggtctctttcctcttcggtcttccagtgctaccctctgtctccctccaggtggccagagcaggccggtttggcaccaagggcttggctatcacatttgtgtccgatgagaatgatgccaagatcctcaatgatgtgcaggatcgctttgaggtcaatattagtgagctgcctgatgagatagacatctcctcctacagtgagtactgatctcatgaaaccctttaggtcctccctgttccttagtgtgtttgtcctaaatcccatcacataggtcatgggcatctgatgcataatggacacttgactggttcatgccccctggtctttgatgctgtgttgggatgtttttctgacctttatgtggggtttctgtcttctctcatcatattacatcccttccctcacccccacgtccgtcctctgaacccaggcagtacaccagtgtctgcatgtgtgccgtgtgttcctgcctcactttccccttttcatgccttattctgaccatgctacgttttcttctcagttgaacagacacggtagaagactcgcccattttggaatgtgaccgtctgtccttcaggagaggacaccagggtgggggtgaaggagacactactgcccccacccctgacagcccccaccccatggcttccatcttttgcatcaccaccactcctgaacccccatttctgatttgtcagaatttttttttaacaaaactaaaaatgaaacacatgtgtctgtggtatctataagtgcttcgtccctttattgtatttggggtgaggttattttagggcatggtccagggtgaattcctataaggcctgggtgccctgcctgctgtgagatcaaaggggaatgggactaagactgcagagccctggctcccccactgcctgccaattgcctgcggtttgtggtctcttccactttctctggcctgggaagacgctggggtgtttatgatcccaaggctcctggtgggtggtgcgtgtattttcagtgccggagggtgctgtgggcactgggggaaacttaggcacctcctccaaggctctcttggtgcctcctcatctgttccttcagcttctggatcttgagcaccagggcttgggcctcccaggctccctcctgcccttcaaggagggcctggtacagctccagctgctgctccaacaactcttcagctcgggccagctcagctgtgcggtgggtcccagggccctggtcagggaattaagggagggagcatcagccagggcagggggccgaggccctgggaagctttgtcgcaggctgtggctggaagtgagaaattccaccttccctattcgtttttgaaccggtcatttaaggacacctgtactgagaaggccaggtagcttcctgtcttgggcataggcctctgggtggtagtagggggagcaaatagagttccctggcccaggggctgtaactggcttccttgaacaaggatatggggtcactggaaagaggatcagccgctcctccccgctaagaaataattaactgttaggtgagggggaatagatcctgttcaaggactttgtggactgtgctgttgtgggtgggggtggggtgagggaagggaaccctgaggtctgggctgggggaggtggggagaggagttggtagctgaactaagaaaagagctgcaggggtaggcatggtgtggggtggtgcagggtgggattgagggtttttttttcccacaccccagtgtaaattctcacaccctctgttcctacctgtggtgccacttaccctgggaggggacgtcatcttcccatttcctctggagttggtctgctcttccatgcttgctttggggttttgggagcagcacccatgggagccctggggtgccaaggaccaggagggcagaaggaggcgaaggaaatggtaccgagagagccagggcagagggaggaccatggcgggtgacctggccgggagctgtgtgagctgtccaacggccaccaggaactggttcgctccaggacttggcctcacttgagtgcctggccctgcccaggccccagcccccagccctgcccctgcccctgccccactctgccccacgtctctcccagcctggccccagacagagtccaggaacaactcctgttcctgatgtgaaaaatgtccctgccagtttaggcagaacttgctttagagcactggtgcccagcctaccacaggtctgtgattttttttttttgatctagtgtttattaggtatgaattttacaaacattagcggtagctgtggagctggagagtattgcaccttctccaagctgcatggcgagaaccaccaatagtgtggtagaacttacagccctttccaaggccgtggctctcttggcctgcagatagcctacgcatctccctatgcttgttgtggaccactgggtgtcaggtttccttctgatagtgttatggaatggatcaactaggatagcctcaaaaactttgtatgtggaatctttaaccagcccagtgagaattcaggactcagagccccacagtggcatccagcttgctcttctgtaacagactgaaggctttaagcaaactagctggttaacaccatgatagacaggcttgctgttaagttgccttcttaggaactagattttcagccaccgtggcgcttatatgtaacataaccttgcttggctgtagcccagtagcgtgctttattgggctgggtggggcggggatccctgtggagagcagagagctggtggtactgccagcagcggaccctcagaagaaagctcatgacatcagactgcttcttccatagcttctggatgtacttgtatgcaccatcttggtttacccagtggctgctgccagacagaaaggaaaggctaccacaggtcttgtgtctttttttttttttttttttgagacggagtctcgctctgttgcccaggctggagtgcagtggcgcaatctgggctcactgcaagctctgcctcccgggttcacgccattctcctgcctcaccctcccgagtagctgggactacaggtgctcgccactacgcccggctaattttttgtatttttagtggagacggggtttcaccgtattagccagggtggtctcgatctcctgacctcgtgatccgcccgtcttggcctcccaaagtgctgggattacaggcgtgagccaccgcacccggcatgcctttttcttaacactgttttctcacttcactctgcaaggtaggaattacctcactggtttgcacctgaggaaactggctcagatggtttcattcagcattcactggggaagtgtctgttgggggcagctctaggctggatgtgctcgaaggtccacagctggttgttggtagggcctggagggttcatgtctaggtccacctgacttgaaagctcatcctgaccttgcttaagtgctgattcccctttgcagatgtaccttttattgtgcttccctttattgctctttgcagatgctgttttttatttagagattggaggcttgtggcaaccctgtgtcaagcacatcaaacaggtctattggtgctattttcccaacagcaggcagacatcatgtctccatgtcacgctgtggaattctcaaaatgtttcaagcgttttcattattatacttgttacagtgacctgtaatcagttactgaagttaactattgtgattgttttgggacaccatgagcgatgctcatataagacagcaaacttaatggaaaaatgtgtgtgttgtgactgcttcaccaactggccattctcccgactctgctttccaggcctccctattccctgaggcacaacaatattgaaaggaataatccatgcggcaaatggcaaacatcattgtcttattttaagaagttgtcaaagcagccttcagcagccatgcccctgatccatggaggcaagaccctcccccagcaaaaagatcaggattagctgaagcctcatatgattgttagcatttgtttagcaattaagtattttaaaattaaagtatatggccagatacagtggctcacgcctgtaatcccagcactttgggaggccgaggtgggtggatcacttgaggtcaggagttcaagattagcctggccaacatggtgaaacctcatctctactaaaaatacaaaaattagctgggcatggtgatgggcacctgtagtcccagctacttgggaggctgagcaggagaatggcttgaactcaggaggcggaggttgcagtgagccaaaatcgtggcactgcactccagcctgggtgacagagcgagactccattaagtatatacacagttttttgtacacaatgctactgtacacttaacagactacaatatagtacaaacataacttttatgcacaataggaaactaaaaagtttgtgtgactcactttgttgctatggtctggaaacaaatcttcagtatctccgaggtatgcctgtcatttccctttccctcttcttgctggcccagaatgaccttgtttcttgcccctgtctagccctgcatgctgtaggggtttgccttctctggtaggtctgggcactttgtatcccttgtaaccttggctcctgggatatgacactggtacaactggcctcaagttctgttggactagtgagcctcccccaacacctcctgaagtagaaccaaaggcctgtgcacacaccgtgcatgtgtgagtctgcatagagatgtcagcttcctgcagggtgttctgaagggatgtcctgttgtgactggactgtgacatagccacaggcccagaggcaggagtggctcagaagggagtggctggtcccaattttgatcatctaggaacaggaaggtccttagaaaaccatgccccagaaggcaggattgctggagagtggacagctgctagccagctcgctatctggatatcactctgcattgggagggaagatggcctctgccatggtgtaagagtccaggaaccaggcagtgaggacttcccagcggtcagtgcttctcacacttgcgggccaaagcacctttagatgaggccaaagactttacgttcctcattagctgactttttcccacttaagtggaaaaagaacccagaacctttgtaaaagttttaggggagaagggctttccctcttgtatcttggtgataaggttatgcatgactcatactttaattgcaatgtgtacacagctaaagtcttaattattagaatataagagccccaaactactgttattatagataagcgaaactatgcagtatatggttaaacaatccacaactaattaacattgaaagttggccgggcgcagtggctcatgcttgtaatcccggcactttgggaggccgaggcagggggatcacttaaggtcaggagttcaagactagcctggcgaacatgatgaaaccccgtctctactaaaaatacaaaaaattagctaagcgtggtggtagccacctgtaatcccagctacttgtgaggctgaggcaggagaattgcttgaacctgggaggcggaggttgcagtgagctgagattgtgccactgcactccagcctgggcgacagagcaagactccgtctctcaaaaaaaaaaaaaaaaaaaaaaaagaaaagaaaaaaaattaactacatttttgggaggtggacagagcaatgctctgtcacccaggctggagtgcaatggcacaatctctgcttgctggaacctccgattgccgggttcaagcaattcttatgcctctgcctcccaagaagctgggattacagacgtgtgccactatgccgagctaatttttgtatttttagtacagacagggtttcaccatgttggccaggctggtcttgaacacctggcctcaagtgatccgactgcctcagcctcccagagtgctgggattacaggtgtgaaccaccgtgcctggccctctatctgttaatttaaaagattagcagccatttagaaaaaacaacaaatgagacttttgcaagacaatctaaatgatacactaataacaatcctttgggaaagtgacatttcaaccatgtgagtttctgctttaggttatgaactccaaaatggactaaatggactaacccccaataatttatagtagctagtttttttttttttcacagtaggtaattctaaaccataaataaaatagaatctgaattttggctttgttcacctgtgggaacttaattaagaaagcactggcctttgggtcggttcaaatatagtggatgaggccaggcgcagtggctcacacctgtaatctcagcactttgggaggccgaggcgggcggatcatgaggtcaagagatcgagaccatcctggccaacatggtgaaaccccgtctctactaaaaatacaaaaattagccaggcatggtggtgcacgcctgtagtcccagccactcgggaggctgaggcgggagaatcacttgaacccgggagccagaggttacagtgagctgagatcatgccactgcactccagcctggcgacagagcgagactcttgtctcaaaaaacaaaaaacaaaaccaaaaagaaagaaaaccaaatatagtggataatcgtggatctcataattgtagaaatgaaggaattaagctaaaaaaatacataaaccagaatacctagtgctaaagttgaatgtccccaccaaaactcgtgttgacatttaattgctatcctaatggtattaagatgcaagacttttttttttctttttttgagatggagtttcgctcttgttgcccaggctggagtgcaatggcacaatctcagctcactgcaacctccgcctcccatgttcaagtgattctcctgtctcagcctcctgagtagctggaattacaggcacatgccaccacgcccagctaatttttgtatttttagtagagacggggtttcatcatattggtcaggctggtcttgaactcctgacctcaggcgatccacctgccttggcctcccaaagtgctgggattacaggcatgagccaccgtgcccagccgatgtgggacctttcagggttgattagattgaatagattaatgccattgtatggcatgatagaaatcagttcagcctctttgcccttccacctctcactatgggatgatactgcagccaggccctcataagatgccagtgtcatgctcttggacttctcagcctccagctctgtgggaaaaacatttattttctttataaattacccagtctgtgctgggtgtggtggctcaagcctgtaatcccagcactttgggaggccaaggtgggtggaaggcttgagcccaggagtttgagaccagcctgggcaacatggcaaaacccatctctacaaaaaaacacaaaaattagctggtgtggtcgtgcgggtctgtggtcccagttatttaggaggctgaggtgggaggatcacttgagtctgggaggtggaggttgcagtgagtcgagatcatgccactgcactccagtctgagcgacagagagagaccctgtctgaaaaaacaacaaaataaattacccagtctgtattattctgttatagcggcaggaaacggactaagacacatagattatgttactgtgtttatttatttattgttgtttttgttattcctgactcttaatatagagtcttaatcagatgagcattctggcctggcctccgcagaaggggcctgtctttagccacggacaagaggagattaaggccagcatcatccacaaggtcaaggggctgcagagccccctaaggccagtgtgctgatgggcccctcaatattgtatcctacccagtggattggcaggactgggtgactgacaggaatcattgttgcctctatgggaaagtcttatggagatgggggctgagggatgttgaagtttagccattacattacagtgagagagattacattactaagtgtcagagacccttctgggcactttctgttactgtcacaggtggctttcacagtaaccttttaagagagctcttttcatttttcttgtacatggctgtccagttgttccagcagcatttgctgaaaagactatctttattgtattgtctttgctccttgtatttatgtgggactatttcttggctctctattctgctcaaccccatctctattaaaaatacaaaagttagtcgggcatggtggcaggctcctgtagtcccggctactcaggaggctgaggaaggagaatcacttgaacccaggaggcggaggtggcagtgagtcaagatactgccactgcactccagcctggggaacagagggagactccgtctcaaaaataaataaacaaataaaaatttaaaaattaataaataaaaataaaaaaattagctgggcatggtggtgtgtgcctgtaatctcagctacttgggaggctgaagcaggagaatcgcttgaacccaggaagcagaagttatagtgagccgagatcatgccactgcactccagcctgggcgacaaagcaagactccgtctcaaaaggaaaagaaaaaggaagctggaagctgaatgagatgggcctttcaaccaaggagttagaaggccatctggtggcagggctggcagaggaccaggagtaaataaggccagagaggacaccagggtctgggagtgaaggcactgagcttgggtccccctttggaagacaatgacctgagagctgtgagatttcagacaagttcccgaaccttttgggccctgctttcctcatctgtaaatgggataatatcagtctcaccagcttcttaaaattcaatacaatggagttgggtgtggtggctcacgcctctagtcccggcactttgggaagccgaggtgggcagactgtttgaactcaggagatgcagaacagcctggataacatagcaaaacagtctctaccaaaaatacaaacaattagctgggcatggtggtgtgtgcttgtagtcccagctactagggaggctgaggtgggaggactgcttgagcccacgaggtagaggctgcagtgagccatgattgcaccactgcactccaggctgggagacagaatgagaccctgtctcaaaacaaacaagcaaacaaacaataaaggaaatccctaccacactatcaggggcattttggctgagcgcggtggctcacgcctgtaatcccagcactttgggaggctaggctggcaggtcacctgaggtcgggagtttgagaccagcctgaccaacacggagaaaccgtctctaccaaaaatacaaaattagccgggcgtgatggtgcatgcctgtaatcccagctacttgggaggctgaggcaggagaatctcttgaacccaggaggcagaggttgaggtgggctgaaatcgcgccattgcactctagcctgggcaacaacagggaaactccatctcaaaaaaacaaaacaaaacaaaaaacaaaactcccatttttgcgaggcaaattgggctcacagaggtaagctgcatgtccctgttgatggcagagctggggtctggatgcaggtctgcttcggggtaatccgctcttttgccttccagggtcctgcctcttacaatatgagctgtcaagttagatgcctgcactcagtaaacctactctgttttaagtaaaaacaacaagaaacaaatctgaatatgctagcctatctcaggtacgttaaaggaaatttttaaatagggggttttttgaccatttgggggagttttgggggaggggccttctgtctatacttgagctgggggatgttagggttgttcatctggatctagaggttttcctgtaatgttcttactccagaaggaaatctctagatggggaaagaaggtttcagcttttattctagtaagcagggctctacctataaagagctgcttccaccactcttttttttttttttgagacggagtcttgctgtgttgcccaggttggaatgcagtagtgcaatctcggctcaccacaacctctgtcttccgggttcaagtgattctcctgcctcagcctcccaagtagctgagactacaggtgtgtgccaccatgcctggctaatttttgtatttttagtacagatgggggtttcactatgttggtcaggctggtctcgaactcctgacctcgtgatctgactgccttggcctcccaaagtgctgggattacaggcatgacccaccgcacctggcctccaccactattataatatcaccaggttccccatttgaatccttcagtgccaaaggttttgcagaattcaaatgtttttgggacttgatagggctgacctaaaagtacactcactctatattaggtagcccaggagggcctaggcagcccaagaaccaaacacatgagtgtttctgcagggaaatgtatgaatattgacatcagtaggatgaaaataaataatagtcttactttagttcagattaggtttctgtcaccaaatgaattttggtggcagcctgatgaaaaatgttggttctcagagtgtttttgagtttagaattgtggttaagggagtatggacctgttgataacaaaaacaggaacaaggccaggtgtggtggctcacacctgtaatcccagcactttgagaggctgaggttggtggatcacctgaggtcaggcattcgagatcagcttgtccaacatggcgaaaacccatctcttctaaaaatataaaaattagctgggcgtggtggcatgcgcctgtaatcctagctacttgggaggctgacgcatgagaatcacttgaacctgggaggtagaggttgcagtgagccaggatcgcaccattgcattccagcctgggcaagaagagtgaaacttcataaaaaacaaaaacaaaaacaaaaaacagagaaacaggaacaacaatcgccagcatataccaagtgcttatcgtgtgtgccaggtactctaattatgtactatgtcagttgattctcaaaacatatatggcacaacatgggtactctgaacatgggcacaatcaatgtacaatgctataatgtataacacaggacaatgtagctgttaaaagcatggacactctatctagtccatctgggttataatctctgctctaccagtgaataactgtaactctggcaaatgacttctctatgccctgtttcctcagctgggaaatgggggataatatcagtactcacctcctaagattgttgtgaggattaaatgtgttactttataagaaatgtctggcacatagcaaaggttgttattattttaatttttacacatgggcaaactaagcctcaagtaacctgtccaagaatacgtagctatgaagtgtggagctgggatttggagctggggtttgaatccaggcaatctaactccagagcctaccttctatgctactttttggctacgagcaaacaatctgtcaagaaacaaagtagctactaatctaaacagatgtgaaatttgaagaccagttgatctttggggaatgttgggttcttcagacaatggtagctcagtaatgtaaagggacaaatgacagccacatgccaacttggttaactccttccctaggtcctgatgaccaaataaccagcttatttctcaactattggttggctttcatttcaggtctggtcagctgcttatgaccttgttccccactgagcagactcaccatctgggccctggcgggcagcagcatgcagtgccgtgtccccatggcggtcctggtgggcagggtcagccccgagccgaagcagcaggcacagggcaggggcatcgtggcgggcacaggcccggtgcagtggtgggggctgcccagcatctacatcgaggcctgggtgtcgctggaggagggcctgggcccggaccagccgtcctgcagacaagtaacgacgaaagcgacgttctcggcgttggcggcgggaagtggaggccatggaactcttgggctggggaaggaaaaaaggcagcagtcaggacttcagccttggctggtccttctccctccatctctgacatcccctgttgtttctccctttggttccgtctttttttaatatcttcagcaagagatgaggcctaacctaaccctgatcctttatcagatgatagatttgaaaaaaaattttttttgaggggggtgataggatcagaggtttaatttttttaatgtaaaattcgagaaaagggtaaataattggtttaaggctcaggagcccaggtaaatttttaatttttaacaaagaactttaaaaaaacccaacagggccggatggggaaaatttttatcagcagaaatctgagttttaaaaagtcacagataatctccaataatgatctagaaattgaatatcatgtacccggcagacagatgtggaggcttcttcctctggaacctggggggaggggttactcatcagacctgcccccgcccccccaagtacccccagagccgtaggcccaaggcctgtgtttaagaagctcggagacgggaggcgggaagggcggagacactccaggctggaggaaatggcgcaagcagagacgcaggtggaggacggaagtgaactgtgaggggcgttaccggatgtcgttccgccccgaccgggtagttcttggccagatctcccaggggaaactagggaacttaaattaaaggggccgtctgaaaccagaagactggactggaggcgaggaaaaggaggcgaggggaggggagggagaaaagagagttatttggaggttttttcccgcctcctctaacttggcagagagaggagatggttcagtgatggacgaaaagatgagaagacagagaaaatagaggagataaagacaggataaaaatcacattaaacatggaaaacaaaaacaaaaaccacagtgggacaacaacagggacagatcaaaaaaaagaaaaaatacagacaaaagacggaagaagactatcgtaggatggggcaagtgagatgcaaaaatttggacttgagaaatatgtagaaaaagatggagatgttaacaacgggaggcaggggagggggcgggatggtggagagagagagaaaggtagagagttagtttagaattaagcccagaatgctcttttcccaacacaggttgcatgatgacatccttaccttttcaccgcattcacaaccctttatgcttcctctgttaccaccaatcaagttctccttctctcacctcagtactcccccgtctccgcccctgcctcatccctagacctttccgactgggatggctaacctgttgtaagcccgcagctttgggcctggtctctgctgctcccaggcggcccctttgggtactgcctgagcaagaagtgctggagaggaggaccagtcatcaataggaggatgagattgggagagacactcggtgcaggaggctgagtgagcaggggagcactaagacccaggggtagtggaggactgcagcaacgagctggaggaggagaagtaagcggtggggggtgggagccatctggtactttgacagcattcaaaacagcatcggccataacaacagaaatggccagtcagtcccaaggtatccagcagcttctgcaagctgagaagcgggcagctgagaaggtggcagatgccagaaagagtgagtctcctctttcctcccttaggagtttggaaagaaaattgggggtgggggacagcaaacattttgggaaaacccaaggctggcgggaagacagctagggtctggaggctggttaggagggaagaaatggatggatattagaatctggcacctggttggctgagagaaggctgtataactttctggaagggactgactcctgctattacattgtgtgtgtgtgggtccatccccactcactgtcctttcttctgcctccagggaaggcccggcgactgaagcaggcaaaggaggaggcacagatggaggtggagcaataccgcagagagcgagagcacgaattccagagcaagcagcaggcggtgagttgaggcagagtcgggatgagaccccactgcaagttggtgggtgcatctagtgaggtgtgtaagggtgactcaacaagaaaatatggtggcagagggctgaggctgaggggaccctggcagggaccacaacattggtgaaactttgtgatgatatgtaggagagtctgggagttttgaaggccacatagagcttgtgggcggaatgccacagtctgtgtaaagtataacatctatgtggagtatgattaacatttgtggtggagggtagagttttatggtcatggatggtgaggtggtggggatattacggtctgttttaggatgaagttgcatgttaggtctaaggggaaaggggactgtgttgatctctttggtgttgggatatttctgtgggatgggggtggtttctgagagggcctttcttctaggctttgtttcaggatctttcccctcatatgcctggacccttgtctgtttctgcttttccctttctctcttccacccctctccctaccccccaggccatgggctcccaggggaacctgtctgctgaggtggagcaggctacaaggcgccaggtgcagggcatgcagagctcccagcagagaaaccgagagcgtgtcctggcccagcttcttggcatggtctgcgacgtcaggccccaggtccaccccaactaccggatttctgcctagggccaccgtagggcctgactccttctgccagttccctccctcaaagaaatcctccaatcaaaatcacctcccaccataatccctgtcttctttccatcccctagaaatcctgggaggcaggatccaataattttcctgtgacacttataaatatcctgctcacatctgaatctccttgttgttctttaaccctcactgggactttgtaaacttccaagtcattctcacctaaaccctctgtgaaatttgtaatatggggaagtaggaatgtggaaaacatcctgacttcagtgtctggccgatgtgggtccctctcttgaccctgtcacttgctggctgtgaaaccaggacaagctacttaacttggtagcctcgatgtcctcctctgtgaaactgggatgataataatgcctaccttgtgagggttgcttcaatgattaggaatcattctgtaaagtctagcacagttccttgcatgttgtagcagtgattcagtaagtagcaaccctgtgatactattaccaccacctgctcactggtcaaaacctacacagctgtttcctcacgtccatcactggctctctaattccacttgttcattctgtgaccctagttattttctgaaaaattggttcttctcttttcccagagaccttctgatctccaaaaagaggagatgactacatttagcccctctcttataattccaggtagataactgcattttgtagcctctctttgtttttcttttgctgatctttgtctttattagattttcctcctttcctatttccccaaagacttatcagatgctcattgctttctaagatctaaaatgatactgtgttccctcatatgcatgcccttcctttctatatccttgacaccttactttcccattgtaacaataaaaaaagtatcaataaaataattattggcaaataaattggtgagttgaagcagcctccttttgcctcatcatttctcattttcagtcactttgttttttttttttttgagatggagttttgctcttgttgcccaggctggaatacaatggcgtgatctcagctcattgcaacctctgcctcccaggttcaagcgattctcctgcctcagcctcccaagttgctggaattatgggtgtgtgccaccacgcctggctattttttgtatttttagtagagatggggtttcgccatgttggtcaggctggtctcaaactcctgacctcaagtgatccacctgccttggcctcccaaagtgctgagattagaggtgtgagccactgtgcctggccttcagtcactttcttgttttttgtttacatattccctaaacagcccaaatggctatcctttgaaacttcttggagaaacaagaacaagtagtactttattatttctctaaagtgagaaacatggttcctcatttgggaatctgaggactatagatcgcaactgtagagaaaagctggagtgtaggagcaagtgctctttgcccctttaccttgcattttcttcatagcacttactgctactggttttttgagacaaggtcctgctgtgttgcccaggctggagttccagctcacggcagccttgaccccctggactcaaatgatcctcccacttcagcctcctgagtagctgggattacgggcgagtgccactatgccttgctaattttaaaattttttgtagagatggggtctcacttgcccaggctggtctgaaactcctgggctcaagcaatccttcgggctcggcttcctcaagggttgggttacaggcctgagccactgcaccctgaccacttatcgatacttgacattatatttgtgtttatgtgttttctttcctgtaatgtaaacactgtgagaacagggctgttcaccgttgtgtccccagatcctaggacaacatgtggcacaagggaggcagttgataaatacttttgaataaattaaatgatacttgggaaaataccttctatgacaccattcttgaattagttacttcatttgtcactgaagacaagcttacttcaccaagaatttgaaccaataaggtaacctgcagtgtatttactaaccagattctttgagcagggaggcagaatacaatagagaatgagagatgtttgcatcctggctgtaacctcaccagccgtactgcttgagatatgttgctttgcttcgcttctgtcaataagatgagaataacggtacctactccttagtattaaatgattaagtatgttaacagggagagggccaaacgtttgttgttttattacacagcaggacatcaggtcttacttttgtggctccccatctcaaagacggggatagcaaatgtttcattcaggaaaaaaatccaggttgaacaatggggctgttggggcggggccaagaacattctgctcgaattaacagtattaatgggccgggcgcggtggctcacgcctgtaatcccagcactctgggaggccgaagtgggtggatcacctgaggtcatacatgggtgaagccccgtctctactaaaaaaacaaaaatttgctgggcgtggtggcgggcgcctgtaatcctagctactcgggaggctgaggcaggagaatcgcttgaacccgggaagcagcggttgcagtgagccgagatcaggacattgcactcccgcctgggcgacagggcgagactctgtctcaaaacaaaaacaaaaacagtattaatggaatgtagtataaccctcaagccctactattaacacttggggccgaatccagaccccgtcttcccgctcggattcagaacaccttcctgactcactggccctagggcatcagctacctcggacagcatccttttgggaaaataccgcccaccagccccacgactgggaaagagtcgggaaacacccccgagcaatccagttccctgagacttccctcctccctcccctcagctagggcctgccggttcctagtgcgtgcccagcagtcctcaggtcaccttcactaccgggccaaggaccccgtgggaactcgcagccttcgccacactcgttcctcgcgcatccacggaggggtgcctacagagaagacctgcgtggcaaaaacctaaacgaagagatgaggggcatggagaggagtaggataagagaataaagataacagtgggggggagacgttagtttcctttatatcttttgttactggcggtagcagtgaagttagaaacggttttaaaacaaatttcagacaggcattttccaaaggcaagcctggagcgcacggatctgtataaccgcggaaggccctgtttccggtcccttgcgcctgcgctcttgcagccaagaaggcgggaggctggagtagagggaagcctgcaaccggaagtgaaggcagatttccctccttcgtcgctgttgctgccgccatacgcgctctccctgtttaggtaagctttggccttcgctacaatccgtttccatctgcgcttctccgcacccatcccgtcacatgggttcctgatacccttttcacaggcgatggtctggtcgctggggcctagttggttcgctatttccttagcttgcatccctttcgagagcaaagagctcctgggggaaggaagggaagctaaggggggacccaatccaagatggtgtcctcggcgccattgtgttcgttttgctcccttcttccaatgggttcttctcatattggaggcctcagcatcaatgagaggcggtgctcggcgtcccttggtcttggtatttgcggagggcggggctcttctcaccttccttgttctttcttgagctctttttcggccctcggtgggactgggaggaggagctggtttctgggcccagttggatttttctcaccttgacttgcccaacttaatttggagtgccttccaagtgtttacgatacgattggtgtcattgtatgtttctccaaaaggagtctcaccttcgtagcgtaacagtgatgtgagaccacttggtaaagatcctgttaaagcctgggcggggattgcctttctctgtcacctattagctttcttattgtagggtggagacatgaattttgtttttttgtggccgagccatttgtcttgcaccgcccctcccccccatgctaattacacaaggcttgcttaaacagcggaagggaggatactgagaagtgggaggctgagagctatgggaggtggacggcggccatatgatgttttcttttcgaaaggtgagcgctttgcgcagtgatgaccctcatctatcacccttgactgatggctgctgagttaggcatccataacggtgggattataatagggaaagcggagtcttcctttgaggacttttcaggactctacttgtcatctccattttccactttactaagttattagtcatattttaccttttattatctattctatttcctcactgttactttcagatcaagaatttataagttggtcttccccttccaacttttctggtttccgctactgtgattgctaatcttgttgggaacctctgtcctaaccactttccctggtactgctttttctgttctgttatatttgcttttcgtttttatgttttgtatctgtttttctttccaggtaaaagtttcctggtttagggaaagtgggaactggggatggaaaagaggtcgtgattaagtcttgctttttttttcccccctccagctcttctgttagaaatagtatctttgttttcctttgctgttcctcaatcccctactcttcaccccttgttttcacctattttgcgagaacccatccagatcccccttcccttcttcccctgccggcccagttatggcagagaacgatgtggacaatgagctcttggactatgaagatgatgaggtggagacagcagctgggggagatggggctgaggcccctgccaagaaggatgtcaagggctcctatgtctccatccacagctctggctttcgtgacttcctgctcaagccagagttgctccgggccattgtcgactgtggctttgagcatccgtcagaaggtaaattttctcttgggcatgtagtgctcattgggctctttaagggtacaatacaaagatgtgtttgtcgttgctcaggtggtggtaagggtttatacttaaggctagatcagggccaggtgcagtggctcacgcctgtaatcccagcactttgggaggccgaggcaggagggtggccacttgagctcaaaagtgcaagagaagcctgggcaacatagcgagactcctgtctctacaaaacgttcagaaattaagcaggtgaaggttgaggcttcagtgagccgtgattgcaccactgtgcaccagccggggcgacagtgaggaagaaaaaatcaggggataagtatcaaaaacaattttggatagaggaggcttatacaggcttattctttctttcgtgatagcaccaaagtgctaatgatccaaaagtgacttccaggtctgccattcattcttgtgactggcttttcttgtctgcttatttttaattttgtcacttgacttctaattttaaatttccagaaaggtcctgcttggacctgtagtctccctctgttgggccaggccaactgtggtctctggaaacctctatgactggtttagagatgactggcttctgggtcaggtaccaagtccttcattttgtccagggttgtagtagttacgtgacccgaagtatagcaacctaagcaggagaagtggtctgtggcaggtattcaaatgtcatgaattgttacagattaagaaaaataaggacagagctaggatcattgaaggtgagcggttggtagatgcaaggggtttgttactaggactgggaaggcctagatctggaggaggctaaagctaggaggaattaggagagtctgattttgaggtgaatgtaattgagcagagagaggtaaaatgggtctggaagttggcaagaaccaggtaaatactagactttgagaattgagtggtaagaaatgggcttggcatggtgaaaaaggtagagttatctggagactgaagtctaatttatcttcctccccccccaacttttagtccagcatgagtgcatccctcaggccattctgggaatggatgtcctgtgccaggccaagtcgggcatgggaaagacagcagtgtttgtcttggccacactgcaacagctggagccagttactgggcaggtatatttggggagagtgctggggaggggattttggttaggactataagggaagggtgtttttgtcctaactacatgatgcttgcagagccatgagcacatgacctctgttacccttgacaacctgacagctgtgggggatgttctgtcgcaagcgtggggttcatgatttagatcacagaattgaagtcatttattatcggcccaggtgtgtttttgtgacagtcacttccctagaggggataatgaagagctacatttaccatatgtctccgtctacttcctgcctaaggtgtctgtgctggtgatgtgtcacactcgggagttggcttttcagatcagcaaggaatatgagcgcttctctaaatacatgcccaatgtcaaggtaagccaaggtaaagagacctgagagtgagggtgtggcaagttggagggataagaaacttgtaggccaatagtctctttaattttggagaagctttagtttgctgtggtgtaacagagtgttgagttcctatgtaacaggaggattcgtaattgggctatggatgatgcttaacacaagaccacccttttcttactactttatactgactttgaatcatatcagtttaataattttggggtatgtggcagagaaagccggaaactttaaaacagctccagtggtgtgtgaatattgaggattctggccaagtgcacaatggcttacacctgtaatctcagcagtttgggaggccaaggcgtgtggattatttgaggtcaggagtttaagaccaatgtggccaacaggatgaaaccctctctctactaaaaatgcaaaaattagccgtgcatggtggcacacacctatagtcccacctgcttgggaggctgaggcaggggaatcgcttgaacccaggaagcagaggttgtagtgagctgggattgtgccattacactccagcctgggtggcagagtgagactcccatctcaaaaaaaaagaaaaaatctgattgaagttaagcatttttggcaagaatccttcataggtgatgctgtatctcctgttatgccacaaatctggtcgacttatgttagttattttattttatttttatttatttgttttgagatggagtctcgctgtgtccttcaggctgtgagtgtagtggcgcgatctcagctcactgcaacctgcgcctcccacgttcaagcgattctcccgcctcaaccccccgagtagctgggactacagtgtgccatcatgcctggctaatttttgtttttttttagtagtgacagggtttcgccatgttggccaggctggtctcgaactcctgacctcaagtgatccacccacctcggcctcccaaagtgctgggattacaggagtgagccactgcacctggcctcattaatgattttagatttaccataggattagcgtcgtgacagtctgattccacagttcttttcccccttgaaaccagaaagtagtttctggtgttatttgatactgtaccaaggcccagatccccaaacaactattcacctaatggttttaacatgaaatgataatatttagcccgaagcagtaatttcatggggtttgtgtgaaaagagtttgagattctgggtttatttaggaaaccttaatgttccatgtgttttttgtggtactttacactaatctggtgatttcttgctgtcctttatttatttattttttattttttgagatggagtctcgctctgtcatccaggctggagtacagtggctcaatctcgcctcactgcaatctccacctcccgggttcaagcgattctcctgcctcagcctcctggctaaattttgtattttttgttttttagtagtaaatttgtaaattttgtattttagtagagatggggtttcaccgtgttggccaggctggtcttgaactcctggcttcaagtgatccactttccttgacctcccaaactgctgggattacaggcgtgagccactgggcctggctttattttatttttatttattttatttctttttgagatggagtatcactcttgttgcccaggctggagtacaacggtgggatcttggctcaccacaacctctgcctcccaggttctcgtgcctcagcctcctgagtagctggaattataggcgtgtgccaccacacctggctcctttattttttaaatgaagcctggcctcataaatgaaggaagttggttagattaagtcagtagaactgaattattgtcctgactgctccgactagccatgtaactttaggcaatcaccctcagtgtttggtgggggggacataaaatttttaaattaggtgacctctaaagttagttttagtttggaaacatgctaaaaattggtttagctcaaacagagtgggaaccctggggggattggactctttccttcctctgttttgagactctttgcttctggctcggcaggttgctgttttttttggtggtctgtctatcaagaaggatgaagaggtgctgaagaagaactgcccgcatatcgtcgtggggactccaggccgtatcctagccctggctcgaaataagagcctcaacctcaaacacattaaacactttattttggatgaatgtgataagatgcttgaacagctcggtgagtggcagtgctggggcttggctaatgctggggagttgttctttggagccaaatgatgtttatttgaaacaggagcacctcagtgcaaggacgactcttatctatcacccatgactgatggctctgggttccctggttggtctttattatgcttttaagcacagtaaagggtgtcatctatcatctttctatgatttttgtttttaacctttgagaataggggactttgataattttaggcataagtcatcaccaccaccaccgttttcattatagattcatatactgggagtcataggggagattctaaactgaaagagaagacagtacccttctggcatctccagcacagcatttacagtcagaatttatagctgaataagtgtctagactcaggtctgggattaatgtagagagtgtttgtagcagtttgtgtgatgtggtattctagtgtgccaggtggggttaatggaagatttttctgtaagaattgaatcttggtgaatgagagtggggttggacataggccccataagtcattacaaatgatctttggcaattctatatggtaagctataaaggtgggctccaggtagggatgtcatatttgcctgacttgatagaaaagtaatccagagagtcatagatggactctgatatctggaatataatatgtgcttgatatttgtagtctgctgaaggctggctggggcttgggcaggaaagggttgggagaaggtcccataaagcatgttttgaaggccttgagagcctctgcactgggctttatccccatttcatagttgggaactttggggttttaccttatttcttgcttggttaaaacaaacagctggaatctgatcccacttcttgattccaagtccattgctctttccattgtgttgttactatttccagcaatcttcacctcactgggaagtctacctctaatctttgtttatcatacctgcttattttctcctacaatttttttccttgttcttgtagacatgcgtcgggatgtccaggaaatttttcgcatgaccccccacgagaagcaggtcatgatgttcagtgctaccttgagcaaagagatccgtccagtctgccgcaagttcatgcaagatgtaaatacccttctaccttctctccctccactccccgcccgctgcctcctccccttcctcgccctcttcctcagactcccttgtcattcaagtgccaagaaggcggcttgtgcccaactgggagtaatgactccttgaagagacatacagaagcagagacagctagtgttagggcctgcgcgggtgccagggaaactccggaagacttggtcgggttaatgtgagagcgggtagtgttcgactttttcataaatcacaacatttttgaacctcttctcccttcgggggagggcaggatttttctgccctaccacccacccatccatcgtctcttacatgcaccctacagccacgcaccctcaaggtggcatcgagcatacagctggagccttctgctcaccaaaactcctacttcccggtggcaggagagcaagagagggacagacagatggcagggcatgtccaaaagaagagcatcagcacaaatgaatcctccccttccccacctccaggggtgggggcctttggcacctcaatccccgataccctactccttcccacccacatctccttgcacccatctggaacctcggttgatgtgagccggcaacagagaagcaccgtggcgcggcgagggaatgcagacggcacccagcggtggatggcggcagcggaggccgcggggaaacctgaccaggaagctgaggaccaaaccagcctctttttccgttcccggtttttttcctgaacccaacgcgtgccgtgccccgtttcccccaatatgtgttggggaggggtgtcctgaatggggtggtagattttttttcttaaaaaaatttttttgttttttttaatactcagaggagagggacataggaaaggtaaagtggatgtaatcgggtggttgttagggtttggggctaggtggggccaattgcataagcagtggagtgtgttcttcccctccctgcagtgttccttcccgtgggatgatcactctttagctgtatttggggctagaatgagatttgaaggaggccatggaacttctctttagaaagcctgccttggctgggcctggtggctcacctctaatcccagcactttgggaggccaaggtgggaggattgcttgagcccaggaatttgagactagctggggcagtgtagtgagactttgtctctaccagaaaaaccgggcgtggtggcgcatgcctgtagtcccagctacttgggaagctgaggcaggagggtttgcttgagcccgggacgtggaggtggcagtaagctgtaattgtgccactgtactccagcctgggtgatagagtgagaccctgtatcaaaacaaaacaaaaaacaaaacctgccttctgggattgggcttctggtttttttcccatgacacacacatcctttcctattttgtcctctgggtcttcatattaactatcttcccccaggatagtataaaaagtgttaggaaagttgggctttggagttgtggtaatttctgtctttgttactttcctccccttcagggggttttttaattttaaagatgaatgcagtgaggtataatggtgtgtgcctgtagtctcagctattcaggagactgaagcaggaggatcacttgagcccaggaatttgaggctatagtgtgctatgattgtgccagtgaatagccactgcactccagcctgggcaacatggtgagatcctgtcccttaaaagcgtatctgctgctctgaatttggtattttaacaccacttactgatacctttcctgtaaacctgtagatggtttaattcttagtcaagagaccagtctcatctaaaactatcctgttgtggtctgacggcaagtaactcatcttgagtaatttttgtttctccttaagtggcattttgactgtccattgcagcattctgatcttaaaagacatccactttgctaatgcacacgagattctcttagttgaagtaggagaatcaaatggagcagttgtcctccccccaccccatgttcttagaagcacctctgatggagttattctgaccttgagtcactgcctcccatcatttcccagatgtttggtccttgctctccctttgagaatcatctcccattttctttcctctcccacctctatttgaggtaatggcatctgtgccattgggtggtttcactgctccttgacttcatttgcagtttctttcccatgatagtttttagttgggcagtcttaaaactcatctgataggaaggaaattagatgtaatgtgagagagaccacagtaaaatgtgggtatttttgggagtggggtggggttttcaatcttctctttcctccccatccccccatggggtgtattggagatcaacttcctccacccccccaggtttaacccccccactctgccctcctcccgttccccacccccttcctc

SEQ ID NO: 1593 - DNA, 1658 bp, Homo sapiens
ctaaaggctgccgccatacgcgctctccctgtttagctcttctgttagaaatagtatctttgttttcctttgctgttcctcaatcccctactcttcaccccttgttttcacctattttgcgagaacccatccagatcccccttcccttcttcccctgccggcccagttatggcagagaacgatgtggacaatgagctcttggactatgaagatgatgaggtggagacagcagctgggggagatggggctgaggcccctgccaagaaggatgtcaagggctcctatgtctccatccacagctctggctttcgtgacttcctgctcaagccagagttgctccgggccattgtcgactgtggctttgagcatccgtcagaagtccagcatgagtgcatccctcaggccattctgggaatggatgtcctgtgccaggccaagtcgggcatgggaaagacagcagtgtttgtcttggccacactgcaacagctggagccagttactgggcaggtgtctgtactggtgatgtgtcacactcgggagttggcttttcagatcagcaaggaatatgagcgcttctctaaatacatgcccaatgtcaaggttgctgttttttttggtggtctgtctatcaagaaggatgaagaggtgctgaagaagaactgcccgcatatcgtcgtggggactccaggccgtatcctagccctggctcgaaataagagcctcaacctcaaacacattaaacactttattttggatgaatgtgataagatgcttgaacagctcgacatgcgtcgggatgtccaggaaatttttcgcatgaccccccacgagaagcaggtcatgatgttcagtgctaccttgagcaaagagatccgtccagtctgccgcaagttcatgcaagatccaatggagatcttcgtggatgatgagacgaagttgacgctgcatgggttgcagcagtactacgtgaaactgaaggacaacgagaagaaccggaagctctttgaccttctggatgtccttgagttcaaccaggtggtgatctttgtgaagtctgtgcagcggtgcattgccttggcccagctactagtggagcagaacttcccagccattgccatccaccgtgggatgccccaggaggagaggctttctcggtatcagcagtttaaagattttcaacgacgaattcttgtggctaccaacctatttggccgaggcatggacatcgagcgggtgaacattgcttttaattatgacatgcctgaggattctgacacctacctgcatcgggtggccagagcaggccggtttggcaccaagggcttggctatcacatttgtgtccgatgagaatgatgccaagatcctcaatgatgtgcaggatcgctttgaggtcaatattagtgagctgcctgatgagatagacatctcctcctacattgaacagacacggtagaagactcgcccattttggaatgtgaccgtctgtccttcaggagaggacaccagggtggggtgaaggagacactactgcccccacccctgacagcccccaccccatggcttccatcttttgcatcaccaccactcctgaacccccatttctgatttgtcagaattttttttttaacaaaactaaaaatgaaaaaaaaaaaaaaa

SEQ ID NO: 1594 - DNA, 1287 bp, Homo sapiens
atggcagagaacgatgtggacaatgagctcttggactatgaagatgatgaggtggagacagcagctgggggagatggggctgaggcccctgccaagaaggatgtcaagggctcctatgtctccatccacagctctggctttcgtgacttcctgctcaagccagagttgctccgggccattgtcgactgtggctttgagcatccgtcagaagtccagcatgagtgcatccctcaggccattctgggaatggatgtcctgtgccaggccaagtcgggcatgggaaagacagcagtgtttgtcttggccacactgcaacagctggagccagttactgggcaggtgtctgtactggtgatgtgtcacactcgggagttggcttttcagatcagcaaggaatatgagcgcttctctaaatacatgcccaatgtcaaggttgctgttttttttggtggtctgtctatcaagaaggatgaagaggtgctgaagaagaactgcccgcatatcgtcgtggggactccaggccgtatcctagccctggctcgaaataagagcctcaacctcaaacacattaaacactttattttggatgaatgtgataagatgcttgaacagctcgacatgcgtcgggatgtccaggaaatttttcgcatgaccccccacgagaagcaggtcatgatgttcagtgctaccttgagcaaagagatccgtccagtctgccgcaagttcatgcaagatccaatggagatcttcgtggatgatgagacgaagttgacgctgcatgggttgcagcagtactacgtgaaactgaaggacaacgagaagaaccggaagctctttgaccttctggatgtccttgagttcaaccaggtggtgatctttgtgaagtctgtgcagcggtgcattgccttggcccagctactagtggagcagaacttcccagccattgccatccaccgtgggatgccccaggaggagaggctttctcggtatcagcagtttaaagattttcaacgacgaattcttgtggctaccaacctatttggccgaggcatggacatcgagcgggtgaacattgcttttaattatgacatgcctgaggattctgacacctacctgcatcgggtggccagagcaggccggtttggcaccaagggcttggctatcacatttgtgtccgatgagaatgatgccaagatcctcaatgatgtgcaggatcgctttgaggtcaatattagtgagctgcctgatgagatagacatctcctcctacattgaacagacacggtag
